United States Patent Application Publication US 2004/0034888 A1 - sequence listing, part 6

SEQ ID NO: 12336 - DNA, 493 bp, Zea mays
  Clone ID: 701167894_FLI
gcagcagtcacgtacagccaagcagccaggtaccagctgcctgagggttgggtagatgggtaagctgtgctgcagcaacgaggcggaggaggaggccgggttcaacctcctggggctgctggtcgccgccatcatcgcgctggtgttcatgctcctctgcgcgccgcccaggaggcgctgcgtcgccgtctacccgtgctgctgacccctcagtcagcgctcgcgcctcctcgctgtgccgctgccgctgcctggccctcctcgtgcgggacaggagcttctggatccaaccaacaggtttcggatcagcttcagcatgtgtgcaggggagcttcaagttcttggggggaggggagcagagcaggacaggcattggttcctcacatcatctttcgatccaccaataatttctactcaactgtaatatccatcctgctccaactcatgtaatccttttgttctggcgaaccagggcgttccttcgtctatagcc

SEQ ID NO: 12337 - DNA, 1105 bp, Zea mays
  Clone ID: 701168182_FLI
ggctttggtgctgtctataagggcatccttcgtgatggtcaagaaattgcagtgaagaggctgtcacagagttcagggcaagggatacaagagctgaaaaacgagcttgttttggttgccaagctccaacaaaagaaccttgttaggcttgttggtgtttgcttgcaagaacatgagaaactgcttgtgtatgaatacatgcccaatagaagcatcgacaccatccttttcgatcctgagagaaacaaggagctagattggggaaccagattcaagataataaatggaattgccagaggactacagtatctccatgaggattctcagctgaagatcattcaccgggaccttaaagcgagcaatgtccttttagactctgattatacacctaagatttcagattttggcctggctaggctatttggaggggatcaaacccgggagattacaagtcgcgttgttggaacatatgggtatatggcacccgagtatgccatgcgtggccactattctataaagtccgatgttttcagctttggcgtcttggttctagaaatcttaaccggaagaagaagcagtggttcctttaacatcgaccagtctgttgacctcttaagtcttgtttgggagcactggaccatgggaacaattgctgaggttatggacccatctctgagaggcaaagctcctgcacagcagatgctgaaatgtgtccacatcgcgctactgtgtgttcaggacagtccggtcgataggccgatgatgtcgacagtaaacgtcatgctcagcagcagcacttcctctctccaggctccgttgaagccagtatttttcattcccaagagtggttattactcaactgtttattcagaatcatatcctacagcttcccaaaccacaggggcggtatcaccaaatgaagtgtcaattacagaattggaaccaagatgagccttgaagcatcatgttgccacttgctagagtaattggattattatattgcatgaataaactggacatagcgcaatgctctagcgtctgtattactgacttttcagttatgtttccactggcccctctaattataaagtcgtatatttcagtt

SEQ ID NO: 12338 - DNA, 652 bp, Zea mays
  Clone ID: 701168423_FLI
agcgcggctccactcaaagcttgagccttccttttcttttcttgtttttgttttattttcttggtaggggggagtcgtcttctccatctctccttagcctaggagaacgagagatccagaggcaaaagcttcagggtttgtaaaaattctagatctaaccggactaaccagaaaacaaaacaaaaaaagacgaaagcatgagccacttcgccgccgccatgaagagcccccttgcggtcgccgtcgccgcgcccgccggcgccgccgacgctaagagcccgctcttctgccccaagccgcggcgccccgcggcgccgctgcggtgccaccagagcggcggcttctccgacgccggcacggatctgctcgacctcctcctctcgaagggcgacgagagcggcctgtcgtcggcgtccccgcagccgccgctgttctgcggctcgccgccgcggcgagcgtcgaacccggtggtccacgacagcaggttcggcgcggactgcccgcccatgcccgtgccagggctgcccgtgcaccggccaagcccgcgcccgtcgacggcggcgccgtccatgtcgccgcgcgggtgtgcccgcgcgcggttcgcgtttccagcccgccgcggtccgcgtcgagggttttgactgcctcgacc

SEQ ID NO: 12339 - DNA, 582 bp, Zea mays
  Clone ID: 701168479_FLI
ggcgaattggatcgtcagaagctgggggtgagggagggatggaggcgactgtggaccacctgagcgcggcgtacgacgacttcatggcggcggcggcggctgtggtggaggcccgcgtacagtcgggcggcgagaagaagacggcggccacggacgccgcgctcgaggccttcaagcagcgctgggagatcttccgcgtcgcctgcgaccacgccgaagagctcgtcgagtccatccgccagcgcatcggctccgagtgcctcgtcgacgaggccacggggtccgcctccgccggatccgttgccgcccccggcatcaagcccatcagcgccgtccgcctcgagcagatgagcaaggccgtccgatggctcgtcatcgagctccagcacggcgcctctgctcaagggaccggcggcagtggcggtgccgctaccccaaatgccggcgctggagggcaacacccggaggagggtgcccagtaggtatggactatggagttactgaattaaactagtagcatcgcccttctcatatgaaaattgtagcatttttccttcaatagaaaacaaagaacttgtcgtt

SEQ ID NO: 12340 - DNA, 1002 bp, Zea mays
  Clone ID: 701168564_FLI
ccgggcaccaccaccaccaccccagccgcacagctcactccagccgaaagcacaagcacgccatggcagaggagaagaagaggcacaagcacaagcacaaggagaaggagaaggagaagcagccgggcggcggcacggagcaggcggcgcacttcaagccgtgcggcgacgtgaagggcatccggttcgggggccagttcatcgtgaagtcgttcacggtgcggcgggcgtcgcccctggagctgctgcggctgctgggcatcccgccgtcgtacctgagcgagtgccagagcctgccgttcccgtccaccaccgcctacatgcccacgggcttcaccatcctggcgcaccaggcgtggcacacgctgacgctgggcctgggcaccaacaagtccaaggcggcgctcttcgtgttcgagtccgaggccatgaaggcggccgtggaccgcctgtggcccgccgtcatcccgctcggggacgtcaacaggaggctcatccgcggcctcacgggcagcgagatggcgcgcttcaagttccgcaagggctgcctcaccatctacgtctacgccgtgcgccggctcggcgccgccgggttcatgcgcaccgacgacctcaggcgggtgctgcagtccgtcgtcgagctcaaggacttcctggaccacacagccatgctcgccatcccgagccagaagagcatcaccctgcagtcccggacagcggtggctcactgagaggagatcgtcgtcacagggcatctcacctccagagcctcgagtctgatctggttctgattctgatgacgccgcaagaacctcgatcggttcagcatcgcagaacagcctgaacaggtacggtcgtcggtttgtagctgtaatcttcagagggcctatctcattttttttgcccccctctccctctctcggttggattcgtttgttcagtgtcggtggtgcaagtgttcgcctcctctgctgggagagcagatgtatagatctgttgagc

SEQ ID NO: 12341 - DNA, 365 bp, Zea mays
  Clone ID: 701168807_FLI
gagcacggacgtccactctatggagacgtttttggtgttctgcagcaggacgaacctaactacgataacttgttttcttcaaccttgcaggatgaacctgttgatcgcagcaaacactggggagatttggaggaagaggaggaggaagaagaggaagaggaggaagaggaagaaccaatggaagacgaggaaatggaagatggaattcagtctgtcgataccatctcaagtactccaactggtgttgaaacacctgatgttatcgaccttcggaagctgcagaggaaggagactgacaagcaggcagaacggccgctgtaccaggttcttgaaaaaaaaaaaaaaagcggctcatctagaactag

SEQ ID NO: 12342 - DNA, 278 bp, Zea mays
  Clone ID: 701168856_FLI
gtacggcgtacccaactttggactgttgcgatcgagcacctgtctatctgcaggctgctgcgtgtgctgctgtagtcaagctagacgtgcctgcaggcgtgttcttcctttcacttgcgttgtgtcaggcaggcctctctccttcctccgcggcacatgccaagttgtgagcacgacgtttttcagatgaggggtttctgtcggttcgccggggatgccatgtggggccgccggggagccggcgcgcgcgcaacctaacgcgaaaaaaaggaacggag

SEQ ID NO: 12343 - DNA, 532 bp, Zea mays
  Clone ID: 701168874_FLI
cacttcccactcatctcgtcctcatcctccgctccccacccacccccacccccacccccaccccacagatctcgccgcggccaccgcttcctctatggccgcgccagcccgccgccttctcctgctcgtcgtcaccgtagctggagccctggcgctccccgtggcggcccagatcaaggaggagtccttcaaggaggacccgcgctcgtccatcatgttcgaaaaattcggcctcacgggccgccacgagaccgccgacatcaacaccttcaaatggggcgtggcgaaccgcggcgcatccatccgcgtcggccgcgacaccgagagggagggcaagggctacttcgaggaccgcaggccggcgtccaacatggacccctacgtcgtcaccggcatgatcgccgagaccaccatcctgtggaatggaaactgatcaagcatgtgcattctcgagggagcccactgtttttcttctgcacaacgcatccgccgtggtgtcgctttggttttgaaatttagattccgttgtcct

SEQ ID NO: 12344 - DNA, 909 bp, Zea mays
  Clone ID: 701168881_FLI
gatttatggagtgatgatgaggacaacgagaagatgtcgagatcctggagttccacctctgatgaatcattgttcaactgtgatgtgttatggtccaacaggaagcgtccagggcacctgtactttgagttctttgaagtaggttcaccttatggaagggttcctctcattgacaaggtttatgaactatcccagggctttcctggattgacatcactgaagagtgctgagctttcgcctgttagctggatgtcagttgcctggtaccctatataccacattccttaccagcgcagcgtgaaggacttatctgcatgcttcctaacttaccataccatttcctcctcgtttcaagatcacgggcttgagaccatgaccactgattgttgccatccagttgcaaacggcaaacaaaatggccacatggataagaagagcaacaccgtatcactgcctccatttggcctcgcagcacacaagatacaaggttccctctggaccaaccccatgacaggagaccgcagaaagatggacttcctcttcagtgcggcagactcctggctgaagcagcttggagtccagcatcatgacttcaacttcttcatcactcaccccatgtgaactgctgatccggagtggcttgcaaagaaccacatgggtacagtttgaagctagttatattacctacaccaccaccaacggggtagcaaaacgtttacagtacaatgcactggtgaaacgagtctaacaatcgcaggatagatttatacttgagtttactgctgcagcgaataccaaacatgtcggcactcaaaaaggttttctgtttcttgtttcttggcagaaaatgtaactgatctgtacagaagttttgcaactaatttggtatccaatgtgggggttggatcc

SEQ ID NO: 12345 - DNA, 205 bp, Zea mays
  Clone ID: 701168909_FLI
catttatttacttatctatgggctttgaaactagaaacaatgcaacatatatcgactaacagaataaagcacaccatagcagatctatgttgcattgtttctagtttcaaagccatttatttacttatctatgatttctacacacggcctaataatcttgctaaggccctgattgaatggaaaatatttttttgggagttttagg

SEQ ID NO: 12346 - DNA, 998 bp, Zea mays
  Clone ID: 701168951_FLI
gatgcatcaagactcttagcatgaactccaagtatctggtctcaggagggactgatgaggccttgcgtttttacaatcttgaaaccaagaaggaggaaggaatgttattacatcacgaaggttctattacttgcagtgctttgcacgagaacaagtacattttttctggtggtgatgatggggaggttgcaatttggcgcacctatgatatggaacttgtgggtacgctgggtggacacagtttagcaattaacagcctttctgtccatccttctggaaaacttgctttgacttgttctcgcgatagatcgcttatgttgtgggatcttagttctggtagagccgctttcaatcaaaagctctcctatgaagcggagattattcagtggagtccatcggccaatgtgtacgctgtttgtgcttatcacacaataagaatatttagttcgcaaggaggaaagctgcacgaatttgaagaacctggattgaaacacatcttagctttcaccttccttacagacacggtatttgcatcggcaggagaaagcaaggtcatcaccatttgggatctcgaatctgagagcaaagtgttaacaactttgggtggattcgaaaacagagtaaaaggacttgcggcagtacaaagaggagcatctcacaaatatccttatcttatcagcataagctccgacgaatctctttcggtttgggatttggacgtttcaaccacgcaacctctagttcgaactactctagcaggaagactcgtctgcgtaagcggcgctatggtaggtggatcttcaaaagatacgcctaaaaagaaacccaagagaaagaggttggcaagcgaaagacaagaacaagactctgatgccattgtggaattatcttccgaaccagaacaacctagaaagaagagaaaagcaaacaataacagcaataacaacaagaacaacaataacaacaataacaccaataacaataaccaactcccagcc

SEQ ID NO: 12347 - DNA, 857 bp, Zea mays
  Clone ID: 701169008_FLI
cgtcaatcctcgaacgaaaaatcgacggcaattaaggcgcgatgggtcactcttacggaaagcgagcgggcactcgatatgccttcagcagggactttcgccagaagggcatgatcgccctgaacacctacctgaaggtgtaccacgtcggtgatatcgtcgacatcaaggtcaacggtgccgtccagaagggcatgcccttcaaggtctaccacggcaagactggtgtcatctacaacgtcaccaagagctctgtcggcgtcattgtctacaagaaggtcaagcaccgctacatcgagaagcgcatcaacgtccgaatcgagcacatccagccctcccgatcccgtgaggacttcatcaagcgagtcaaggccaacgccgaggccaagaagcaggccagagccgatggtgtgactgttcaggtcaagcgacagcccgctcttccccgggaagcccacacggtctccctgaccgacaaccctcctgagactgtcactcctctgccatacgaaactacaatctaagggaagggttggcgtggtgctcgcttcggtttttcttatggtgttgcgttcggatgggaaagaactcagcatgtgaccaaggtctgcatttttttctatttgatgttcataggaaatgagaaaatatgacatcgacaaaagtgcatttttgctcagtggccactcctggttagaggagtagagtatcctcatagtttctacgacttgtgcggtgtctcccatatataatacctaggtgtctgattttcggatacgttgagcgctgaagctaaaaacaaacccttggcgaaatatactggacgttttccatgacaaacgttgaatttccttgat

SEQ ID NO: 12348 - DNA, 482 bp, Zea mays
  Clone ID: 701169011_FLI
ctgcagtgcttcaaatggatcaaggagcgcttcgacggtccaaacgtccgcttctgtgcaatcggtgatggccacgaggagtgcagtgctgcgcaggtcatgaaatggccattcatcaagatcgagttccgccctgaagcccatcacaggttccctggcctagacttgcccacagtgcagacctacatggatgtgatatacgagtcatccagcaaagatggttgaccgacgattgatgtcgattctgttttctcctctgacctccaccacccatggagctattgtttgaggaaactgtaagcaaagagatgtcgtgggaaaggaacgtgtcgtcctccctagatctttcactttggcgaattaggaggcaggtgtgataaataagagtcttgctagttcgtcgtcgtccatgttgtcatagatcctgtcttgtgtgttcatgttactgtgatgcaggcaattgtgtgttgtgtccgggcgtt

SEQ ID NO: 12349 - DNA, 1892 bp, Zea mays
  Clone ID: 701169030_FLI
cgcggttccagagttcagtggaaggggggctggaggggatcaggatcaggacccgcccgctgctgcatccgaggtccagtctgactcgcgtcagacaccggacgagaagaagagcaagggctgccaatcatgccgtgacccattctgttcatgcagcggcggcacgccccactcggaactgttccccccacatcccgccaagatgatgatcctggagttcctcatcgcgagcctcaggcacccgacaagaacccacaacgtcagtgatctcgacgacctgatcgccgacggggtcagccaagggagcgtggtaaacctcggcccttctgagaagaaggtgctggaatctctgcacgccatggtaaacgccaagacgaggccgaagagcccgtcgccgttcatggcgggatctaagctgaggaaaatccggtccaagtcccacgtcataacgcagtcggaaatactgaagctcatctctcctgagacgtgggaagcctcctccttccctggggcgtctccgatgatcggcggaggcacggctgaggacggcgtccatgggaacaagccgccgccgccgtgctgctcgtctgtgagctcaaaccagcatgttctgtcacggtgcccgtcgtccctcagcgcatgccttctacagtgcatatggaaggatggcctgcctcattttgagctgtcactggacgatcatcccattgcggtgtacgctgcaagtccagtcagggtgctggagaaggacagggccttcgactacgtctacatgatccattcgggagagcaaggaagaaaagactggatgggccactcgagcaacgtgtccagacttgtgggcaaggtgaaggtgtgaagttctcttgttcttaacccagacaagtcaggtcttttggaaaccgagtttgttctgtatggttctccggacgactatcttaggcagatgcgcagtccctacagcgtgccgaaagggaagggccttgtcaggagggtgacagagatcatgagagcaggcaatgtttccgctagcccgagacatccctggaagctgggcaaatcttcctctcatcagttcgacgacttggctggagtacttgaaggtgaaatgatcagtgctggaggatcagacctggtgagtctcaaggccgacgatctgccgtccaaccaagaattagcagcgattgtggtgagggaacagcggcgcagacgacggaaagagcctgtttcgggtggctggggcctcaagttccttgagaaagcaggactgaatcgcccacaaggcactgaagaaactgatgttcagaacagtgatggtgccacacattgtgtaactgttgttgtccccagaggctaccacggcggcgtggtatcaaagagtagtcgcccgtcaggcctcgtcgagagatggagatctggaggacgctgtgactgcggcggatgggatcttggctgccccatcagagtgctcaacggtgatggatgtggctccttgcctgaaggagagtcacgggacagaaggtcggtagagatatcgatcaagggtgcaaagaatgagacaatgttgaagctcgtgaatatcacggaggacttgtacatcctctacttcgactcgagtatttcaccattgcagtgcttctcaacagggatagcgattgtgcacagccgagcgccagagctttgccccaaactgtgaattgcgcacagccaggcacgcacccgagctttgccccccaaactgtgaattgcaaagcttggtgtagctgaattacaaagattcgtgaagcactatgtacatgtagatagtagaatgggaataattcttgttatttttaacttatataattttgagagagaaaagcaggcagctgttttcagactgcttttaaatc

SEQ ID NO: 12350 - DNA, 683 bp, Zea mays
  Clone ID: 701169046_FLI
gccgcgctgtacttacagctgttcgagttcgccgacaagtaccggggcaagtacgacagcagcatcgcggaggtgaagagctactacgcctccgtcagcggctaccacgacgagctcctctgggccgcgctctggctccaccgcgccaccggacgcgccgagtacctggactacgtcgtcgacaacgccgacgacttcggcggcaccggctgggccatcaccgagttcagctgggacgtcaagtacgccggcgtccagatcctcgccgcaagggtacgcgtgctagctgcgtatatgctactgttttttttcctttctttctttctttctaccctgaatatataatatatattaaaaggacgtacatacaatacaagtgcttacgtgtcgtcgcgcgcgtggtttcatttcagctgctgctcagcggggagcactcgccgcggcacagggagacgctggagcagtacagggcgaaggcggagcactacgtgtgcgcgtgcctgggcaggaacgccgcggacggcaacgtggagcgcagccccggcgggatgctgtacgtgcggcagtggaacaacatgcagtacgtgacgagcgccgcgttcctgctgtccgcctactcgggctacctctcctcgtcgtcgtcgtcgtcgtccgtgacgtgcgcggcgggcggcggctcatcg

SEQ ID NO: 12351 - DNA, 350 bp, Zea mays
  Clone ID: 701169186_FLI
tcatggccaagatccccaacgccgtgctcggccaggggtacgggatgaccgaggcggggcccgtgctggccatgtgcctggccttcgccaaggagccgttcgaggtcaagtccggctcctgtggcaccgtcgtcaggaacgcggagctgaagatcgtcgacccagacaccagcgcgtcgctgggacggaaccagccaggcgagatatgcatccgcggcgaacaaatcatgaaaggttatctgaatgatccagaggcgacaaagaacaccattgataaggacggatggctgcacaccggggacattggttatgtggacgatgacgacgagatcttcatcgttgacaggctg

SEQ ID NO: 12352 - DNA, 881 bp, Zea mays
  Clone ID: 701169290_FLI
aggtgccggcggggctgggtctgacggcggcggagtacgagcagctgcggtcgacggtggacgcgcaccaccgctacgccgtgggggagggtcaatgctcctcgctgctggcgcagcgcatccacgcgccgccggaggccgtctgggccgtcgtccgccgcttcgactgcccgcaggtgtacaagcacttcatccggagctgcgcgctccgcccagaccccgaagccggcgacgccctctgccccggccgcctccgcgaggtcagcgtcatctcgggcctgcccgctagcaccagcaccgagcgcctcgacctactcgacgacgccgctagggtcttcggcttctccatcaccggaggcgagcaccgccttcggaactaccgctccgtcaccaccgtctccgagctcgcagaccccgcgatctgcaccgtcgtgctcgagtcctacgtcgttgacgtccccgacggcaacaccgaggacgacacccgcctcttcgccgacaccgtcatcaggctcaacctccagaagctcaagtccgtcgccgaggccaacgccgccgaggccgccgcaaccaccaattccgtccttctgccgcggccggcggagtagcggcggctgccatcggcaagggaagaaagcaacagcaagttttgtgcgtttctgttatttcaattctctgggaaagggtttctctgaattaaatctgatcatggatggatttggactggacaaggaggggccgggtcagcctaaattaggtgtgattgcaagggcgcgacctgtaataatctctctttcatctcctagattccttcttttcatctttacttcttccagaatttggttaattcctgctttatgtgattggaatcattccttagg

SEQ ID NO: 12353 - DNA, 460 bp, Zea mays
  Clone ID: 701169325_FLI
ccggcgacgcgctgcacccgatgacgccggacctcggccagggcgcctgctcggcgctggaggacggcgtcgtcctggcccgctgcctcggcgacgccctgctgccgccgccagctggcagtggcagtggcaggggcaaggaggaccgggtccaggcggccttgcgcgagtacgcctggatcaggcggtggaggagcgtcgagctcgtcgccacctcctacaccgttggcttcgtccagcagagtgacagcgcggtcgtcagcttcctgcgggacaggctcctgtcgggagtgctcgctcgaaggcttctgaaaatggcggactacgactgcggcacgctcgaaagctactagcccccttgtactgtttcctgtgtgtacatcagtacacgtgttgtgttgtgcctgctgctggaataatatgcctactgttatgtgttattagtagaaaattgtactgc

SEQ ID NO: 12354 - DNA, 569 bp, Zea mays
  Clone ID: 701169356_FLI
ctgatcttgctcttggattacaatctcattctgatatgggcgcaataacacttctgatacaagatgatgttggtgggcttgaagtattaaaggatggaatgtggatacctgtgcctgctttgcgtgatggcatccttgtgattctcgctgatcagacagagatcatcaccaatggaagatacaagagttcagttcatcgagctgttgtcaatgctgagcatgcccgcttatcagtagcaacattttatgatccatcaaaatcaaggaaaatatgcactgccccgcagcttgtgagtgagaatgaaccacaaaagtatcgggatgtaatttatggtgactatgtctcatcttggtatagcaaaggtccagagggcaagcgaaacatcgacgccctcctgattcagcactagagccataggtatgccttaaaacagggttggaccactcatctgttttgtaaacttctaatgcatgtacaacatatcagtttccaactttaaacaatcaggataaggaaaccaacttgtatactgaatgcagtgcaataaagtaccttttcattgtcagtc

SEQ ID NO: 12355 - DNA, 409 bp, Zea mays
  Clone ID: 701169520_FLI
gtcacgtggccacaacaactgcatgatcccaatcccattcggatttcctcacgacgaattaatgaagaagggcgtgtgagtgtgagggagaaagttatacttgtatgtattttttcagttttattttgtcgtttcgttttcctttctttttcccagtaggttgccgtacgtgagtagacaatgctggcttttggaattcagagatgtagtatgtggtgtaaaatgaattccaaaagctagcagtgcctaccctatttgttgtctagttcttttatcttccttggcgttctagacgcccgtccggggaggtagaacggacagacgaacccaacagtgtgcaagatcacatgactagagaatcatcgaccaatgcaagtgtgaattactgattataatatagtattactac

SEQ ID NO: 12356 - DNA, 1020 bp, Zea mays
  Clone ID: 701169533_FLI
gcaccatgtggctgagagacttggtctaaagccgtatcatgtatatcatgtcactgtgatgccctgctacgacaagaagctagaggccgtccgggatgatttcactttctcagtagatggtaaagaagttacagaggtggattcagtactgacaactggtgaagtgttagacttgatacagtccaaatcgatcgatttcaagacagtagaggaatcttcattggacagattgttaacaaatgttgatgaggaaggccatctatatggggtttctggaggttctgggggctatgcagaaacaatctttcgctatgtagcacatgtaatttacaagagagaaatagagggtcctcttgacttcagaatcctccgaaattcagattttcgtgaaattacactggaggtggagggcaaacctgttttgaagtttgcactttgttatggattcaggaacctgcagaatgttgttaggaagattaagatgggaaaatgtgaataccacttcattgaagttatggcgtgcccttcaggttgtttgaacgggggaggtcaattaaagcctgttgaaggccaatctgccaaggaacttatccagcaattggagagtgtgtacacacaagatatattaatatctgatcctttccgtaaccctatcgcgaaaaaactatatgacgaatggctggggcaacctggttcagagaatgcaaagaagtatttgcacacagaatatcacccagtggtgaagagtgtggcctcacagttacagaactggtgagaggtttcttgttgcactgggagttcctatgttcttcaagagccaggagggacttgctaagcaaatattggtcatacaggaattgaaacttgtcccttttttgcattatagcgaagaagtttttgttagccctataggttttcagctgctttctagttaatgttgtacgctgccaacgggaaacaacctttaaactgcaatgtgtaaaatgaacggagtaggtcttgacgaccttttcattgttt

SEQ ID NO: 12357 - DNA, 629 bp, Zea mays
  Clone ID: 701170728_FLI
agacgaaaacccaggcattgcctttggtgcccttggtcgtaagctcggtgagctgtggaagggattgagcgacgccgagcgcaagccatacgaagacaaggccgccgccgacaagaagcgttacgaggaccagaaggccacttacttggctggtggagatgacgatgaagaatcttcctaaatatctttttcaatatttctttcaactccaaagagacgagaaagaaaaaaaaatcatccctcagtgtatgattatatttcattaggaattttttcctctggtcgtcggtctgatggttcttgtcttgctcttacctatgatatcgcttgcatagcctatgctaatggctatctctttgacacgtttctcttttattaatctctggttcctacggtatgggctgacggggttctttgtattctttccacgtggttgttacttctttttatgtgatgccagttcgttttcttagttacggttgcgcgaggggtttttagtcaaatatggaaaatctttgtgcttttcgtctgatctcatcgtccgattcatgtaattcgattgcacgcctacgaaaactaagtgtctaggaaaataggagacaaagtcagaagaaagcagatgaaattat

SEQ ID NO: 12358 - DNA, 331 bp, Zea mays
  Clone ID: 701170759_FLI
agctcgtgctctctgctctgcactatctactaccaaagaaagatgaaggacttggcggggctggggcacctgttcgtggtgtccttcctgttccacttcgcctccttcatggtgatcccggcggtcaccgacgtcaccatggaggccgcctgccccggccgcgacgagtgctccgtcgccatctacctcagcggcttccagaacgcagtcaccgggatgggggcgctcgtcgtcacccccatcgtcgggaacctgtcggacaggtacggccggaaggcgctcatgacgctgccggtcaccgtagccatcgcgccgctgtttatactggcat

SEQ ID NO: 12359 - DNA, 574 bp, Zea mays; identical to SEQ ID NO: 12335
  Clone ID: 701170773_FLI

SEQ ID NO: 12360 - DNA, 654 bp, Zea mays
  Clone ID: 701170816_FLI
gaggagtccatcgtcaacctctgataataatacaaatcaaaacaacatgcttcctccgacgactaaagcagccgagaagccactaaacggcactgcgacagagcagccgcagccgcagactcgcctgcggacgcttgggtccctgacgacgcggacgagcagtaccggcgacatcaggaagctcatgatggaggacatgccgatggtgtcgtccaaggtagaggggcctaacgccaggaggatcgacggcttcctgtacaggtacaagaagggcgaggacgtgaggatagtgtgcgtctgccatggcagcttcctcacccccgcggagttcgttaagcacgctggcggcggtgacgtgtcgaacccgcttcgacatatcgtcgtcaaccctgcgccgttctcgtgaagagagagggttacgctgttgctgctggtatcgatcgtgctgtaacatgttgtagtaggctccttgtttccgggagttcaatggaaggtctctatatttgacatggattgagtgtgacagcaaatccaagagaaacatcatctacaaatgttagacttgtctacaaattgacaaggattcaggttgctggcttacagcatttgcctgttctttgacattaaaaaaaactccaaatcactttaattttc

SEQ ID NO: 12361 - DNA, 1347 bp, Zea mays
  Clone ID: 701170938_FLI
atcacgcatcagtgagccgttcctagctctcagcgcgtcttcgtcctagtccaggcctcggatccttgttaacctcgatctcgtgcagtcgtgcagccagtcagtcatcaggctgcaatggagcgtccgtgcccgcggccggagccggcggcgatcgacatcacctgggtgtcgtgccgcggcgtcaggtcgtcgctcccgttccacacgccgtgcctctacgcgtccgtctccgttaccccgtcgtcgtccgccaagaacgcgcacggccaccgccggccccaccgcgtgaagacgcccaccgaccgtgccggcggcgagaaccccgagtgggacgcaccgctgcggctctacctccccgagcccgaggcctcgccaacggcggcggggctggagctggaaccggaagcgggcaagaacagaggcgacggcgtccttctggtgcggttcgagctcaaggcagaggtggccgtgctcggcgacgtgctcgccgcgtccgccgtcgtgccggtgcccgacctcgtcgccgacgggcggacgcgccgcgtgtcctaccagctggcgggccccgacggcaggcagcccaatggcgtcatctccttctcctacgccttccaccaacggaacgccgacgccgacgaccaccaccaccaccagagcggcggcgatgccaagcttctcgtcgcgcccccctgctccacctccaccgtgttcagtcccgtcgcgcagccaccgcccacgaccgcggcgccgcggctgtacccggcgatagagtggccgctgacggaggaaataccaatttaccatacaccgctactaccagtaccagctggggctgcggcggtcacgctcgctagctcgcggtactaccctcctccaccgtcgtcggcggctcaagtgcagatggagccggttgcggtgtacccgccgccgttgccagagacgtcgtcctgcaacgtgtacccatcggtattgccggccagcgcgatgtaccccccggtagaccttgctccagtgagctgctatccgccggcatcaacatggaacgatcggtgtttgtacggctgaagtcatcgttcgtggttttggttttgtgtatgatagattgatagtttaattgatttaccgttccttcatggctcgtgctgtccgcccgcccgcccgcccgcctcggcgttttagcggagccagcgcgcggcgtgtatagtttactgtaagcctggaggtttccatctatctttgcatgttagacagttagaggcgtgctcgttttataaatttgctccattttgttgctgggaacacaaagttgatttatctcttgtggttcgaacacaaggttgattt

SEQ ID NO: 12362 - DNA, 477 bp, Zea mays
  Clone ID: 701170944_FLI
caggcgagcagcggagccgagcagagcctcgagatcccgcccaccatttgccctccggccgacgcggagccgatcgcttcaccggcagcgaggacgatgggttccgtcgcggaggactccaccgcggcagcggcagcagcggcgtcggtagtgttccgctccaagctacccgacatcgagatcccgcggaacctctcgctgcaggcctactgcttcgagcggctccccgaggtgtcctcccgcccctgcctcatcgacgggcagacgggcgccgtgcacacctacgccgaggtggaccgcctgtcgcgctccgcggcggcggcgctgcgcgggctcggggtgggcaggggcgacgtggtgatggcgctgctccgcaactgccccgagttcgccttggtcttcctcggcgcggcgcggctgggcgccgccaccaccacggccaacccgttctacaccccgcacgagatccaccgccag

SEQ ID NO: 12363 - DNA, 535 bp, Zea mays
  Clone ID: 701172304_FLI
ggtgaataatgcaacgtcgaaggatgctgcctgcaacaacagagctacaagagaatctgatgagaaacacattcttgaggtaatggaaaagatgcaaaaaaggagggaaaggttcaaagaggctattgcaccaaaaaaagaagtcggtgacaagaaagacctatcggctttagcatgcagtacagatttcatccagaatcaacggcctgctaggaaacggcggtggggtggtaattgttggatgctggaaatgccttgagagtttgtccgtgatggtttcttcaacaaggtgttctgcttatgttgctcaaaacattttactgttatgtttacttattctgatggctgggttggggaaacaaaatatagaaagcatattcttcaggcacttttatagatatagtatcttgcatagtttaagagtaaaaaggttcgacttcaaatgtaacgtgtttgtggggttctttcaaaccactggagatgatttactatcccctaagatgagatttaaatggtttcctttctgcagactgct

SEQ ID NO: 12364 - DNA, 997 bp, Zea mays
  Clone ID: 701172318_FLI
cgctgctgctagtgctgaccctgacagcgattccgtatgctacaaaattggcaggtggcatgcgcatgccttcgtggttcgacatccacgacgcgcccattacttcaagatccgtgaggggtgaggaggatgtgctgagagctgtccagatcgtgcacaccatgatcgacagggaaatcgcgtccgggacaggcccggaggacgtgttcgtgtttgggctcagccaaggaggtgccctgagcatagcaagcgtgctgctctaccctaagactctgggcggctgcgcagtcttcagtggcttcctccccttcgactcctcctcctcctcctccttcgctgccagagtgacagacgaagcaaagaagacgccagttctgtggatccacgggggcgccgactcgctgatcccggtccaggaaggctggaagggcgagacggggtcaagttcctgcggggactcggcatggcatgcgagttcaaggaatacgacaggctcggccacactctggcgccgtacgaactggagcactgcgagcggtgggcgtcggagaccgttctgggagtgggagaggacgaacacggacgaagacaaggcccggggaagaagaagaagaagggtggcccgtccggggacggggacggggacggggagcaagagcaagtcgttgttctgcggggtcttcaatctcttctccagatagccgccgccgccgccgcttgttcttgttcctactgctctgacaaaccttcttgtgatttctttatttgccttttgttagaagttcttattttcatgtgtaaattttgtaccatttccgtgggttagaaaccacgtttttccaaactcagtcctatggcttactgagaactttcgtgatcttgaatggctgatcagaggagggtagcctgatagaaccaatgtcctatggtgtcaaactgttgttatgtagactacacatccaaattaaataaaggaaaatgaagaacagtttccttc

SEQ ID NO: 12365 - DNA, 677 bp, Zea mays
  Clone ID: 701172659_FLI
gcggccctagagttgtatatatatagtactgcgataacaccatgagtgcatcagcaaacaataacgctaacaagacagcaaagcgcaatccgatcgtgttttttgatgtgaagatcggcagtcaagacattggtcgaattaaaatagaattatttgctaatgtagtgccaaagactaccgaaaatttcagacagttctgcacgggcgagcacaaagtgaacaacaagcccgtgggctacaaagagagtcagttccaccgcgtcatcaagggcttcatgatccagggcggagatttcatcaagggcgatggcacggggtcattgaccatatatggcaaagagagcttcgaggacgagtccttcacgctgagtcacaaccgtgctggtctggtgtcgatggcgaacagtggtccgaacacgaatggcagtcagttcttcgtgaccaccgatgcgtgcgagtggttggacggcaagcacgtggtgttcggacaggtggtcgagggcatgaagattgtgcgtgccattgagaacacccccgtgcatcccaacagcaacaagcccaagattcctgtcaccatcgcgcagtgcggtcagttctgttgagtcacgtgactgtctgtcattgccacatttgtacaaatcttccgtgtatctataaatagcattcttttttcactg

SEQ ID NO: 12366 - DNA, 830 bp, Zea mays
  Clone ID: 701172714_FLI
cacacccgaggggttactacaaatgcagcagcgtcaggggctgcccagcaaggaagcacgtcgagcgatgtgtagacgacccggcgatgctaatcgtgacatacgaaggcgagcacagccacacccagctgccagcacagcctgcccagacctagaagatcagtaaatcgtcgctccattctggaagcgcggggagcatgcctttgcacctagatggtcatgtagaatctcaggccttcgattttcgattgcagcagcagcaatgaccatggagagaatcttatgagctgcttggcccccctcctgagtcactctgttacagatgcaagagtggggactgctgccaagttgttcatctttcttgtgagctgtggcatgtatgtataattgaaagatggtgcaggaaggaaggaaaatgcagcgtccgacagcgaccggtgagctttgccggtgagcctgaagggttgaaagcaaagactgacaagaggaagtgaacaaccgcgcattgttgtgagggtggattaggatgggaagatttggcttttagcgtgcacaagttcacttgccatggactagcctctgtatgttgcttttgctttttctgaaatatcgcatcacctcttttgttgacaaaataaaaaagggtggggttgcatcccagtatcaaaggagggagctccgtactgaccccgctgcaagttaggaccatctgggttttccaggtgtaagcattccagaagggaaggtgcaaagctgttgttggtgtgatttgccacccccagtactgttgctcttgtgtaaagcattctgtgtaattaatgatttgtgcc

SEQ ID NO: 12367 - DNA, 1193 bp, Zea mays
  Clone ID: 701172802_FLI
aaaagttcatcctccactttcgcccgttgctgtagctgtaattgatcgactgataacgccctcaaaacgaccaattccttcccttataactgttgtttatttcccatcgttgttcaaaggccatggccatcatcaagccaaccgccagcactctcgtctcgccccttcgcacctctcatcacatctcacattgcgcccgatccgcctctgccttgcctctatgcgatcgattgcagccacgacgatacgccacggtaaacgagtccaacgaaaagaagtggtccgacgcaaaagcttcgtctggcgacaccatccccgaatggccgaaatcgccgcggcccacgccataccaggtcttgggcgtctccaaaagcgcaaagacctacgataagcgacacttctacgacctcgtcaagctctaccaccccgatacgcatgacagccaaggcaattcctcagcagcatcgccctcatcatcacacattagccaactcccccacgccactcgcctcgagcgataccacatgatcgtcgccgccaacgagctcctcagcaactcctccaagcggcgcatgtacgacgcctacggcctcggctggtcccacggcgacggcgtcacgacgctgcgcgacattgacagaaactggcgccaccagcagggcaccgccgcgaataatgccacgtgggaggactgggagcactggcgggacgctcaggcgggaaaggccggcgagcctgtcttcatgtcgcatggagcgtttgccactatagtcgtcatgttctgccttgttggggctattgcgcagacaaaccgcgccgaaaacagccacaccgtctacgctggatgggtggctgatcagaacaacaatgtcgggcgccggctgcagaggaacgaagtcatagtggcgggactcaacaaggatgagagggtcaaccacttcttgagagagcgggaaaacgtcaattaccagtttgtgcccgccaaattcgagtcgactgatccgtctagaccgtcataaactcttcgccttcgccggcaagaaggaggggcacgcccagtggccaatcctgtgtattactatagatgatgattttacgacaccttccctgcatctaatatgttatttctatataatgtactgatagttctatatatatacttgcataagaaaagtgacattacattaaatcgt

SEQ ID NO: 12368 - DNA, 1125 bp, Zea mays
  Clone ID: 701172848_FLI
cacccacccgcccacaggccacagcccacccccttctccaggtctctccccggcggcggcgggtgcggttctccggccatcaccgtgcgcaccaggaaaaactatgaggaggtacagccccccttatcgcagtccccccaggaggggatatggtggcagaggaagaagcccccctcctcccaggaggggatatggaggacgcaaggagggtagtggaagccttttggtccgcaacatcccattaagcgtcagagcggaggatcttcgagttccttttgaaaggtttggccctgttcgggatgtttacattccaaaggactattactctggggagcctcgaggatttgcctttgtagagtttgttgatccttacgatgcctctgaagcccagtatcacatgaatcgccaagttttctttggtcgggaaatagctgttgttcttgctgctgagtcacgaaaaaggccagaagaaatgcgcagcagaactagagtaagaggttactctggtcatgaaggtcgccggtcttcttactatggtcggtctcgttctcgctctcctcgctatcggggccgtcctcggtcgagatcatactctcctgctccaaggcgggggaatgactactctgcctctccaaggagacaggaagcccatcgctcatctcctcccaggcgcccgccaaaggagcatgatgaagataagaagcggaggtcctactctcctgccagtagagatgatgctgacaatgtttatgagaagaggtcgcccccagcagacagcgatggatctcctctgcatcgcaggtcccccaaggagtactcgggctcacctcctggatcccgctccaggtccgccgacgaatcccctgttgccagtgactgatcgaccgatggatgctacaatatgaatgatatgcgcatgaccagcatggtcatgcggtcatcagtcctatgcctttgtcagactgagctcactaaacttacccccctttgggggtcgatgttgtattgctaagttccgtttgtgctaagtattagcgcatactgctagactgccactgtcgtctgtactatgcatgcttttgatctcgagtgatcgtgttgatggtgctgaatattggaacctgc

SEQ ID NO: 12369 - DNA, 762 bp, Zea mays
  Clone ID: 701172919_FLI
ccgctgtacaaggagtccgagtgcagcttcctcacggagcaggtcacctgcacgcgcaacggccgccgcgacgacgactaccagaagtggcgctggcagcccgacggctgcgacctccccagatttgaggctaagttgcttctggagaagctaaggaacaaaaggctgatgtttgtgggtgattctctgaatcggaaccagtgggagtccatggtgtgcctggtccagtcagaggcaccatgggacaaaaaatctctcgtcaagaatggttctcttaatgtcttccatcttcaggagtacaatgcaacagttgagttctactgggctccgttcctagtggagtcaaactcagacgacccagacattcacagcatcagcgaccgcatgatcaagccgacatcgatcgcgaagcatgcggcaaactgggaaggcgtggactacctgatcttcaacacttacatttggtggatgaacacaccgcagatgaaaaccgtgcacggtggatctttctcaaggaaacacgtaaagtacgatgaaatagagcgtgtggaggcataccggaaggtcctcaagacgtggtccagatgggtagaggcgcacattgatcccaagagaagcacggtcctattcatgagcgtgtcaccggtacatatgcagagtgaaggctggggcagccccaacgccgtaaaatgcttctccgagatgcagccggcgatcaactacacgaagaaactggaggtgggcacggactgggacctcttc

SEQ ID NO: 12370 - DNA, 1168 bp, Zea mays
  Clone ID: 701173144_FLI
gcaacccgcaattattcctcccccgcacgcgaaatccgcccgcagctcttcgtccccggaggaccaagcccgcgcaccagagatgtcgtacgcctacctgttcaagtacatcatcatcggcgacacaggtccgtgccgccacgttggccctcttccttcctccgtgctccgattggatcctcgcgcctcccaacctgagtccgccgcggcaagatggagatccaatctagtccgcttgcccgtttgcgacgacggtgacggccttggctttgcttttgctgcaggcgtcggtaagtcgtgcctgctgctgcagttcaccgacaagcgattccagcccgtccacgacctcaccatcggcgtcgagttcggggcccggatgatcaccatcgacaacaagcccatcaagctccagatttgggacacggctggtcaagagtcattcagatccataactagatcatactacagaggcgctgctggtgctcttttggtttatgacataactaggagggagactttcaaccaccttgcaagctggctggaggatgcgaggcagcacgccaatgctaacatgacaataatgcttgttgggaacaagtgtgatctgtctcacaggcgtgcggtgagctatgaggaaggcgagcagtttgcaaaagaacatggccttatcttcatggaagcctctgcgaagacagcacagaatgtcgaggaggcatttgttaagactgctggagcgatctacaagaagattcaagatggtgttttcgatgtatctaatgagtcctatggaatcaaagttggatatgcaatccctgggcaatctggaggtgctggtagctcgtcttctcaaggtggtggctgctgcagctaatctgctaacgccgttaacaaaggcatatctgtcgtgtgtcacataccagctgcgctgtgaaaaatagttattgctgctccagggtgccttgttatttgacgcaccaatggatcctgtgcctgatcgacttgagagattcagtttatttacgtcaggtgtttataaactccctgtaaatcactagattcttcaccgttttccgtcattaggcactcaacaatcgtgtgtccgtttgcatgtgtaaataaggcacgtctacatattgtttgatatgatattaatttgtcctgttcggat

SEQ ID NO: 12371 - DNA, 1056 bp, Zea mays
  Clone ID: 701173218_FLI
aagccgcctccgtctcctagtcctaacccaccaccaacgcaataatctacagcagcggaggaaagcactacagctcttggtcgagcagtagcaacaatggcgccgccgatgaaggtgtacgggtgggccgtgtcgccgtggatggcgcgcgcgctggtgtgtctggaggaggccggcgccgactacgagatcgtccccatgagcaggtgtggcggcgaccaccgccggccggagcacctcgccaaaaacccgttcggtgaaatcccagttttagaggacggtgatatcacgctctaccaatcacgcgccatcgcacggtacgtcctccgcaagctcaagccagagctcctccgcgaaggcgacctcgaggggtcggcgatggtggacgcgtggatggaggtggaagcccaccacatggagccggccctgtggcccatcatccgccacagcatcatcggccagtacgtcggccgcgagcgcgaccaccaggccgtcatcgacgagaacctcgacaggctgaggaaggtgctgccagcgtacgaggcgaggctgtccgtctgcaagtacctggccggggacgacatcagcgccgccgacctctgccacttcggcttcatgcgctacttcatggccacggagtacgccggcttggtggacgcgtacccgcacgtcaaggcctggtgggacgcgctgctggcgaggccctcggtgcagaaggtcatggcaggcatgccgccggattttgggtacgccagcgggaacataccataggctctagagcggtgggcgtccgtcattctgcagatctgaggtctctgaacctcagcgtttccgataaacatgcatcctttatctactgtttaaaaaaacaaacctggtcggtgcataggtattttggttctcttatgattcatttatcgcgttttgaatacttttagtccctaaaaccaaacgagatagagactaaattttagtttagagcatctccaatagttatgtaaatttagcactctaaattacagatttaaaaagttactaaatcactttaaaaagtag

SEQ ID NO: 12372 - DNA, 481 bp, Zea mays
  Clone ID: 701173259_FLI
ccgggagacaattccacagcacacggttcgtacgctttcctcgtcaggtggttccagaggttcccccagcacaaggccaaggagttctacatagctggagagagctacgcaggacactacgttccccagctcgcagacgtcattgtggaggggaacaagaaggcctccgaagaaaaccacatcaacttcaaaggcatcttgatcggaaacgcgtacatggacggcgacaccgatctggtgggcatcttcgactcggcgtggcaccacgccatcatctcggacgagctctacggcgacgtgcagaagaattgcgacttcagcttggtggagctgtccccggagtgcagcgcggacgtggaccagtacaccgcgctctacagggtcatcgacatctacagcctgtacaccgaccggtgcgagctcgggtacccggatttcaactactcggtgtcgccgaaaaccgcgcgcggcgccagtcgtc

SEQ ID NO: 12373 - DNA, 638 bp, Zea mays
  Clone ID: 701173282_FLI
aacagattgaggtcatcaaccctctcttcctgctgacggccaagcctgtcgtctaccttgtcaacttgtctgagaaggattatatcagaaagaagaacaagtacctccccaaggttgccgagtggatcaaggagcacgccgagggcgaccccatcattcccatctcagtctcgttcgaggagcgtctgacccgctacgagaccgaggaggaggccaaggaagagcagaagaacgttggcgccgagtccgccctgcccaagctgattgtgcagatgcgcaaggccctccagctgggcagcttcttcacaacaggaaccgatgaggtccgccagtggactattcgcaacggcatcaaggctccccaggctgctggtgtcatccacaccgactttgagaagacctttatccaggctatcgtctacaacttcagcgtcatcaaggagcttggcgacgaagcagaggtcaaggccaagggtaaggtcatgaccaagggtaaggagtacgtggtggaggatggtgacattatgctcatcaaggccggtgctgccaagagctaaatgtgtcgtatctgcagtagcgctcatgtagtgagatcatttttttctcaggttaggaaaataaaaagtaaaataccaccg

SEQ ID NO: 12374 - DNA, 853 bp, Zea mays
  Clone ID: 701173336_FLI
gaacaaccatcttcatcagtttctaatagagaatctagtgcaaataatgcttcttctctgaagtcccaagaaattacagaggttgcaggcgacgcaagaactcaacaccaaaataaacctcgtcgatactcggagatgaactttggccagtgaacatagtgatgatagtaaatcagtgagggttcattggagctttggatccaagtaagacttgtgcaagagaccctggccttaccaagtgcttccagcatttcactgtctgatgtctagcactatcttgtgacccaaacgaggtttgacaggaggtgttcaaaccatcgctgtggtcatttgctgtgattattctgacgggctggtgttgttacaatcattaggtgagattttctggtactctacgtcaccacaataccagacggtcggtccgtaagtgtgaaggtcttgatggaaatcgtgaggacggaggtctcggtcgtactgcaaagctcgtgtccccgctgtacagtgtacatcacgtctctgactgtgtttgggtgtgcgctgcctctgcctacgaactcttcggtggttgtcgcatttttgaactgacaaataaaaaagaacgtgttgagcaccaaattgagaagggcggacggtccagcccggtccggacagtccgcgcctgtgggctgcacggtctgcgcaagcgcagaacagattagggttccaagttttgtgctacagttgttagctagattcgcaggattcgcttggaaattagtttgtaaatggttcagtccccctcctctataaataaagaggtatacggtcgatttgtaataatcaatcgaatcaataaaacttctatctcgcattg

SEQ ID NO: 12375 - DNA, 542 bp, Zea mays
  Clone ID: 701173383_FLI
attgcttttcgtctcctgtccatcccttgtgcgctaccgctcctctcccttggcaacgacgactggcgccgccgctgccagacttcgctgggcatctcgccggcgacgagctcccaccaggattagagaaggtgatggcgaggagtgacagctgcctggcgcgcgtgggtgccggagttgcgatcggtggcgcggtcggcggagccgtcgggatcttctggagctagctactactgatccctggtgcttgttatggaacttttgaggcattcagatacaagatccctggattgctaaagatcagacatatcgggcaaactactgttggcagcgctgcaatttttgggcttttcttgggggctgggagcttgattcactgcggaaaatcctactagtttgtttccctcctttttctgaacacgactttgtcgatgtgcttcagaggaggattctagattttgagcgctaccctgagtggcttcagtgaaaactattcaacgcctgtacaatttaacagctaatacctcagggttggaaagagc

SEQ ID NO: 12376 - DNA, 452 bp, Zea mays
  Clone ID: 701173419_FLI
gttgctgcaagcttttttgtccatgtcgaccctgatgcaacaggtgataactaagtgacaaatctgcttacagcatacctgtgaactgaatggagaggctacgacctaactgcagagttagccaatagcattgccctgcgtagataaggacctgcaagagtcctgaatttggaagcaacttgtgggcagaatctcggaccgagggtttaacttggggctcaagattacaaggagctgatgcagcttttttaggatagcaacagcatcgcccgttgaggaactgtaactttatgtgacggaatcacaaaaatttaccattgtatttgttcaagctacacgtgccacagttttttatgttgtgattggtaggtacggggaagttagacctctagtgctattgggaagaaaattaccattacatttatttaatatattttcctttttttccttgt

SEQ ID NO: 12377 - DNA, 712 bp, Zea mays
  Clone ID: 701173532_FLI
gtacgccaagtgcgtcctgttcagcgccacgccccggccttcggattccaggccggaccccgaggtcgacgaagaaggggagcccccggcgccgccgccggacttccgctgccccatcaccctcgacatcatgcgcgaccccgttgtcgtcgccagcggccagacatacgaccgggactccatctcccggtggttcgactccggcaagtcaacgtgccccaagacagggcaggttcttaccgttttggagcttgtgcccaacaaggcgctcaagaacctcatcgctaagtggtgccgggagaacggcgtcgccatggaaagcagcgcggcgagcaggagcgagccggcccaggcggtggccgcgaacaaggcggcgttggaggcggcgcgcatgacggcgtcgttcctcgtgaagaagctctccatctccttctcccctgacgcggccaaccgcgtcgtgcacgacatcaggctgctgtccaagtccggcgccgacagccgcgcgttcgtcggggaggccggagccgtgccgctgctggtgcccctgctctactccgaggacgccgggctccagctgaacgccgtcacagcgctgctcaacctctccatcctcgaggccaacaagaagcgcatcatgcacgccgagggcgccgtggaggcggtcgcccacattatgagcgccggcgcgacgttgcgcgcaaaggagaatgcg

SEQ ID NO: 12378 - DNA, 1115 bp, Zea mays
  Clone ID: 701173691_FLI
tgtgaatctctcgactcatttgttacggccattgaagatgccaaagctgtttttgagatgggaaaaaatttaggctttgacatgcatatacttgatttaggcggtggatatcctggcacatctgatgcgaaaataccatttgaaccgattgcagaaattattcaagaaacacttgatcgttgcttcccacctgttgatgggctagaaataattgcagaaccaggtcgatattttgctgcttctgcgttcactttggtgactcaggtgattgcaaagcgcgaaattcaatatgatgataatgctgcagccgaagcaatcgaattcgccgaaaacaacaatgtggttcgatgttatccacatgtattgcgatctgcatcgccagatgtgcctcaaactgagagtttgcactgccaagatctcgatatgagtcgagaaatcatgtactatttgaacgacggtgtgtacggctcgttcaactgtactatttttgaccattggactgtatatccatgtccatggcttgaagcaaaccgttcagtgcagtcttacattcgtactgtgctttggggaccaacatgcgattcaatggatatgattcgacgagatatttacatgccagaacttatcatcggggattgggtcgtatttgatgaaatgggcgcttacacgattgccgctgcttctccgttcaacggctttaaattgcctaaattaaaatatcaaattagcggacgcgttatggcagtcttgaaagctacgaaagattggccagcattgaaaaaattgttggtcagtccagaatcctcagcagaacatcaacaaatgggatgttctagttcttcgttgtcatactcgggttcatttggcaacagtgaaaatcatttgcacccaactccacctgatactgaaccaggagatcgcatagagccttgcatgaaaaatggcaaaatttcttatattcaagttcattaaattatgttgatacattttgaaatttaccaaagtttgtagttacaatttttatacttacattttgtaatgaattccaattgtaaatttgtgtagttgttttatttaatatgattaaacaataaagattatatttttaaatgatt

SEQ ID NO: 12379 - DNA, 496 bp, Zea mays
  Clone ID: 701173721_FLI
catacaccccctcttgcccacaccacctcgctgaaccggaagacccgcacacacacgccacttgtagaccatggcgccccgggtggcggacaagtcgcctctaccgccggccaccggcctggggctgggcgttggcggaggagtcggaggcgtgggcatgggcccgcactacagaggcgtgaggaagcgtccatggggacgctacgccgccgagatccgcgaccctgccaagaaaagccgcgtgtggctcggcacgtacgacacggccgaggaggccgccaaggcgtacgattccgccgcccgcgagttccgaggcgccaaggccaagacgaacttcccgttcccctcccagtgctccgtcgcctccggtgctgccggtagcgccagtagcaacagcaccgtggattcgagcggtggcggtagcggctgtggcatccaggcgcctatgcaggccatgccgcttcctccggctctcgatctcgacctcttccatcgg

SEQ ID NO: 12380 - DNA, 484 bp, Zea mays
  Clone ID: 701173746_FLI
gcatctggggcgctcgttttcgatgccccagcaccgctacgcgccgcacttcgcccccttctctccctctcatgccgctggttgatctctcgtcatctcctcctccaagcacggatcttctcgtcgtctcctccaagcacggatcaggagcactgaaattctatctcaaccggttctgccgactggataacttgaattctaaaggttgatccaagcaggaggtgaatgtgtgatggttggttattttgcatttcttctaggttgatgcatgacggttcatggagaaggctggtggttgtgatagctatcacacactcttttggttaataattagatactctttttgttgagcaatgtgaacctttaatggtgtttatgggtcttgtggagttgtgatggggctattatgaagatgctatggcctgttatggatgattggacatgttatgggctctatatattaatctgttagtttggtttcctc

SEQ ID NO: 12381 - DNA, 403 bp, Zea mays
  Clone ID: 701173760_FLI
gcttctcaattcggacgaggttctgtggacaggaagagaccccgaaattgcaggcctagtcaagagttatgccgaagacgaggcgctgttctttgagcactacgtgagttcagtaaccaaaatggggaacataaatcccctcacgggtcacgacggagaaatccgcaagaactgccgtagggtcaatcaggagatctagtcgtcgaaaggcttcagtttcagtcaggttccttttgcttatgacgggaaatttgattcacacgatgtcggtttaaatgccaacattctaaaatgtgtgatggcattagatggtacttcaacttcaggcccccacccacacacacaaaatgtcaactgtaaggccactattttcaatgaaatgtatctcatcttcttttgctct

SEQ ID NO: 12382 - DNA, 1039 bp, Zea mays
  Clone ID: 701173786_FLI
gttctccaacctggccatctgcaaggccgtcggcggcggcgggaggaagaaggtgcacatcgtggactacggcgaccactactacgggctccagtggccgtcgttgctgggctactggggtagcctggaggctgggccgcccgaggtgaggatcaccgccatcgacttccccgagcccgggttccggccggatgctcggctccaggcgaccgggcggcggctcacatgcttcgctcggcggcatggcgtccccttgaggttccacggcatcgcggccaggtgggacgcggtttcggtggacgagctgagcatcgagcgcgacgaggtgctcgtcgtgaacggcctgttcagtctcggtaggatgcaggagcaggagcaggacgacgtggatagggatagccggccgagccctagggacacagtcctcggtaacgtccggaagatgcggcccgacgtgttcgtcctgtgcgtggagaacagctcgtacggcgcgcccttgttcgtgacgcggttccgggaggcgctcttctactactcggcgctgttcgacatgatggacgcggtggcggcgcgggacgacgacgaccgcgtgctggtggagcagcacctgtttgggcagcgcgccttgaacgccatcgcgtgcgagggctcggacagggtggagcggccggagacgtaccggcagtggcaggtgcggaacgaacgggcagggctgaggcagctcccgttggatcctgatgcggttcgggccatcagaaggaaggtgaaggacaagtaccacagggacttgttcatcgatgaggatcagcagtggctcctgcaagggtggaagggacgagtactctacgccatgtctgcgtgggctgcaaaatgatacgtacactagtttaacaaagttcaaagaaaacaccattaatatctatggctcatgttcaaaaaacgtttgattccgagaattgtaatctttcttcttcttttttatgaagggacgtagaaagagtatataattaattttatggattacttgtttgactgtcct

SEQ ID NO: 12383 - DNA, 1068 bp, Zea mays
  Clone ID: 701173817_FLI
gtaccttcgctttggttcataccaaattgaggaatcggttgagttatgataagttgcataaactggtttatgttcactacaacttgaagttgcgcattcaacattttgaaactgatatagaaagttttgaacaaatgaaaaactctaaagatagaaacatagatccatgtagcatcatgatagatgttgctatgtatgatgaaggcaacccgattatggaatggttgtgcagttctaggagtgaatcagtgccgacacttgatgaaaatgatgagcctgaatcccctaacagaccaagtggattcgttttagaggagttaggaggattgaatgaagaagagatggttcttttaaattctaggattggttctggtaggaaaaatggtaggaaaaggaatgttgtagaagaagatattggagatgatttcttatcagatagtagtgagggaggaggtagcccaacctacaacgaatcaggtgatagtgactctaatgatggtggtggtgatgacgaagatggtgaacctagtggtccatgttttgcagctaggacacaacctaaattagctacagaccaatataatggtcctggtcaagatgaacaagcagcgcctctccgtccaagatcaaaaaggcagaagaagctctccatcaagggcctgtacatgcttcagaaggttaagtacatctaagattatagatgtgttgtctcactgtttcaaaaagttcatttaactaattaatttgttgtcttactgttggaaaatatagtgatctaatcttcaagcacaagcacaagaatatggcgtatacatggactgattcaatggcaagattttgaacatgtggctctattgtatcaattgtgtgctttgtttcagtttcaacacaatattgctgccatatttggttcatgtggcctaacaatatttataactgtgattgatttctatgcattatttgaactatggactaccaaatatttgtgacacaccactagtgttatattcaccggtgcatggatgttgccaaagaactttatttatgtaatatttggtttatttggat

SEQ ID NO: 12384 - DNA, 477 bp, Zea mays
  Clone ID: 701173844_FLI
gtccaagctctaaagctggtgtgcgacgaaggcagcgagttcaacggatccacgagctttagccaagatctgcgtatccaggatgttgaggctatgagtagagcgagtggggatgtagacttcgttgacccaacgctatctgccgagctgttcacctcatcagcgcgttatgatgctatggatgcctctggttctttccgaagatactcgagttcaggtcctctgagagtagggagagctggactggacaaagagagggggctgtcaacaggcagctcaagtgagcacgttgggctacaaaggtttagaattgattcagaatagtcagcctgcatcctgcaagcagcttatcatgattgggagtgcagaactagacttcttcggaagcttaaactagacttcgcacagattttttgtacagttctagagatgtgtagatgcctttaggaaaaagaggtgtacacaagcgagtttttc

SEQ ID NO: 12385 - DNA, 663 bp, Zea mays
  Clone ID: 701173901_FLI
atcccgtcgccatggccgaaaaaacattcacctacgccgaagtctcggcccacaccaccaagaaggacctgcacatggtcattcacgacaaggtctacgatgtcacttccttcgtcgacgagcacccaggtggtgaggaagtcctcctcgatgtcggcggtcaggatgccaccgaggcattcgaggatgtcggccacagcgacgaggcccgcgaaattctcgagggattgaagatcggtgtcctcaagcgccagcccggcgacccggcccccaagaccaccagcgcctcctcctctggcgcctccgccagctctagctcgggcggtgtcagcgtcggtctctacgcgttcctcttgctcggtgccgccgccgcctatggtgtttaccaatacctgcaagtgaacgctgagaagcagtagatcccttctttcatctaatcaaaaataataatggacacattctgaccatttcttttcttcgtttctgtcgcgttgctcgattttggtttatatcttcttgtagattgcttgtggtatgaccagtcatatgtggtacgagaatgcatccaggggaaggactttttactatgaagattactccatcactttgaggttcgggtgacatagaggaagggattgaatgtcttactcaggttgcttttct

SEQ ID NO: 12386 - DNA, 567 bp, Zea mays
  Clone ID: 701173962_FLI
agcaaagcatcggtgtctacctcattattttcggagtccgagtggcgaaacccgccgcagcttccactgggcagtgctccacaggctcatatccgattccgatccctaagacctcagccgctgcggcatccacggccaactcaagcgctggcaactggcaagggcagatgatctgtgtatagtactcgctaccttctcttgatttcccccctgaggtcgctgaccaagggtcctgtccgccatggatgcggagcgaagctctgcacgcagcgccacgccttttggtccgccgtccgatcgccaccgctagacgccacgcctgcgttgccttcccggctgaatcgccgattcccttggcggcctagtgcttgcggtcggcgccacacgccggcgaggtagccgcgagacacaggtacgggtcccaaacgggaacggctgctgcccgccgagccgtcgactgcctgcctggagccttgaccgcgcaagcgcagctgccgtgtgttgagtgctgagtcgccgacaacaccaggtggccagcgattgctttgctgctccaggaaagaagcc

SEQ ID NO: 12387 - DNA, 433 bp, Zea mays
  Clone ID: 701173965_FLI
gtgatgacgtgtgtttagaggatgggatccttgcaattgtcaaacaaggagatgagagaccccttgaattgcttgctaaagcatatgctatcaaatcttttgacatagatccccagaacccctctgatgttgttttcacgttagaatgggaatcaatcggtgtcctaccttgtggcgagatggcgagaagaaagataatttttactaccaagggatcttaatcagaattctaggctcattcatacattcactacaatgccttcgaactcatgaacatttatctctggctctattgtggtgggttacatgaatagagtttttgcatgttcttcgttttatatggtgacatacttgttactatgtgacattgtttgatgaaacccttgcggcattgtattatttattttgttctatatagtcttaacattttatc

SEQ ID NO: 12388 - DNA, 466 bp, Zea mays
  Clone ID: 701174014_FLI
cagttcaataacaggctgatgaataacagagaaaagattaagtcaaagaaaatcactgatgttctcttgtctagtgatacaactgaagctcaaggttttctccaagagggtggagatgattgtgcacaagttgtctttagagatgaggaagatgagatggaaggtacagggataccttggtctgttattggagaggcagtgggagcagaagaacagcttgagccttgtagaagtgcaagagtgagagagctctatgaaggagaagagtttgagtctgaagaagaagagtatgaagatgaagatttgtgctatagtgaagatgaaatatgatctggaccatctccatctagtagtgaagccttttgtgatgccctggtcttatgaactgcagctgtgtcactttgtgtctgtgtgtcttcttttgtgtgagacctgaactaagaactatgtgcttgtgttgtccttt

SEQ ID NO: 12389 - DNA, 545 bp, Zea mays
  Clone ID: 701174039_FLI
cgaaaaaggaaaaaagaaaactcaagagcccaggcttatctagaaacctcgctaaccctcgaggcctcgagtagctatgaagcagcgaggcgacgacggtgccgacggcgcagctgctttcgccggctgcctggattgcaggtcctccgaccattgctttttgcgggaggcaacgccgccgccgccgccgacagtgacgacgctgctgccgccttcggtttataactccttcgatcatcgcttttctgagttgtttgtgttttggaatcaaggtgcacatttgcatgaattggatcttttagcgaccagaccatataggtacaaacttagttccatggcttccgatgacactgctgaaatgtgaatgttctgtttcgacgacgttgccaagaaaattgttgggaaatcatacaactctcctatcatcagttacagggacttcaactatcctactagatttaacattgatcgtatctcttaaattcacatttgtagttgtgtacaaccaaatatcatttgtggatttagagaaagaactcttcatg

SEQ ID NO: 12390 - DNA, 451 bp, Zea mays
  Clone ID: 701174056_FLI
gagccccgcatccgcggccaagtacccatgacgacgaggctgacagcgacgttgttgctctccagaaccctcgtccgccgcgtaacctcgcgaaccccgacacccctcggccctttcggtctcgaaccatccgcaggaatccccatctcctggtccagacgcgcctcctcgaccgcctcgggagatcggggccaggaaccgccaccggccatggattcgcctatcaaggtggtttctcacctggggggcggacgaggaggaggagggggagagggagagggagagggagagggaggggccgcagcgatcgacgcggggaagtcggcacggaggccgctcagcctgtggcccgggatgtaccactccccggtgaccaacgcgctctgggaggcgcggtccagcatcttcgagcggatgatggacgctgggaacggcgcttcctctgccgagc

SEQ ID NO: 12391 - DNA, 641 bp, Zea mays
  Clone ID: 701174191_FLI
atttcgctcatcatcaggtggtgtgagggtggtggtgacgagagaagactcagaagcaacggaaggatcgggttcagaacgaggtcagaggtggagatcttggacgacggattcaagtggaggaagtacgggaagaaggccgtcaagaacagcccaaatccaaggaactactaccgctgctcgtcggagggctgcggcgtgaagaagcgggtggagagggaccgcgacgacccccgctacgtcatcaccacctacgacggcgtccacaaccacgccagccccggagccgctgctatcatcgtcccgtacggcagcggcggcggcaatagcggcttctacagcccgccgcacagcggctccccgtcggccacctcctactcgggctccctagccttctgacttttccgggccttgacccatagttacctttacactccagtcgtcggataagaagaatgttcagcggctggctaaacagtctcaactgctgcagctattcaaattagtgttggagatgcaatttatagagataaaatactctagaagctatcgctgtagccggattaaattctgacctacttgtatagttttacacttacacagtgcaagtaataatatttaagggaagcagagagcactct

SEQ ID NO: 12392 - DNA, 662 bp, Zea mays
  Clone ID: 701174332_FLI
aggacatacgaaatggccacttccttctattctaattctaagcagcagacgtccgtcgcccctattgctgaagaagcagatgctcatcgcctccgcaccagagaacagttcgcccgcggtgctgctcggagtcggaggatggacgaaatcccagctggtccaccggtcagtggtgcctccgagagggcgttgccggcacaagaaaggagcaagcaagaggcggcaggacaggaacatcacatccctgtcttctccaaccccgatcttggccagcaagaacaggaggagcagccatcgtcatggccaacgcctgctgctcctccagctagagcgcccatggatgaccacagtaagacgcaggcagtcaaggataggctgaaggacaagacggcgaaggtggcggcgaaggcggtccgcgttttgtttggaaattaaggaaaggtaaagtgactagctacaacccgtcggcaatggttgtggaggccaggctcagcgcgcaggacaatggctgttatatgatataatctcaacgaacggttcttgcatctctgtgttcttattatacaactaggtgagtgcccgtgcgttgcaacggcaacatgtaatatcacgatggattatgtacaaatgtgtgtttcattgttatactaccatgttcgtgc

SEQ ID NO: 12393 - DNA, 373 bp, Zea mays
  Clone ID: 701174361_FLI
tgccgaagaaaacaagtcttggtttcgcccccttcagctatggttcagacacgctgcaaggggcgaaaccatagctgaaggtggaactgtactagatcaaatcggccatagttaactgaaattcgtatcagttgtcagaagcacaataaggcattccagccaagttgtaaaattattgcccttagcagaatgtgtagcgtgagttgtcatttcctttctgccattgttgtgcactgtttcagctgtggtagtgccttgtagtaggtataggtgcctgagtttatatgtatcatcgtgtatgtaccattgggagctcaattatatgccattgtaccaaccccagacattgattattacaattcatctagcagcc

SEQ ID NO: 12394 - DNA, 498 bp, Zea mays
  Clone ID: 701174365_FLI
cgtctccggcgtctcctacgccggcatccggggcacctacgacccgcgcaccccgcccatccacttcgggtgcagcgacgccgtgccgtgcaccaacatcacgctctccgacgtcgagctgctccccgcgtccggcgagaccatcgacgaccccttctgctggaacgtgtacggcagcaccgccacgcctacggtgccgccggtgccgtgcctcatagaaggcgtgcccaggaacctcgacgataacagcagcctcaaatgctactagcagcctcaaatgctaccttcctgctacttgttcattatattagaagaaggaagaaggcaaaccaacagagaaaagtaatcaagattagtgcagataaaacggagtttaacgcgtgattacttatgtatatatagaaaaagatgatagtactagtaacaagtgatttgtgtgacaattatacatatagtattaccagaatatatacatggttttcaactttaatattcgag

SEQ ID NO: 12395 - DNA, 583 bp, Zea mays
  Clone ID: 701174366_FLI
cgcagttcggcctgtccaactcgtccctggagctgcccggcatggacgactacctgcagctgcagcaggactccgtcgcctgcagagtgcgtgcgaggcgtggctgcgcgactcacccacggagcattgccgagagggaaagaaggacgaggatcagcaagaggctgaagaagctgcaagacctcgtgcccaacatggacaagcaaacgaatacgtcggacatgttggaccttgctgtggagtacatcaaagagctcaaggaccaagttgagaagctaaaacacgaccaagcaaactgctgttgcctaggcaacaagagctgctgctgatgctggagaagcagacggaggagggtttttacgccgtaacaatgtgactgttaaaccagagctgttgcttcaggagaccaggccgcgggcagaagtgcgtgacatgtggagcggcttccatgactcagcttcctcttttcttggttgttccacggactagcgaccggggtgccaacggcttgaagactaggagataacaagtaggacgatgttgtaatttagttaccgcgacgcggtggctctggctttcgtgt

SEQ ID NO: 12396 - DNA, 743 bp, Zea mays
  Clone ID: 701174367_FLI
ggccgggtggcctcatcggctacgacaacatgctgtggaacggctccatcgtgctcctggacgacgcgcccatgcgcaagtacatccgcttctaccgcgacttcgtgctcgccctcaacatggcgctcgccgccgacgagcgcgccgagatctgccagctccctcgttcatgtggtgctgtgtatcggaagaaaatgcgacgagaggcgcgcgcgcggcgagctcggccgtggcactgggcttcagcggggaggcggagaagccccgcgaggagggcaagctgatgttgagttcggcggacgaggggcccggcgacgacgacgcagttgaagagccgactccacggacggtgcaattgcgggtacgtggtgcagcccctgtcaccgtccctattcttggaagtggaacggctagcagcccctatcgccgcctttgcctagctccacggctccgcccctgttcttcccatcctttcgaatgctagctgaaggtctattgaatctgggcatggttgattatcttattagtgctattgaactaattatagaaaaggccaaattcagagaatctaatgtttctgctataagaggatatctcaagatccgcaagtattatgatgcattagcagcttttggttgtctcctagagataaacaaccctcagtggatgtatcgttgatacagcatgcttgagaatgtatcgtgtaaaatgacggagtcgatgaaaagtttcgtggttgctag

SEQ ID NO: 12397 - DNA, 1117 bp, Zea mays
  Clone ID: 701174519_FLI
tattagtgcgctacctagctagtggagccgtggcaacgagcagaggtgtgcctagctagctcatcgatcaacgagtgagtagtagcaccatcaccatggcagacaagaagaaggtggaggtcaaagagacgaaggtggaggtgaagacggccgtctacaaggtgtacgtccactgcggccagtgcgcgcgcgacatccagacgcagttcaccgagttccaaggggttgaagaggtgaaagtggacgccggggccgggaaggtgacagtgaagggcttcggcttcgacgtcgagaagctgaggaagaaagtcgagaagggttgccggaagaaggtcgagctgattccgcccgcgcctcccaaggacgacatggtcgttgatgtcaagaccaaaaaggaggagctcaaggtcataactgtaaagctgccgttgcattgccccgattgtgcagtcagggtcaaggaggttttgcttgagaacaagagtatctacgaggccaagacggatctcggcaagaacacgtgcaccatcgagggtgtcattgaggaggacaagctcgtcaagtacatctacgagaggatgcgcaagaagggcgtcgtcgacaaggtcgagaagaaggtgatcatcaaggaggagaaggtcttagtgaagaaggcggataaggagaaggagaagaaggagaaggagaaggagaaagaaaaggagaaggccaaggagaaggtgaaggaggctgtcgacaaggtcaaggaggtcatcgccccctacttcatcccctgcacgcacccgaacttcgtcgactactcgcacccctggcaccgcggcggcggcggctactgctcgtcgtacggtgacggttacggctacggcgggggctgcggagggtacccaccgtacggtttcagctacacacactctgagctcaaaggctaccatgacacgtcgttcttgcactgcacacaccccaatgagttcatcagcgaggagaacccctacgcgtgcgctgtgatgtagcctctctttttttgcgcttggattcaagtcgaataatttgaacactaagaacaacaccaacgtacggatggctcaaattttctcttttgcttcggctcagatttgtt

SEQ ID NO: 12398 - DNA, 618 bp, Zea mays
  Clone ID: 701174568_FLI
cttttagtggcatcgctgctgcaggtggaggtggctacaacaaggttaatggggttcagtatggagtttctaggatttactagttctagttgcattgaccatctccagaacacctgatctgagttgaagtaataacatggcgaacagtgaaaagatttaggtgccaaagaactgccatgttgactccgagccgaagatacggagcatgaagagtatggtctccgatctcggatcaaggaggaagtgtgacgtcagattgaaaaacagataatattgggcaacagtcatggttctgttcattggacatagcttttcggaaagcaatgccatcaccccgcggcaacggtaaaataaaaggagagaaaaaaaggcagtgccgtcagttggttgctgcttataagagtcaaaggggagcagagacaattattacatggaaaattatgtactttgcaagaacggaaacattggggaataaaaaatagttagtctacgtttacctctctgtatataaaaaaagtgacttgattttatgtattacggctggtgagacccgcttctttaattcaaagctgtgaagttttggcctatattttgctctataataaagttcagattggt

SEQ ID NO: 12399 - DNA, 1837 bp, Zea mays
  Clone ID: 701174728_FLI
tttggaacaaaaatgagtgtattggtggccttcgactcctggataggagccttatcaaatggttcggtagaaatagttatttacggccctttttcattaaaaagggaggagctagagccattttgaaaaactcttgagccttatcaaatggttcggtagaaatagttatttacggccctttttcattaaaaagggaggagctagagccattttgaaaaaactcttgagggcctgtttggccctttttcattaaaaagggaggagctagagccattttgaaaaactctgagggcctgtttggcaacaatgttttacacatgataataccgtagttttggtagctccaaaaataacatggttttgagaaacattgtttggagacaatattataaaccatggtattaggcaaaagctagtcatgccataaaaactttaggttgtagtggaatctccaatactctaaaaatatcatggtatctataaacaatggttttgaaaacatagttttcaggagtgcaactaaacacctcatgacataaaatactacggtattgtccaaaaccatggtattgcatagaaactataaaaaaaatattttgctctcacacagacctaaactcttccagctcctaaagtttctccaggttgaaatgacaatcttatactgtctgtcatgttgtactataaatgccttggtttttccattgtttggtattttactgtcctgccaatagacaatttcactttgaattttaaaaagttttgacataaaaatttaaaatggacactttgccatagcaggtgttatcactgtgcatactctaaagcatggcggtttaagatagttaacaagcttggtgatattcaattaatcattgctgacgtattttgttgttaacaggattcaatcaattatttctggggtggtctacagccaatgcatagtctctatctgtgtgtgtgttttgtgtttcccgtgcactctattcctttcgagaggcactctatgtcaggtgcctgaaatatggtttagcttcaggcaatgaagtggacgtcggatggagatccgagtgtccacgatgacagagaccgggttttgaatctctcgtctctccatctctcatgcgttcccaacttccaactccaatgccgtctccgctggctgatcagtgatcacctctgaccctctctggtgatgtgtacccattgttaatctctccaatgaagctaccctgcctgaccaggcccacaggctgtctcctgcatacggtggcaacacaccaacactgctggcctgccctaagacacatcttcgcgttgcgtccactggatacctgctttcttagtcagcagcatgccgaaaccctccatttgtgaaacctcaggtgcgcgtagtttaggaggttagattttacttaatcgaccttcgcattggataatatgcctaacatggtgactttggatcgcttgttttctagcggtgataggcggtggttgtcgaacgctggcatgaaggtgtgagctcccaactgctgaatcgtgttcctcttttacatgcacgtgtccaacaagaaccaaggtggaactgtaaagccttgtgtctttgaactttgcagccatgtattcagatttttttttgagttattgtaatttatttacattccctctagaaccgagattagcgctacctcagtacactgccggtgcaagataaacgaaggaagctgggattgcatggcactgcggtctgttatgtagccgtggaacagcaagacaaaaagacatggatattccttgtttggattggggtgtttgatccagaaacagtctcattgct

SEQ ID NO: 12400 - DNA, 963 bp, Zea mays
  Clone ID: 701174741_FLI
gccgccgcttcggcctccgccgccgcggctcctgctcaacaacgtctcgtgcatgcggaacgcgcagacggtgctccgcgacatcaacctcagcgtccacgacggcacagccctcgtcctgaccggtgcgaacggctccggcaagaccaccctcctccgcatgctggcgggcttttcgcgtccctcggcgggggagatcctctggaatggtcacgacatcacctccccgggcgttttccagcagtacaagctgcagctcaactggatgtcgctcaaggacgccgtcaaagagaagctcacggtgctcgagaacgtccagtggttcgagctcctcgaggggaaggacggcagcaggtcgggcccagccatcgagctcatgggcctcggcaggctcatgaacgagaaggccaggatgctctccatggggcagaggaagcggctgcagctcgccaggctgctcgctatcgaccgacccatctggctgctggacgagccctcagtcgcgctggacgcagagggtaccaggctgcttgaatacattatcgcagagcatcggaagaagggtggcatcgtgtttgtggccacacatctgcccattcagattgaggattctatgtcgcttcggcttccgcagaggtttccccggaggaagacgctggttgatcttgtccgctgatgtcaatgtgagattgtgagcacaggaatttagctgtatctctctaattcctctccagctatctgtctgattgctgttggagcaattactctggtgctgcatttgtcatcctatttttgacaacatggcaacacattgtcgatgttgataatctgtaggggtctttgtgatcaccgattcgatgcattggcccatgtatttggggacactagaaagcatttgccatggctgatatatgtatggctgttctttgtgatcatggttttgatgcattgacccacttatat

SEQ ID NO: 12401 - DNA, 831 bp, Zea mays
  Clone ID: 701174755_FLI
ctaaggaagaatgggataagaaacaagcagaagaagctgacaagaacaagaaacaaactgaggctgatggcagtggtgctacagaattggaaaaagaaaaagaagaaagtcgcccaaagaacgtcaagcccaacaaggaagaagatgataaaatgagggcgaatgctgcaaacgtcgctgcccggcaagcagttggaggaagtgatatgctctcaaagtggcagttgatggctgagcaagccagacagaagcgagaaggcattgatgtgtctgctgcttcacagccaggcagagggccaggttccaggcaattatccaaatttgggaaaggtcctggtgagcacccagaaggttcaaagaggagccattcgatggcattcggaactggaggcatgaaaagacccggcaggacagcgtttgctggtccacagcgattgatctccgtgaaggatgtcatttgtgcccttgagagggagcctcagatgacaaaatcaaggctaatctaccggctgcacgagcgattgcctgtagattctaccgtagattagaccggaatagtcatatactttattgtgggcatgcccaattgcccttgcatggtattgaacagcgaagaagcatacccgccactcccatttgttgtgctttggagcggcactgtatattggtgtaaaatttgtatcgcaaaggcggcgaattaccagcaaaaaagggtttctgtacaaaattcactgtaagcggggtctggcatttgccttttctgcaaccacgtctgtgaggttatttctagcagactactcatctcaatatctatatttttaagggttaatt

SEQ ID NO: 12402 - DNA, 504 bp, Zea mays
  Clone ID: 701174784_FLI
catacaccccctcttgcccacaccacctcgctgaaccggaagacccgcacacacacgccacttgtagaccatggcgccccgggtggcggacaagtcgcctctaccgccggccaccggcctggggctgggcgttggcggaggagtcggaggcgtgggcatgggcccgcactacagaggcgtgaggaagcgtccatggggacgctacgccgccgagatccgcgaccctgccaagaaaagccgcgtgtggctcggcacgtacgacacggccgaggaggccgccaaggcgtacgattccgccgcccgcgagttccgaggcgccaaggccaagacgaacttcccgttcccctcccagtgctccgtcgcctccggtgctgccggtagcgccagtagcaacagcaccgtggattcgagcggtggcggtagcggctgtggcatccaggcgcctatgcaggccatgccgcttcctccggctctcgatctcgacctcttccatcgggcggccgc

SEQ ID NO: 12403 - DNA, 640 bp, Zea mays
  Clone ID: 701174842_FLI
aaacagtcccctttctcttctccacgatgtcttctgatttgatctggcaagtaattcgtaataataactcctttctcgttaaacgtgatggagttcaactttcagctgaaaagaataatttaactaataaacattcatttaaatattctggtttagctaatacaaagacagttggagttaacttatcaaaagataagaaaattactcttgctatcaaacgtaccaagaccaatgctgcacgtcatcctgccactggttacactgtgtatgctttgaacaagcatcaacaaaaccataccaacaaagctgctaagaccatccgtcaactcactactggttcatactatcgtcctgatttggccaacgcagctgttggacgttatcatgctctccatcgttcgttgaaacccgtcatcaacaagaaatctaagcgtaaaccacgtggatctaaagccaaataaatgatgacttgatcttgactttttctcttgccatcatcttcttgacatcgacaatcatgtgtcctcgtcttcgtttttcaccttcctctctttctattcattagtgttgggatcggatcggattgacgatgatgtagtggagatacacatgttcaaaccaacgtcgtacatctgtttgc

SEQ ID NO: 12404 - DNA, 726 bp, Zea mays
  Clone ID: 701174937_FLI
atacaacaacacatccatcacttttttatttgttttttcttttcattttaaaaaacttcaaaacaaacaactcaaaatgtcagctggaaagtgtgctgcttgtggcaagactgcctacccattggaaagtgtcaccgctttggaacaaaccttccacaagatttgcttcaagtgtgatgtgtgcaagggaacactcaacttgaagaactacaagggtgttaacggaaaggtttactgctttacccacacccctgtggacagaagctcaactggttccgactccgtcaccacaaagactgctatgcaggcaccaaagaagcaagctgagggtctcggaaccgctcaaaagggaactggtgagaagccaaacgttggcctcgacaccgtcactgttcaaaccgccatcaaggcaccaaaggctgttgctgagggtcttggtaccgctcaaaagggaactggtgagaagccaaccgttggcactgaatccgttcacttgaagagtgctttgagcgcaccaaaggtcagagccgagaacatcggaactgtccacaagggtgactctatcactgctccacaacaagcctccttcgacgtcgaacacccagcaccagcttccgaagaagcccaccaccacgaagaggcagaaccagtctcttacgatgaacaaccagctgacgagtaaggagtgacctcgttgtatatttagcgaccatacgacataaacag

SEQ ID NO: 12405 - DNA, 890 bp, Zea mays
  Clone ID: 701175091_FLI
acaggttgtagcgtttccagacactccgacacttaggcgatggggcctctggggactagggttttggggcaaggtactagcgttagtctttcctgcgaccccttagtccaatatatagcgtcgtgtgtctgggggctccaaccgaggttagcgtgagccctcccgatcaagggtccgattaaaggaacgatagttgggttaagcccaatccagactctattgaccggctgtagaggacacacccaacacgaggagctggccgagggcctggagctcaccggccgcccgttcctgtgggtggtgcggccggacttcacccccggcctcagcaaggcgtggctccacgagttccagcggcgcgtcgccggcaggggcatgatcgtcagctggtgttcccagcaacaggtcctggcgcaccgtgcggtggcgtgcttcgtgtcgcactgcgggtggaactcgaccatggagggtctgaggaacggcgtgccgttcctgtgctggccctacttctgcgaccagtacctgaaccggagctacatcgtcaacgtgtggaagaccgggctggcggtgacgcccgacgcggacggaatcgtaggcagggaggagctgaggagcaaggtggagcaggtcgtcggcgacgccgacatcaaggacagggcgcgggtgctcaaggacgaagcccaccggtgcgtcgccgaaggagggtcctcgaactacaacttcaaaaagctcgtgaatctgctcagtgaatgatgagaaccgggagactggaagcatcgtatcctggcgttgtaaatgttggtgcacttaaactccttgattgtaaacagtggcggagcaccgcggttaattagaggtggtaatggattgcaatctaaattcttatttgc

SEQ ID NO: 12406 - DNA, 1035 bp, Zea mays
  Clone ID: 701175253_FLI
tgcgcgccgaggttcttcctcatggcgctcggcctcttcccagcgctaccggccatccctctactcgcccagccgtttctccctgcaagcttcggctccctgcgcgtctgctccagctcggccatggccgtcgcagccaagtccctttcccccagccggtttttctgcgcgcgaagttcctttggctgcgccctccatttctcttccagctcgcgcaggtctgctgctcatctcccatggtggttggtcgctgctgcgcagcttcctggtgccgcgaccctcgccgtgatctcctctaccgcgccgaactgtgcagcgccgttgacgcctgccgattgttcgatactttgcgtggctagtcgcggtcatacacagcagtgcctgctcccagctccgcgccccagtccctagtgcctgaccgtcgtcgtcactggtagtacgccggcgcagcgttcctgcacatcaacgccaacaagtcgtcatgccatcgtcttcgtcgtatggagatcgtcgtgctgacacgtcaatgctgtcaatcgccatcctcgtctacactaaagatccgagaagattagacgcggagggaaacaaattagtacgtggcgggaaaattctcgatgtggaagaagaagtgtgattcgatgcgacactcaccatgtattcaggggaaaagttagagctgaaagatatcgtccatttcatgatgtcaagctggatttaattatggtacgataaataatcacgtgatgcggaagacgagccaagtcgacccaagcacgggctgaatccgcaggatgaagctgatggaccaacctgaagatggttaaattaagcaagtgctcggtcgagggatactcgtcaagcggacatcgtctaacaaacactaacgtagtgtttattccaggcaagccccggtgcatttgccccttccttgtgttttaaatgctttttcaccttatctgatgcattaggtgataggagttgtgtgataaacaattgatgcattaccactccttggaaaaatcatttgttttc

SEQ ID NO: 12407 - DNA, 726 bp, Zea mays
  Clone ID: 701175303_FLI
cttcggcacaccgcagcattcaaaatgggtcgtcttcactccaagggaaagggtatcgcctcctcggccattccttactccagaactcctccagcatggctcaagaccactcccgaccaggtcactgaccagatctgcaagctcgccaagaagggtgccacccccagtcagattggtgttgtcctccgtgacagccacggtatcgcccaggtccgcaacgtcactggtaacaagatcctccgtatcttgaagtctaacggcctcgcccctgagatccctgaggacctttacttcctcatcaagaaggccgtctccgtccgcaagcaccttgagcgcaaccgcaaggacaaggatggcaagttccgtctcattctcatcgagtcccgtatccaccgtctctctcgttactacaagaccgttggtgtcctccctcctacctggagatacgagagcgccactgccagcaccttggttgcttagataaccaaagtgcgacggtattcttcgttatgttgtacgagacaaatttgggatcaaattcgggtccagaatcgctagtgaaacgatatatgtttctgtcaatatttcaaagagaggcaatccacaaccgagctcttcgatcttggtcgggttctctgtacaagctatgaagttcacgattactatgtagccactcaatacatttctgggtcggagaatcaaaaaagttctaatggtcttttcatt

SEQ ID NO: 12408 - DNA, 1084 bp, Zea mays
  Clone ID: 701175365_FLI
gccgagtgaactggacaagataccgagtagaatagaatagcgaagaagaaggatagcttgttggattgagttttgaacatcatttttctatttttactgatgcttatcaatttagttaatctcttggagttgctcttataaatgcgcggcgatcaacccatgaagcaaacctcgcatgcatggtggcgttcacgtggttgttggcgcggccatgatgctcttgctggacgaggagctggtcagcctcagtgccctcatggtgctcgctagcacccaagcctagctccagtggctccacgagccggtgccccttgtgctcccgccgttcttgtcgttgggtgccgagagccagtaggatgacgaaggcggggccgcagtgcctaggcagccaccgaagaactcgacgcacttgacgcggtggtgctggtcctgttcgtgttcctcgccgacgccctggtagcctagcgcgtccgcggccttgggcttggccgcttgggggcttgcagtgagactgtgggagtcgacgcggtggagcgtgcagccgccaaagccgatggagaggcgctccaggccaggaagtctcccgagaagctgtggctgtcgcagccgactgagcgcgacctcgccaccttccgtccgaacgacggcgatgacaacgagccctcggcccctcgctgcggcgggagggtgtgcgagaacagaaatacgtgagcgcccgcatgaaagaagggagatggcgaggcggacgagctagccaaagatgccgagtgaactggacagataccgagtagaatagaatagcgaagaagaaggatagcttgttggattgagttttgaacattatttttctatttttactgatgctcatcaatttagctaatttcttggagttgctcgattgtccattctctgaatgccaagtttccttttttttcccaggtggtccctgatcgccggtcatttgcctggccgaactgacaacgagatcaagaaccactggaactcgcacctgcgcaggcgcgggcgggcgggcgactcccgcgacgacggcgtcgtcgtcaacatcgacctcgtcaagctgccc

SEQ ID NO: 12409 - DNA, 567 bp, Zea mays
  Clone ID: 701175393_FLI
gcggcacgcatgtccagcacgccgcggccaagacgagcagcaaagcaaaccgtatttgtcccgcggcggcctcttcgtcccgcaaggtcgccccacctagatccggccacgccgcacgttccccttttccgccgcagcgatggtgtacgtggattcctgggacgagttcgtggagcggtccgtgcagctcttccgcgccgaccccaacaccacccgctacgtgatgaagtatcggcactgcgaggggaagctcgtgctcaaggtcactgatgaccgcgagtgcttgaaattcaagacagatcaagctcaggacgcaaagaagatggagaagctcaacaacatcttttttgctctgatgactcgtgggcctgatgctgatatcagtgaagtttcagagaagggacaggccgagcaacagcaaccgaagaaaggtcggggaaggagacaatgatgccggtctggttcttatttctttcagaaaattcacaactggaatggtggattgacgtttcattgattattgttgtccgctctgtaatggtactgggaaggaagttttttcagtac

SEQ ID NO: 12410 - DNA, 1313 bp, Zea mays
  Clone ID: 701175394_FLI
ccaaaatgcagggagggattgtcatggctggcggcggcaagccgtcgtggtctgcctcggccatcgtcgccactgtcgcgagtgggtaccacatcctcaggatcgatggctactcccacaccatggggacccccacaggagagtacatcgcgtccctcccgttcaccgtgggcggccatcgctggcacattcgctactaccccaacggcaggagctcggagaccaaagagtacgtctcgctttctctctatctccacgactgggtcgctgagacagtgaaggcgcggttcaagttccgtttcgtcggtgacgtggcggagcagccgttgatactgggaggactgcatagctttgataatattgacaacaattgggggcgccccgagttcatcaaaaggaaagatttggaagagtcgaagcatctcctagacgattctttttccattcggtgcgatgtggtcgtgcccaccaacgaagtccgcgtggtagccactgctgcggctgctatggtttccgtgcccccatctgacctgcaccagcatctcggcattctcctgctgaccgagaagggcgccgatgtggtgttcgacgtcgccggtgagacgttcgccgcacaccggtgcgtgctcgcagcccgttcgcctgtcttcagtgcagatctctttggtgcgatggaagaggggggccacaccggaggcgtggtgcgcatagaggacatggaacctctggtgttcaaggcattgctctacttcctttacaccgacttgttagagacagagacgatgaaacaaggtgaagacggagacgatgaagacgttttgtgtcagcacctactggtcgctgcggacaaatacaacttggagaggctgaaattgctatgtgaaaagaagctgtgtgagtgcatccatgtgggcacgatagcaaccatcctggcgctcgctgagcaacaccgctgccatgcactgaagaaggtctgcttccattttctcagctctcctgcaaatttgagggcagtcgccgccactgacggctttgagcatctgagcagaagctgcccctctgttatggaggagttggttgtcatgctcagcaacttggtgtagaaaactgcacagtagttgtgcatcctaggagattctcaatcttttggtgcttttgccagttgacttgactgcgtatgtgccgctctccaccaattcgcagcgggtgattttgttagctgctagctttgaatatccacaaacaagtccgcctatgtgtttaatgtttaattctcagaagttggaatgcactatagctcttgctttcttatt

SEQ ID NO: 12411 - DNA, 934 bp, Zea mays
  Clone ID: 701175420_FLI
gcataccataccatagaagctgaagagaccaaggacaaggacgacctgccttgcatggcgcaatcggtgaaaatattgtgtaaggatggcttcaacttgtacgtcaccattcgtggcaataaggccgttcttgcccctgaagatcccgacgacgaaatgcaggaatggttcaaggactactccagggtaagcagtgtgacggatgacaacggtcaaagggtgttcgcgctggtaaacaaggagacgcaacaagccatggtaaacagaagggacgagcaggaggtaataattaatacagggtcgtcatacatgcatggtcgctgtcaggattattttctctaactcagggagtgtttgcttactagagactaatttttagtccctccattatattctactttagtctataaattgtaaaatacggaaactataactctatttttatttccgtatttgacaatttagtaactaaagtggaataaaataaagagactaaaaattagtccctaaaaccaaacaccccatcatttgcttctctgtgttacggatcgaccaggtgcaacttgttccatattacaaagatgacgaccgtgtggatatctccatgctttggacagagctcccagaggaccacggcgacggctttcaccaaattgcagcgctcaagaacacatatgaggccctggacgggctaggcggcaattgcaaagaggggacgatcgttgggatagatcctacgcattattcatatctcggaactgttaataagaatcagctgtggaagatcgttgataaagggaccgctaggcgcttgaccaaagagctaggactaggaggagcgcgtctaaaaaagttggctcccatttctttacgtaactaataaaacttcacaatataataaaatttatgctctgtgttgtgctaagtatttgct

SEQ ID NO: 12412 - DNA, 464 bp, Zea mays
  Clone ID: 701175504_FLI
gccgaagctggacctgcaaagcgacaagaagaaaggaatccaagtgcagcttgacctgaagagcaatggggatggcccgcgcgggaagaaggcgcctgctgccaggtcaagagcaaccgggtcaggtgggaaggccgcggcgggaggaggttcggctgggaagaggaagaggtaaatgagacatttggcgcctgcccacagttggccggtggttagtttggacgcacagatcccttggtaaataaggagcaggggtggtaagcttcagagttttgctcatctaatggcacatgtaggcactaggctactgtgcctgctcccatattttctcccagggcacccatgtcttgctaccagaatttgtttgcacttaggctacttccaggttgtggcaatcgagagtttggtgttgtctgtttcatttagcgaatttgtcagtactctataccacgggtcgttgcctc

SEQ ID NO: 12413 - DNA, 400 bp, Zea mays
  Clone ID: 701175617_FLI
gtttccgtgttccgtcgtctccgccgccgaaaccatgccgtcccacaagaccttccggatcaagaagaagctggccaagaagatgcgccagaaccgccccatcccctactggatccgcatgcgcaccgacaataccatcaggtacaacgccaagcgcaggcactggcgacgcacgaagctcggcttctgagcggtggaagagatgatggccaacgatgcttgtggaggatagagctctgcaaaagctaggaagctcttgtttaagattttgttgtgttaaagggagctgactgagaatattgttctctctgatggttaaagaactgccttttatgttatgctgaatttatcgtgcctgcattgccttaatcagttgatctcgagctgattgttttgcctt

SEQ ID NO: 12414 - DNA, 816 bp, Zea mays
  Clone ID: 701175682_FLI
agcagatctactgagcagacctgcttcagctggcgaagggagtcaaggcagcagtggcccttggagttacctggaaggtttcactccagtgaagtccattgggtcaatgtcagcgtcacactcgtaccttctagttccttcgccaagtatgagatacctctctcctgcaacattacagctcccgacatgcctcacatcggagtcaccgccgcttgcccatctactgcacagcaaagggactgcgattcctttagcgatgggctatgtcgtctcgaaagccgtcccacctgttaggagggactctgcacaactcaccaaggatgaacagccctctgttctctcagtcagcatcatcgatcactatggaggcagcagtgggactgttcaagagaagatgagccgaggcggcggcggcggcagcaaacaggcaaggaacttgagtcaggagacaacaggtcgtgagtgtgagatggagatgcatagtgtgctggaagctgtggccgcggagcttcactctctgtcttggttgacagtaagcccggtgtacacagaaaggcgcacagcactgccctttcactgtgacatggtcctaaggatgcggcggcttctacactacgcagataagtatctatctgaacctaagggagagacaactcactaattgtcatgtacaattaatatctagctaggtaggtatgtgagggcacatttgacgagctttgtagactgattttgcaataaccctgataacttacaggtggatgctgtaacctttttctctttttttaggtctgtattgtttgtcgacacagacct

SEQ ID NO: 12415 - DNA, 894 bp, Zea mays
  Clone ID: 701175695_FLI
gaaaagagccttttctatctcatcatccccactggcacacccaaatcaaatccatttgaccgttagcgtcgtagcatgggttactccattcaagagaacccggcgtggactctgctctacatggctggccgggctcaatccaaataaagacaatcttatcccgtgttggatacaccaagggtccctgcctcctccacgtccattggttcctctcgtgttgattggaccaggaacagggtgtgcaccattccgtgcatttgtggaggaaagggctgcacaggctgcagctgaaccaacagccccggttctgttcttttttggctgtagaaaccaagaaaacgattttctatacaaggatttctggctaactcatgcgcaggatgagggggtgttgtcctcgaaaaggggcggtggtttcttcgtcgctttttcccgggatcagccgcaaaaggtctacgtgcaacacaagataaaggaacagagttcaagactgtggaacttattactgtccgatgcagtgatctacattgcaggctcttcgacgaaaatgcctgccgatgttacagctgcgctagaggaggttatttgtaaagaaggtggtgtcaagcaagcggatgcttcgaaatggctcagggatctagaaagggctggtagacttaacatcgagacatggtcatagttgtgatgggcaagaaagtacatattatttatgtttgctgaatatagaaccagtgagaatttcactgtaaatcaaaggcattggaaatgtggaaacgtgtagatgttaaagcatccaatacggagaaatagttggaggatgatctaaactttcctcatttagccctctgtacgaaacgccatttcgtttgattaagtgagcacagtaattacatc

SEQ ID NO: 12416 - DNA, 916 bp, Zea mays
  Clone ID: 701175701_FLI
atcagaatcgagtgatgtcataattaccatgcttccttcatctactcatgttttagaagtatacaatggacccaatggcttgctttgtcggggcgaacgcttgggcccatggttatacatagattcatcaacagttgatccacaaacatcaagaaagatatcgacagccatctcaagatgccttttaaaagaaaagaaaggtaagttccaccatataacagtaaagacatagggcctgtttgtttcagcttatagattatataatctagattataatctagattatataatctggattataatctatggagattataatctgtatgtagctgtctggtagttcagattatacgtatgcagattaatgttctgtgagacacaatgacaacaatgctcttgtttgtttagttgtcttctttttttacggtttggcattccatcgattcatacaactatttgcaaaataggaaattaaaattatgccaaatacaccattggaaagctacaaatttcgtttgtaaacatcagtcatagagactggtatacaatggcagtctttataagcatttcatcgattatgtggcgcacacataaaccatatagtgagcagcatcaatggagctagctcctatggtaaatagtccctgctgcgacatcaatggatcatcaaaagggagttgtgtttgctcgtcggggttgcgtttggtcgccggagcaacgcttgctcgcggcgaggacaccggagctgcgttcaggctgcggcgtgaaagcacgcccagaggcgacgccgccattcccaaggctgcacccgctccaccgttgccgaagcattccgcagagccattgtagatgccgcgctcgccgacgccacaatgttccccacgtgaagaggatcaacccaggagagggactcctg

SEQ ID NO: 12417 - DNA, 972 bp, Zea mays
  Clone ID: 701175704_FLI
aggtcaccagctactggctgggcctcaacgccttcgccgacctcacgcacgacgagttcaaggccacctacctgggcctcctgccgaagaggaccagcggtggccggttcaggtacggcggcgtgggcgacggcggcgacgaggtgcccgcgtccgtggactggcggaagaagggcgccgtgacgggcaacctcacgtcgctgtcggagcagcagctggtcgactgcagcaccgacgggaacaacgggtgcagcggcggcgtcatggacaacgccttctcgttcatcgccgccggcgccgggctccgctccgaggaggcgtacccgtacctcatggaggaaggggactgcgacgacagggcccgcgacggcgaggtgctcgtcactatatccgggtacgaggacgtgccggccaacgacgagcaggcgctcgtcaaggccctcgcccaccagcccgtcagcgtcgccatcgaggcgtccgggaggcacttccagttctacagcgggggcgtgttcgatggaccgtgcgggtcggagctggaccacggcgtggcggcggtgggctacggcagcagcaaggggcaggactacatcatcgtcaagaactcgtggggcacccactggggcgagaagggctacatccgcatgaagaggggcaccggcaagccggagggcctctgcggcatcaacaagatggcatcctacccgaccaaggaccattgatggatcatggacgacggagatcatatctatcttcccttccctttcatccgactctttcgatttccatcgtttgcccccttttcctgaatgtgtgtgtttttttatatattactgtgtcaagtaatttctcgatggatcgatcgaggatgaacaacaaacatgcactcaagcacgagcgcagcaatgccatctttctcttcatttggtgcgttgaaatgacggatatcaaataaagcggtttatttttttt

SEQ ID NO: 12418 - DNA, 574 bp, Zea mays
  Clone ID: 701175788_FLI
caaagcaccagggtatcacccagctcaagttccagaggaacaagaggtctgttgctgaggagagggctggacgaaagcttggtggactcagggttctcaactcctactgggtgaatgaggatagcacctacaagtactttgagatcattcttgttgatgtggcccacactaccatccgcaatgatccaaggatcaactggctatgcaatcctgtgcacaagcaccgggagctccgtggtctcacctccgcaggcaagaagttccgtggcctgcgtggcaagggccacactcaccacaagaataggccgtcgaggagggccacctggaagcgcaaccagaccctttccctccgccgctaccgttgagcacatacatcttgatgttctgctactgtggaacctgcctcatgcatgctctgatagtatttggtatttttgttgcatcgttaaattttgctacccatgttacaagctccttgaactctgttatcagtgtaccatggagaaattgaagcgaactatgtttgtggttatcctgtgttatctcgatgaaaatgatggtttagttgattatt

SEQ ID NO: 12419 - DNA, 959 bp, Zea mays
  Clone ID: 701175975_FLI
gaatcgaagagctcggtctaagctgctgcgatatggtgacagacagaggacttggtttccttgcggcgggatgccctaatctcaagaaactcgacttattgcaatgcacccggctgaccgatcaaggtctcatcaatcttgcaagtggctgtcacaaactcgaagaggtcattctttacgagtgcgaagaagtcggtgatgagggtttgatggctctctgtgagaactgccccaatctccaagctcttatgctttcaaacacttcgattacggacagaaccttgagacacattgctgcttactgcaagaaccttcgagtgcttcacttatctcgatgcgcagtctcttctgctggaatcgcagagatatctttggagtgtccaaacttgcaaactcttgtcgccaactcttgcaagaacgtggatgacacagcgttggaaaagctttctcgtggatgcaagcagctcaacgttcttcacttgagtggatgcccagtcaccgatacgggtatcaagaaagtatctcgcgagtgcaaggctattcaagtcttgaacctcaatggatgtgctcgcttgactgatgaaagcattcaatccatcgctttgggatgccctcaactgcacacaatcacgttgaacaacattgagaacatcaccgatacttcgttcgaagtcctcatcaacacttgcaaggacctccaaaaggttcatatcatgagttgcccaaacatcacatctcaggaagttcaagctgttcaacagaaatcaccaaagctgtacattcagtctcaatacaacctttcaccagtggcgccttctctgatgaagtgaagttgagagtgggatagaagaaagaaagaagaaagaagaaagaagaaagaagaaagaagaaagaagaagaaaaaaaaaaaaaacagatagcctgtacaataaaacaaaaccttgtagattataaagatt

SEQ ID NO: 12420 - DNA, 1052 bp, Zea mays
  Clone ID: 701176024_FLI
cacggaaccgtcgaggggcaaggcagtggcggaccgcgtacgccgtggacgggtggatgaccggaggcagattgtggatggcaaatccatggattggaggcctgaagggcactagctcgccgtcgttcactgcgctaggactccggaggcctggacggtggaccggtggacgtgatgaagacggattgaaagagcagatgacttggcgagggcaagcagccgccaggacgcgagccgcgagcgtgaggaagcagctgccaggtcgctggacatctttactgggcatgtgggccaaattttatgtggtgaaaaccccttggtgcaaaaaaaattttgggctacgccctgggccatgacctaggtggcccggggcccaaatccacccctgggcgacgcctttaaaacagtgagtatcgggatactatgtgattttatattttaaaatatcaagaaatacaaacaaatgtgtttacgaaaataaaaccacacactaatatattgattattatattcgaatttaacatatgtttgtagccttctactcgccggtgtcacggtgtgccttgtcagatgcgaagatggcccctagatcactcaaacgctcataaaactcaacacgaacactgaaagaacacaggtttttggccctgccaaattatactgctgccctaggtgtgttctattgatctatttatatacacaattacaaaggttcacagccataacggaaactatccaatcagctatcaatagctaagaaatgaaactaatcaattagcatcaatagctaagaaaggaaactgattaatcaactatcaattaactaagaaaggaaactacccaatcagctaagaaaggaaactaatcaatcaactatcaattagctaagaaaaggaactatccaatcagctatcaattaggtaagaaaggaaactaatcaatcaactaagaaggaaacaaataaaccgagctggattgtgcaacaatgttcccaagataaattgtgtatcgtttagtgtacaaaaagtaatatatttgtgcaaacatcgtcc

SEQ ID NO: 12421 - DNA, 1411 bp, Zea mays
  Clone ID: 701176046_FLI
ggattgtgtgagattgaactttagccacggaactcaagaagaccaccgcaagttgttcaatcttgtgaagtccctttccgttaagtaccaacatcaagtctctatcatgtgtgatattcaaggccctaagatcagaactggtcgcatggagaaacctttcgaaattcgcgctggcgagaaaatcgatgttacgcccgaagatgtactcggaacacctcaactcatccaaatcaagtacgccacgatgttgaaagatctcgacgcaggcgacgttattttcatcaacgatgggattatcaagcttaccgtagagtcaaagtccgagaaggctttgcattgtgtctgcaacgcaggaggccaaatctctgatcgcaagggttgcaacattccctctggaaacatctctctcgatgttgtcaccccaaaagacgacaaagacttacaattgatcgcagaactcaatcctgagtacgtcgcttcttcttttattggaactgccgaagatgtgttgaaggtgaagaaggtgttagccggatatggcaataccaacattaaaatcatttcgaagattgagagacctgttgcgctagaaaacatcgatgccatcatagaggtgacggacggcctaatggttgccagaggcgatctcggtgtcgaaatcgacacctgggatgtgccctctgcacaaaagatgctttgccagaaagcgaacgcagcgggaaaacccgttatcgtagcaacgcagatgttggagtccatgacgcagaactcaagacctacccgtgcggaagctaacgatgtgtacaatgcagtacttgacggtgcggatgcggtcatgctttcaggagaaacggctacaggaaagtatcctatcgctgctatccaagtgatggacaagatcgtagaggctgccgagggtcacatgccagagagattatcaactaactttctatctaccaaagttggtatgaccgaaaccattgctctttctgtttacgaaaccgccaagaacttcactcgtattggaaggaagtgcaagattatcgttatcacttatcctccatccgcatacactgcaagaatggtttcgaagttccgtcctccagcagatgtgatcacaatcacctctgatctacgtatagccagagaaattaatcttttatggggtgtgcgatctgttcactttcctgagttatcggaggagaacaatatggaagtgagaaacttgactgctatcaagaaattgatcgaagttggtttggttcaacttgataactatgtcatttgcgtatctcgctctctgtttggcaaacatactggagcttgttcaaatgtttattgtttgcctgtgcttaaggaagaaggactactctaaatcactgagccaaaaataaataatttctgccatttc

SEQ ID NO: 12422 - DNA, 1388 bp, Zea mays
  Clone ID: 701176051_FLI
attcccccgcggctcctctcttcctgtcttacgtcgctcgccgcatttcgccatttttggggagggtgtgttccagccttgcaggccgccgagatggtgggaggcagcaagccgctgggggaaagcgtattcgcggtccacgcggtcgccggtgcggcggcgatcagcgcctccgccgtcgccgtgtaccccctcgatacggtcaagacactcctccagctgggagcgacggggcagaagcagaagatggggctccggcaggtggtggaccggctcatggccgcttccggccctgcaggtttttacaatggcattggatggtccatattgggtaaacttcctggattgggagcacgttttgggacctatgaacttttaacagccttctataaagatggaagggaggacaactatgtctattattctgaggctatgaaggctggcatagctgctggtgctgtagaggctgttttctgcacaccatttgaacttttcaaacttcgaaaccaagttagttctgtgattccttcaaaagctatgggccctgcaaatgttgctcaagaatcatttccactgctttccaaactgttgcctggatatgttcctgatataagggtgtggaacaacaccatgagccttttatctgatctttctcccaagcatcctgacatgttgggtgctctgaaacagcacccatggatgcttacgggctctgggaaacccccattaccgtctgatgtgcatctaccttctagagtgatattgcttgaaggatggggtgctctttggagagggctcagatcagggatagctcgagactgtgtatttggtggtatgttcttttctacttggcaattcctacacacagtgatgctcacctggaaggcagttaatatgagccctaaacctagaaatctagaagcagcaggacctgtacccccttttgcctctagtgttgctgcaggctttgcaggagcgatagcagctgctgcttcacatacatttgatactgctaaaagtcgttcagagtgtactgtggtgcctaagtatatcgcaatggagaggaagtttcttaagtggaaagcaccaggaacgtggatagagaggaagacaggaatatcccctgctgataggaatgttttgttccgtggcattggcctacgaaccgcccgtagtggaatcgcatcatttgtgttagtcggctcatactatttagctgtgaatcacctctcgtagttgatcaagagaaatcatatggagatttttttttgcattcagaagttcaaaactaaaattttatgactgtatatgcatgcactgaatggctggaagctgactttgccacagtatccactgattatttgaaaatcctgttcacctaagtgctc

SEQ ID NO: 12423 - DNA, 785 bp, Zea mays
  Clone ID: 701176117_FLI
ccgatctccaaatcgcccccccaaaccctcttcttcccccttcccgtgctcgacccagatcgagggctcgatccgtcggccatggcgctggagtgggtggtgctgggctacgcggcgggcgcggaggcgatcatgctgctgctgctgacgctgccggggctcgacggcctgcgccggggcatgatctccgtggtgcggagcgcgctgaagcccatgatgtcggtggtgcccttctgcctcttcctgctcatggacatctactggaagtacgagacgcgccccacctgcgacgacgagcacgcctgcaccccctccgagcacctccgccaccagaagtccatcatgaagtcgcagcggaacgcgctcctcatcgccgccgcgctgctcctctactggatcctcttctccgtcacccagctcgtcgtcaggctcgagcagatgcagcagcgcgtcgacaagctcaggaagcgcgacgactgatggatccgcatccatccggtgggctcgttcttcctttgcctgccttgtcttcctgctttatgttgtggtgctgatgttttagatctcggatcgtaatttgagacctgctggtagcatttgcttcctttgccttgccgtcttcagataaaaaagaacagcgctcttggaaacgatgatatgtttaggatgtttggacgaatggtatctgtcgtaattgatgtcttcatccatgacttggttacttggttggtgtcactgaatgtacactgagatattggttaatagctactagtgctgtttttatc

SEQ ID NO: 12424 - DNA, 795 bp, Zea mays
  Clone ID: 701176129_FLI
cgtcgtcttggctagctgcctagctagctagctagttcctcactcctctccgagaaccccctttttcatctctctctctctctctctcggtctcgcccagctcctttcgatgttatcgtctctgctggcctcgcaactcgtcgagagagactcgtgaaaaagaatccagatatagctagagagaccgagagggcagctagcttaattattagcatgtcgatgagcttcttgagcatggtggaggcggagctgccgccggggttccggttccacccgagggacgacgagctcatctgcgactacctcgcgcccaagctcggcgccaagcccggcttctccggctgccgcccgcccatggtcgacgtcgacctcaacaaggtcgagccatgggacctccccgtggcggcgtcggtggggccgcgggagtggtacttcttcagcctcaaggaccgcaagtacgcgacggggcagcggacgaaccgggccacggtgtccgggtactggaaggcgacggggaaggaccgaccagtggtggcggcgcggcgaggcgcgctggtggggatgcgcaagacgctcgtgttctaccaggggagggcgcccaagggcaggaagacggagtgggtgatgcacgagtacaggatggagccagctgctcctcttcttgatcaccaaccctcctcatccaactccaagcaggatgaagattgggtgctgtgcagagtcatctgcaagaagaaactggcagcaggaggccgcgcaggagggggcagctcgaggagcctggtcgccagcaac

SEQ ID NO: 12425 - DNA, 873 bp, Zea mays
  Clone ID: 701176186_FLI
ggaatgactcgtgatgatttattcaacacaaatgctagcatcgtagctgctttagctgatgcttgtgctcaatattgtccaaaagcttttttggctataatttcaaatccagttaactcaacagttccaattgcaagtgaagtgtttaagaagcgcggtgtgtacgatccaaaacgtatttttggtgtaactacacttgatgtggttcgtgctaatacttttgttgcagaacttaaaaagttggatgttgcatccacaaaagttgatgtgattggaggacatgccggcatcactatcattcctttattgtctcgtgttcaaccttcagtttcttttagcgatgaggaacgtgcaagtttaactactcgtattcaagatgctggcacagaagttgttaaagccaaagccggaactggttctgctactttgtcaatggcctttgccggtgctaaatttgcattctctcttttggaagcattgaatggaaaggaagtagttgaatgttcttatgttaaatctgatgtaaccgaagcttcttatttctcaactccagttaaaattgataaaaatggagttaaagaaaatttgggtcttggtaaactatcttcttatgaagaaggattagttaaagcttctattgctgaactgaaggctagcattaaaaaaggagaggaatttgtaaacaaaaactaaattaatctattaaatttaatttgtaaattaaatttagtttaatagattacatagaatctttaaattaaggcattacttgtttttcgacgtttgttgcaatattggttttttattaatttaagtaattagaaatgttgttttatctttacttaaaattataaaaaataaattaattttttt

SEQ ID NO: 12426 - DNA, 431 bp, Zea mays
  Clone ID: 701176265_FLI
accaagaaggtgccggaggaggagaaggagacggcggcgctcgtggagaggctggaggagctggaggagtgcatcgacggcctggaggccggcagcgacaaagtgttcaggagcctcgtgcagaccagggttgcgctgctcaacatacacacccacatcgtctagctccagagtccagactccaatctactaattactcatatgcatgctgtttacttgttgattagcagtcgtcgaaaaatgaagatgcatgagtgtaactgtaactctgtaaatacgtgagctttttgtacagttacgcttgtgtatgtttactgctgaatcattatacgtgctttgattatgttgttgggttgatctcattccagctatcgagtcggtctgaatcgaacaccttgtgttcctgatttggggcacaataatgacctttt

SEQ ID NO: 12427 - DNA, 275 bp, Zea mays
  Clone ID: 701176283_FLI
ctattttacaagctgctcaagaaagtggataagtttcagtggacttcagaagcacaggaagccctagaggcactgaaaaaattcttggcgacaccactagtgctgaagccgccgcagcgagccacgtcaactcaaccagctgaagacttgttgttgtatatctcttgcacgactcacgtggtgagcaccgcgttggtagtcgagcgagccgaagaaggacatgcctacccagtgcaacatcatgtttatttcatcagtgaagttctgggtccctc

SEQ ID NO: 12428 - DNA, 791 bp, Zea mays
  Clone ID: 701176323_FLI
cgcagggccaattggcagtccttgcggatgaggacaaataatttgatacgaggagataatgccagactggagtgtggcttaaagaaggagatgcgggaaatgttgccagttgttatcttcaaagagagtttcttgatcagggagacacagtgctcggtctgcctagcagaatacgaaccggacgagaggcttcagaagatacctccctgtgggcataccttccacatcaactgtatcgaccactggctctccacaaacaccacctgccccctctgccgagtatcgctccttcccgcccccaaggcaaccagcaccggactggatctggaagcacagactgcggtagaagaggagtctccgaacgcacatcatcgccaggaggagggactcgttgatgccaacacaccacaggaaggtgaggcggccggaggtgacggatcaagtagcgtccaggttgaagaactgcacggcgatgcggccgagccattggcggtgacggtggtcgctgtcgctgcgcctcaggctgacgctgaaggttcaccgagtacagcatgccaaactgttaaagggaagaaataaggatagcctagcccatcgatgtatttctattaccattgtgtgtttagctgggaaaggaaaaaaacgcataaagatggggccattgatgttatgattgccatttttctggggaggaagaagaagagcaagagttcagttgtggggaaatcttattgatacagcacttaacataaccgagattagtagtacttgtgagctgtttttcatctggt

SEQ ID NO: 12429 - DNA, 290 bp, Zea mays
  Clone ID: 701176379_FLI
caagcacacacacaatgggaaaggtccacggaggtctcgctcgcgccggtaaggtgcgcaacaacacgcccaaggtcgccaaggccgagaacaagccgaagcctaaggtcggccgctcgcagaagcgcctcctgtacagccgccgcttcctcagcaaggtcgagaccaccggccgcggtggccccaacagccagaagcgcaagagcgaggaggccaaggcctaagcagctcgcctactttgagcactattcaggcatgcctgcacgtcttcaccttaaaaattcctgttg

SEQ ID NO: 12430 - DNA, 602 bp, Zea mays
  Clone ID: 701176393_FLI
atggatttggggatgatcaaaatccttatactgaatctgtggatctattggaagatttagtgattcaatatattactgaaataacatataaggcaatggaagttggtaaaacaggtcgagtgacagttgaagatatcatgtatttaatgaaaaaagaccctcgcaaatatactcgtgtcaaagaattgcttctaatgaatgaggaactgaaaaaagcaagaaaagcttttgatgaagtgaaatatgctgcgctttaattttgttttttatcatctccattcataaatataattagcaaaataaatttacaaaacgaaccctctaacaaacgttttgttgaaaaacaaataaattctccgtttaacatgttctaaattttggagaattaaaatcgacattcgataagtttttcaaacgcatttaaaactaaatttaaaatttaatgtctgctatatgtacattgtattaatatattaattaattttgtatctccatgctaatggaaaattaatgaattcaattcaaattcaagctttgttaaataaaaacaacgacttttctataataataaaaaatgatcagcttaagtgaaagcaaacaac

SEQ ID NO: 12431 - DNA, 180 bp, Zea mays
  Clone ID: 701176493_FLI
atcgagtgaagattgcaaggctgtgtccaaacaggaggaagtttggaacgagatagatgtatctctgctttgcttattggagttgtaacagatccaactacatgatcaaattcgtgtatgcatcagtctgccagtcctgtgtggctgtgtccgtggatcgttatgtcagattagtttctg

SEQ ID NO: 12432 - DNA, 265 bp, Zea mays
  Clone ID: 701176522_FLI
gtcgtctgcgacgtctgcggcgacgcagccatcggcccggaggaccacgccctcgaaggtgcggaggttgctgtcctctgcatcacaaaatctggtgaggttatcaactatcaagccttcacaaactccaagggcgtgtatactgtcgccgagactatgccggagagcgacaggtgggactcgtgcttggcgaggcctatgagcagcttccatctacattgcacacggcggggtgatgctcactctggggtgaagttcacttaca

SEQ ID NO: 12433 - DNA, 292 bp, Zea mays
  Clone ID: 701176548_FLI
aacaatctctggaaagtgcatggtgctcagaatgcatagtttgggaatttgcatgtttcctacagagcatctaatagttgtttggagtgcgcgttttacagttctaaattttccctgtggaactcatgaagctgaaataaacaacagtcctttatgccgtgaatttggcatgaatagctgagcatctcattgtatacgcttaagaattatgtaatgtaatgcatcaaaagaacatgtgatgttttcttgcatcttgtcttgttaaacggaatctgctaagaggttggatacc

SEQ ID NO: 12434 - DNA, 342 bp, Zea mays
  Clone ID: 701176550_FLI
gaccgaccaagcagctaccccgactcaacctgcagcgccctccatagatctttccactttaaccccggaacaagccgagtacttccagaaatttggtcgtcttccaaagcctaacttgataaagcaacacaagaaaggatttgattcagcggattggcaattagccaacaaacaaaaggcaggtggtcctggtgcgaacgtagaaggaactacaccaaccaagaaaccattcgttatgaccaagcaataattatgaatgtgtttgtgtttattttcgtgtaaggtcaaagtataatgggattgttaagtagttagataaattctgtctctttttttgcctgc

SEQ ID NO: 12435 - DNA, 1437 bp, Zea mays
  Clone ID: 701176735_FLI
gtttatctcagcaactaattacgtgtgaattgactgcattcatcatggctaccaaagaagaagctagcgctgtccccgccgccagtaaaacttcatggagtagcttcctgaagtccatcgcatccttcaacggcgacctctcctctctcaccgcaccgccgttcatcctctcaacaacctctttaaccgagtattctgcgtactggtgcgaacatcctgcactcttcgttgcccccgcacgtgagcccgatcctgcgaagagagcgctcttggtgctgaaatggttcctgagcacattgcaccaacagtactgctctcgaagcgaaaagctaggaagcgagaaaaagccgctcaacccgttcctgggcgagcttttcctgggcaagtggatagaggatgaggatgtgggcgagacaaggttgatcagcgagcaagtcagccatcatcctcctgcgacagcgtattcaatagtcaatgagaaacatggagttgagctccaaggatacaacgcccaaaaagcctccttctccagcaccatccaagtgaaacaactaggccacgcctatctctccttaacgccgcccggaaaagatgcaaacaacgaagacgaccgtgagcactacctcatcaccctccccaacctccacatcgaatccctgatctatgggacaccattcgttgaattggaaaagagttgcaagatcgccagctcaaccgggtacatctctaagatagacttttcgggcaaaggctggctgagcggaaagaaaaataccttctccgcagttttatacaaggaaagcgacggcgaaaaaaatcctttatacacagccgacggtcaatggtcgagcagcttcactatccgcgatgcacgcgctaagaaggatattgagaccttcactatcagcaatctgaaaacaacccccttaacagtcgcccctcttgatgaacaagatgaatgggaaactcgccgtgcatggcgcgacgtagcagccgccatcgaacgcggcgacatggaagccacatcaaacgccaaaaccaagatcgaagtcgcgcaacgagaactccgcaaaaaggagaaagagcaaggcgaggagtgggaacgacgattcttcaagcgagtcaacgaaaaggatgaacctacctttatgagattggcggcgatgctggatttgacgcaaggcatcgaaagtgaccgcaccgggggagtttggaggtttgatccttcacgtgctgtggatgcgaatccgccgtatcacaaggttggcggcgaagggttgggattgtaatttatttatgaggcatcttttatatttcataaaaacagggtctaggccgtttattcattagatgtgtattaagtagcgctttttctcgaccgttgagattcatggatgcaagtgtacctaatagctcaatgcgagactctttccaagc

SEQ ID NO: 12436 - DNA, 637 bp, Zea mays
  Clone ID: 701176801_FLI
cttccctgcccgattggcgatttaagtggtgggggagggaaggccgatggtcagtgaaagagaggtaggtggccggacggtggtggcatcgccaattcaactccgcatctgaatcggcactcggcagcgcgccagctccatagtgtaggaggagatggcgctcacaagaatcggtcttgctggccttgcggtcatggggcagaaccttgccctcaacattgcagagaaagggttccccatctctgtgtacaacaggacaacctccaaggtggacgagaccgtgcagcgtgccaaggcagaaggaaaccttcccgtctacggcttccatgaccccgcgtcctttgtgaagtccattcagaagccacgggtggtgatcatgctcgtcaaggccggcgcgccagttgaccagaccatcgcgacgctcgcagctcacttggagcagggcgactgcatcatcgatggggggaacgagtggtacgagaacacggagaggagggagaaggccatggaggagcgcggcctcctgtatcttggcatgggtgtctctgttttctcctccctgttaatcaatgcaccatgctccaaaggtgatgtacataattcagacaagtctcgatgatgtacatgttacagaact

SEQ ID NO: 12437 - DNA, 1507 bp, Zea mays
  Clone ID: 701176819_FLI
tgattatattgttgcctcaagctgggtccgcccgtcttcttcttcctcctcagctaatttccattattccgttccaatttccaaccgcacccaggagcaagtctgggttcgcgccacagttggagtttcgacgggtctcggtcgggggtggtgccttcgtcgcggccgttcgacctacaccatggaatcgccgcagcagcaagccccaccgccgagccagggagctagctctggaagctgcgacgctcctctgcagctagcagctcgatatggtgccaccgtaccacgtacatcctcgccacctgcctcagtcactcggccggaagtcaacaatagaatggagctaaagagcagcaacagtgagacactatgtgacagcttgacgctaaatacggtatccgtgatgctaaccgtcagcttcttcagagaagacggggacggtggtactgacgtgtttcttggcttctcatgcgtgctcggtttcatcattcgcaagtatctgtgggtgctgcgctccgagagcgcccggttcacgggtctggatatctacacgaacacggtcgttctagtggtcaccgcatatgcaatgctgctcgcgaacagtttgcagtacatcatccttgctcccttcccgatcagtgtggctgccttcatcgcttacctgtacaaggaaagactggagcaccatggcagtagtggagctgatcagcaggataataaggacggatgcaaacctggggacggcaatggcaagaaagccggggagctcgaaatggtggtagcgccgtactctatgctgctgatcagtgcaatagtgatgccgtacgaagatagccctgtcctcctgtctcacttcctgctcttctcatgttgcgcgctcgggacgctggcgctgctctactccagactggcggaagcaagtccggccttgagaccagcgttggagtgcatccagatggcctacatggtgacgctgttcataacggtgcacacggtggccgcagaatggctgggagacgtcatggcgctggtcaccatgccggagttgatcgcagggcttgtctggttctgtaatcttctccacggcgacactgcttgtaatactgcagcagtagcccacattctcagatcagatgaaggttccagcagtagttcggatgcaactcatcatcaagtcccaacaaattcggaaacaagacaagggttcgtcttcgatgggtccatgttcactcccctcggagctgttttggcagggttagtaacatccactttcgcacatgacgaagaactcctggccagctggaacaccaaggcgaccgtcgcctgcagcattgcagggtgtttgccatatctcagcatatggatggtgtcgaggtggcccgggcgcatacctagctcagacaaggcgactcggctgctcaagtttgctgcaaatgtgtgcttgactggagcttttctgatgctgtttgccttgcttgatgaaaaggcactggcctatcgtctcttt

SEQ ID NO: 12438 - DNA, 1023 bp, Zea mays
  Clone ID: 701176828_FLI
ctcttctcttctcttccctggacttgtctctctctttattcctccctcacttccggccttccccttttcctccggtcgacgcgagggagcgggaggttggcctctaggcagggtggcgggcgaagatgttggacatacagaagcggcgcgtgcggctgctgctcttcatcacggccgtcctcgcgctcagcatcaccgctgagaagttcagggaacttgttggaaaggaggctgcatcaaagagtggtcaattcacattcatgaactgctttgacatgggctctggcagccttgcgtgcactgcaaaggagggtgtcaagttgtacgtcaacaacatccgaagtgcacacttggaaatggtgcggcaacgagccatggagaaagctttagctgatgctgtgacggaaggcctaacacctagtgaagcagccaaacaagctcagaagattagtgcaaaagcgactaaacttgctgctcgtcaagccaaaaggatattgggaccaataatttcttgtggttgggacttcttcgaagcaatgtactttggtggaagcatgacggaaggttttctccggggcactggcaccttgtttggaacttatatgggtggtttccatggtgaggagcgctttgggaagctgggatatcttgcaggaagccatctaggaagctggggtggaggaagaattggattgatgatttatgatatcataagcggcctgaaatttatgttccagtctatccaacctgagtatgaatcatcttcatatgctgaagatggtccagaatacgcagaaagttacacaaaccaagaggactcaacatactatgaaacatcagaggaaaagcaggaagaatcaaaatggtttggtttgttctgaaactgcgaaccgaattgttctgtcttgtacttaggggcgaagctaggtagtagctggagtgttgcaccccctgaaaatgtgaaaacagtgctttccactgaaatttcaccatatatgtatccacaaggcaagtgtactcact

SEQ ID NO: 12439 - DNA, 1051 bp, Zea mays
  Clone ID: 701176853_FLI
gtacattgctccctaggatgaactacttattggagatgggtttgtctaagaaagatctgtgctcaatgatctttagattttccccacttctaggttacagtattgaacttgttatgaaaccaaagcttgagtttctgctaagaaccatgaagaagccacttaaagcagttgtagaatacccaaggtacttcagttattcactcgaggggaagatcaaaccgcggttctgggtattgcagagtagaaacatagactgcactctgacagagatgttagcaaagaacgatgaactctttgctgaagagtacttgggacttggaggattgctcgagaaacctctacaatcaagcataggcagttaatttctggacttataagattgaaccatgcagtgcactatgccgaagctgtacagctttatgcttggattggtgaggctgtttttcagatgggaggtcacttttttttgaaaacggaggagatgtgtcgctggctgttcttgctatggtacccgcaaaaataattaaaacaaggactgtggctgacgcactctcaaacaacagttgggtttcagatattaaaggaggactgtccatgattggtctgttcgaaattttcagctatgggacaccacacatggagtttctttaaccactgacaatgatcgccatatctggagattctctggttggggtgaattctcgtcgaaatcggcctacagagtcttcttccatggtttggtctcctttgatccttggaagcgtatttggaaaacttggactccacctaattgcaagattttcttttggatacctgtccgaaatcgctgttggactgcggaccgattggctcggagaggactggcacacctagtccattgaattctttgcgaccaggaagaggagaatattaatcacaatttgttttcctatgttttcttgagggaattctggtttagagttttctcctggctggtgtatgttgaccgtgtgccggggtcccaggagcaatcgcttgcagattggtggtgaaaggcttgcaaacatctccc

SEQ ID NO: 12440 - DNA, 727 bp, Zea mays
  Clone ID: 701176975_FLI
cgactactagacccttgaggccttgaccagccacttccaaactttagcatcactatatctcaacgccatcaagctgtctgtcatcagtcatcacggcacagcagcttctactggccttagctcgatcgttccaatggagcttccaccatgggcgtccttcctcggcatcgtgctagccaccgtgatgcttctgaaagccctcaccggccgccgcagccgccgcatgtacaacctcccgcctggccccaagccgtggccgatcatcggcaacctcgacctcgtgggcgcgctcccgcaccgctccatccacgagttgtccaggaagtacggcccgctgatgcagctccggttcgggtcgttccccgtggtggtcggctcgtcggtggacatggccaagttcttcctcaagacccacgacgtggtgttcacggaccggccaaagacggccgccggcaagtacaccacctacaactaccgcgacatcacatggtccccctacggcgcgtactggcggcaggcgcgcaagatgtgcctcaccgagctcttcagcgccaagcggctcgagtcgtacgagtacatccgcgccgacgaggtgcgcgcgctgctgcgcgacctgcacgcggcgtccagctccggccgcgcagtcatgctcaaggactacctgtccacggtgagcctgaacgtgatcacgcgcatggtgctcggcaagaagtacctggataaggag

SEQ ID NO: 12441 - DNA, 1109 bp, Zea mays
  Clone ID: 701176976_FLI
gcagtgcacgctcatggaaggcgctatctcccttcctcgcaacacaagaattgccgtggttaccggcgcgaacagaggtatcgggctagaggtgtgccggcagctggctggcaatggcgtcaccgtcgtcttgacagcagtggacgaggagctaggcgcgaaagccgtcggcaatctccaagggctagctctctccgatgttctttctcaccagctggatatcacggatgcttccagcatcgctcggttggccaacttcttgaaggcccgattcgggaagttggatatcctggtcaataatgctgcggttgctggggtcgtgtactctcaagatcatttggatgatctagaaccgagagaggaaaagttcaatctcatggatagggatcagaggcttgaatggctgtggaggaactgccgggagacctaccatgctgcaaaggaatgcctgcagacaaactactacggcacaaagcatgtgatcgaagccttgctgcctctgctgaaagcctccgatgatggaagaatcgtcaatatatcctccgactttgggttgttaaggcatttcagaaacgaggatctgaagcaagtgctgaacgacgtcggcaacctcaccgaggagcggctggacgaactgctggaccagttcctgagagacttcaaggtcggcacggcagaagcgcgcgggtggccagtggcgttcgcggcgtacaaggagagcaaggcggccgtgaacgcgtactcgaggatgctggcggcgaagcagcccgcgctgcgcgttaactgcgcgcatcccggctacgtcaagactgacataaccttacactcggggctcctggcgccggaggagggcgcgagtaatgtggtgaaggtggcgctgctgccggacggcggggtgaccggcgccttctttgaggagggcaatgagctggcctccttcgtgtgatgtcaggatcggcctggttcgctagctgcggctgtttgccatcgcgtgagctcacggagtgtttggacccctcggtctgatgtttaagtgtgtggtagcaggatgcaagacgattctggtaataaactgattatgtttgtgaacggtgataacctgatgatgt

SEQ ID NO: 12442 - DNA, 123 bp, Zea mays
  Clone ID: 701176980_FLI
cgagtagtcaatgttattagtccggaccctttggctactggtccttctggtccaaagcaaaacgtaccgttactgctcactgcctggtcatttaacgtgcttcttccatggttgtaccgtctc

SEQ ID NO: 12443 - DNA, 636 bp, Zea mays
  Clone ID: 701177051_FLI
cgaacccgacgacaacggtcaattgatactcaatcacgccctctttgacttctaaattacccatcgtggctccgagttgacctatccctccatcctcacaactgcaaacatggccgatatccaggagcgtctgaagaagcttggcgctgtgtcgcgcatcggtggcaagggtacccctcggagaaaggtcaagcgcgcccctccccggtcggccgccgacgacaagaagctccaggcttccctgaagaagctcaacgtccagcccatcacccagatcgaggaggtcaacatgttcaagagcgacggcaacgtcatccactttgctgcgcccaaggttcacgcctctgtcccctccaacacctttgccatctacggcaacggcgaggacaaggagctcactgagctcgtccccggcatcctgaaccagctgggccccgactccctggcctccctgcgcaagctggccgagagctaccagagcctccagaaggccgacgaggaggccaagaaggacggtgccgccccggaggctgaggatgacgatgccattcctgacctggtcgaccgcacgttcgaggataaggtcgagtaagcccagtatctagaaaggggaaaatatcacacactacaaactct

SEQ ID NO: 12444 - DNA, 1184 bp, Zea mays
  Clone ID: 701177121_FLI
cgccgcggttcgtcctctcgctcctgctccgcagccacctagcgagttcctctgtgcgcgtatttggtaagagaggacgaatgaatgactcttctttgaggtcaacaatcagcttttcttgagagtttctgagaagtgtcccagctcacagctaatcatatccttgggcacaagaatatgtcgtccaagagactacatggcgtgtttacccttcttatgctcatggttttcaatgtttcaggggcatttgttggtatcactattggcaatgacatgtcaaacataccaccagcaacagatatagtgtctatcctcaaagcaaaaaagattcagcatgttcgcctgcttgattcagaccatcaaatgttgaatgcccttgcaaatactggaatagaagtgatggttggggttccaaatgatcagctacttcgtgtgggccaatctcgttccacagctgctgattggattaataagaatgtcggtgcttacattccggcgactaacatcacatatattgctgtgggtaatgaggtccttactaccattcccaatgcagcacttgtactcgtacctgcactgcaattcctccagtcagcactgttggctgcgaacctcaatactcaagtgaaaatttcaagtcctcattcaatggatgtgatctcgaaggcctttccaccctctgctgcgactttcaatttgacatggagctcaataatgtctcaatatcttcagtttctcaagaatacgggatcttcgtttatgctgaatgcccaaccatactatggctatgtcggagggcaaggcgtatttcccttggagtatgcactattccgctcacttaatccgaacagtcaaatctcagatcctaacaccaatctcttttataccaatatgtttgatgctataattgatgctacctacaactcaattcaagcaatgaattttacgggcattcctgttttagtcacagcttctggttggccatggcgtggtgggccaagtgagaaggctgctactgttgataatgctttggcctataatacaaacctcatacatcatgtactgaacaattctggtactcccagccaaccgaataatcagccaagcacctacatctttgaacttttcaatgaggataatcggtcagggcctgtatcagagcaaaattgggggattatgtttcc

SEQ ID NO: 12445 - DNA, 646 bp, Zea mays
  Clone ID: 701177151_FLI
ccaacaccggtgagcgaagagaaacgattccatagtcgaagcgtagatcgcagcggagcagaggcatggatggaaagagctttagcaacgaacagcaagcccaacaaaagaacccagacgcagtgacaaacagtgttccgagccaaggccaggagcccttgaacacgtttccagattcagacgatggaaacacgaacaccggtccgttgaatggccatgcagcagctcatgtgaacatggaagctgccatctctacggaggacgtcatacgggctggcgggttcggagcgaaggatgacattggcagcctcctcccgacggcaattgattccaccgattttgaggcctcgctgcgggatgcccgtggtttcgagggcgagaaagcggcgccgtcgcatcctggactagggtggaagggggagaaagctgatggtggaaccaaactggcagatgtggcggagcagtgatcacgctttcctcttctgtagcccagctccagccttcagaaaaccttgttttctgccacgtgtgtctggagagctgccctgcgtatgaactttctttgtcacagtgttttgtgtgacacataacattctgtgtatgaacatgaggatgtcggttctatgctgtctgtcgtatagctctc

SEQ ID NO: 12446 - DNA, 937 bp, Zea mays
  Clone ID: 701177172_FLI
gctagttgtttcttgaaccttgaactgctgacctggccaaaggagagaatatatggaaaccaaggagcgaagactcttcaagcctcattacctcatatctatttaactatagtgaaaaaaaatccgaacaaagaatccatggtggtggaatttcggatcaatataagtggcggagttgggattggttcttggtgcaaaagcaagagcaaaagatcatctctatccgtatcctagctttggtggtccgcagaacaggtggttaagaatagggagaaacaagggttaggtggcagaggaggcagtgaaatccggccaaatctcgacgcaatttttcttgccgattgctggtgcgtagtaagatcgtagctgaatccgtaggacgggcgctaatcggaggaacttgcatcgattcttgcgtgctgacggtaccggcaaggcggcaagataagagttggtgcctgccgattgcagggacagggacggtgtttgtggaattgcctccttggaggaggctggtgagagggagaaaggatgacgatgccatggggtctcgcggcctgcatcgtggacatggtgtgggcggtgctcgccggctgggtgtccacctgcctggtcatcgccaacgaggtcgcccgcggcatgcgcagtggcgagatcggtccgttcgttgtcggctgagttattcgatcggctttaggtggctcagttgttcctgcattctcgatagtgtatttttcgtaccggtacatttcatacacatcgctatgctgtacagacggcgttgaggactggaggatgacttttgtttctaggattttgagttgtagtgagtgtttgtgcaatcacacaagaacaaacatgtgaatatgtgatgtactttcagtggtatataaacgggatggtcctataaaataattctaaattgaattcaatatct

SEQ ID NO: 12447 - DNA, 673 bp, Zea mays
  Clone ID: 701177211_FLI
caaacatcgctcaacgctttttgatattttcgtttactttgaaattgcataaacactttgaaaatgtctgctaaagctatttgtgtattaaaaggagacgctactggagttctgaattttgttcagcagggcgacgctgtgcatataactggcgaagtgtcaaatctttcgcctggtcaacacggttttcatgttcatgaattcggagatactagcaatggatgcatttcgactggtgcccattttaatcctgctggaaaaacccatggagctcctactgctgaagaacgtcatgctggtgatttaggcaatgttattgctggtgccgatggaattgccaaagtagatattactgataaacaaatcgcccttactggacccaattctgttgttggacgtgctttagttgttcatgctgaccccgatgatttgggtttgggaggacatgagttgagcaaaaccactggaaatgcaggagcacgtgttggttgtggtgtgattggtttgaccgcaaactaaattatctattcatgaatagatattaaaatgtattttttgtttctcactaaaagtataagattcattttttgaaaatgaccaaatttataaaatgaatattcctttaaaatgtatttgcaaataataatatttaactgcactttattaaaaaaat

SEQ ID NO: 12448 - DNA, 369 bp, Zea mays
  Clone ID: 701177361_FLI
gggaagcagagtcgagtggaggtctcacgttgtttcccgagtgagttgcacgcgtacgcccttgcgtttctagtggtggggttggacagcttggagtgaaattacttctagcatctgcatgtgccgtcttctaacatctatgatgacagttctctggcatggcatcataggctcacagttcatccccagaagttagtgctgcgacttcgttgctcttgccttgtgtatatacagtatattgttacctccaccggagtttttcctttcctgctgtatcgcattcagtgctgagtgcattattagatttggaacccgttttctgttatgaattagtgataatggaagtcaggaagtgtcgcgttatgaatt

SEQ ID NO: 12449 - DNA, 1250 bp, Zea mays
  Clone ID: 701177430_FLI
cttcgacgagatcctcaaggacacggagcaccacgcctgcacgcacacccacacctgcaacccgccggtgcacgacctatcgcacacccacacctgcgtccacgtccacaccaagatcgtcgcggcctcgcccggcgacgacactgccgactcgccgtccgagaacaacaccaacggcagcggcggcaacggcagcaacgccgcctccaagaagcgcccctcggggaaccgcgccgccgtcaggaagtaccgggagaagaagaaggcccacaccgcgtcgctggaggaggaggtggtccatctcagggcgctcaaccagcagctcgtgaagaagctccagagccacgccgcgctcgaggcggaggtggccaggctccgatgcctgctcgtcgacatcaggggcaggatcgagggggagattggcgcgtttccgtaccagaggccgccgccagcggccaagaacgtcgacctcgtgtccggtgttgaccagggagggttccttgccggggctgctgcccaggttaccagttcctgtgatttcagatgcaacgatcagatgtactgcagccctggaatgcagggcgctgttagcggccaggtgttgggacaaggtgcctgcgatgtctcgagtatccaatgcgttggaagcaccaggtctgcgtccactaagctacctgtctgcggggggatggatgcagtacctgctgcctgcttgccaaatgttcaaaacaagtgacgttactggactgctgtgagtcgttggtagaatttgttaatgaatgttcgtactgctcagatcttgcaatggaacttattcaagaaaaaaaaacaggatatgatgtcttattcttcaaatagtcctaaggactcccggcagtgtttatggtcccttccttttcagagactgctgggacttcccgttctgcctcgaaggaacgctgtataaaccgctagcttttctatgtagggccgaatctggttcaaactgctacgtgtgtgagttcgtcgtcgccgatgatgcttctatagtgcctgaggcgattcaagtttgttagctctagagctgataggatatcctcgtttactttgcttagttctcagatgctctccgtctccgatgaagtgcagcaactgaaccggatccgaaggagttggacatgaacaggttaaaatttggcatatgtggtctaagaagacgctgagatgtttgtagcgaatctcaagttcaatgcgaaccctgttgcctatgt

SEQ ID NO: 12450 - DNA, 835 bp, Zea mays
  Clone ID: 701177470_FLI
gcaagtaacaatgaagcagctgagactgagagatactagtgcttcccttgctttgactaaatcaactcgcagcctgtgagttccatggagcgaggaggagcacaggcagttccttgccggcctggacaagctgggcaagggcgactggcgaggcatcgccaggagctacgtgccgacgaggaccccgacgcaggtcgccagccacgcgcagaagttcttcctccggcagagcagcatggggaagaagaagcgccggtccagcctcttcgacatggtgccgatttgcgagaacagtgcgagcatctccgatccgctggacgtggcacgccatggcgtcgcctcggcagactccgagagggcggccgtggacctgatgaattcgacgacggagggtgacgacggcaggagcagggacgtcgtgtcgtcggcgtcaggtgcagggaccgcactgcggttcccggcagcgccagctcagacggagccactgcatccttcgtcgtcgcatggccatgggcgcggccaccactgctctccgttggacctggagctgggcatgtccttgcccgccccatccgtcggaacgtgatggagatgaggcgaggccgaggccgtacgtgactgctgtctccctcagctgtgtgtgtcagccagatggagatgatgcgctagccaatacagtactgttcgtctgttcgtgatcgtgaaaacggtgtgcaaacactagcacagcggcactaaactaggatgtcgctcctcgcaccattgggtactgtaaccgcgttgatccacgtcatctctatctcttcagcacgatcataggctgtcagtttcatct

SEQ ID NO: 12451 - DNA, 616 bp, Zea mays
  Clone ID: 701177490_FLI
aatgcagtgaggcccacgtccctctcgtctcgtacagacgacgacggaaagaggatgatgcggggagtcggaggtccgctgctcaccatcggggatctactcagcgacctcgctgtcgacgacccactcgtcggcgtcggagatgcgtctgtcccatcatctccatcggcggcgcagcaagcggggaaggccaatccgtccgatctcagccggctctttgaggaacactatgacgatttgatgaaggctctacaagagaaggatccttcatggccctcactgatgctgaagctgtgcgcgacgctgaagactgcggataggctgatgagttgcgcggacacgaacgcggaacagctgctggagaaggtgaaggcactggagggcgtcctcgacaggagcggtcatgcggtggcagagattgttgaagctctccagaggttaggcctagccaatgatggtcacggttcccagtcaaaatcggctagcaagtagacgttctggtctgctttttgtttgtcttctaccccatgcaaatctctgggtattgtgagtgagttgtatgtcgacctgtgcctccacggctttgcggtctgccttgtttttttttttacccctc

SEQ ID NO: 12452 - DNA, 434 bp, Zea mays
  Clone ID: 701177501_FLI
ggcactgccacccatgccggccgtgcccgcggtcaccgtgccccagatgacgctgccgcccatgccagcggctcccaaggtgtccgtgccgttgccgccaatgcccgccgtcccgtccgtgctgcccaagctgaccctgccaccgatgcccgttgtcgttccatctgtcgtccccaaggtggtcttgccgccgatgccgtcagtccctaccgtgcccatgccgttcgcggcaccgactccatcggcgtagacgcgcgtgctcctgcaggtttgcgttcgccgtagccaccatgcacaggtggtgcggtgaccagtgtacgcgagtgatgtcattgtttgtgagtactctctgtacgtgcgtcgcatgctttcttttttttcgtaacgttgtacgtatgtatatcctttgtatttctaccacattcatttgctgt

SEQ ID NO: 12453 - DNA, 403 bp, Zea mays
  Clone ID: 701177587_FLI
atgacatacaatggatattatgaatcagtgattgaaccgcaatggatattatgaacttgctgcacttgtctaagcaaattgaagtgctgaagcagtcacttgtctcaaaggcgttctccaagagaaaagcagttgtctgcgaggaggaccaattacaggcgttagagtgcagcattggagatcttgagagcggagcgggacacctgttcaggatattagtccagagcagggtctctctcctaaacattcttagctcatagatactccttgttgcttttgacatcctgtgattggcatccgcgtttttgaggattagctaatcttgatgctgctttgcaatatgtatatagagtacaaatgtacagaaaaaaatcggaaatgaaaaaaatgacagttttgatcc

SEQ ID NO: 12454 - DNA, 593 bp, Zea mays
  Clone ID: 701177610_FLI
atccgatcctttttcacttccgcaacaagactcagtcccgaagcaaaaatggccaacgtcaaggaagtccagcgcatcatcaacggcaacaacgtcgtggtcttctccaagacgtggtgcccctactgcaaggccgccaaggccgccctcaacgagagcaaggccaactacgaagtcgtcgagctggacaaccgaaacgacggtgacgacctccaggacgccctcctcgagatctccggccagcgatccgtccccaacatcttcttcgcccagcagcacgtcggcggaaactcggacctgcaggagctcgtcaagaacggcaccctcaagagccgtctcgaggaggccggcgcatttgcgtaagcaagcagaaatgaaagaaaaatactcagagaaataaaatgttgtgagctgacggcatttgctgtttggcgctgcatagagaagagggtagatccaagttataatagatgaacaagatgcggctagagttcagtggagtttttcagcgatgctccagactcgaatagagtatagagttgtcatcttctaaagtttttgcctttagctacaatacaagatatttatccatc

SEQ ID NO: 12455 - DNA, 950 bp, Zea mays
  Clone ID: 701177615_FLI
cgtgaatgcgcgcgtgtggacaggtgacgaaccacggcatcccggcggcggtcgtggagggcatgctgcgcgtggcgcgggagttcttccacctgccggagtcggagcggctcaagtgctactccgacgaccccaacaaggcgatccggctgtccaccagcttcaacgtgcgcacggagaaggtcagcaactggcgcgacttcctgcgcctgcattgctaccccctccagagcttcgtcgaccagtggccgtcaaacccgccgtccttcaggtgaccgttccatcctccctcaatccgtctctgaatttgatttcttctctctctctctctctctccggtgaagctgactttacggctctctgatttttctcttcttcggtcctccgatcgtaccaaatcaactcgaacggttaatttgtcaaactcagacttttttcctttctttttttttccttttcgaaaggaaggacttgtcaaaccgaaacttgaaacgagttacatgttcgacgttgaccattcctgagaaagcatgaaaaaaaagaaaaacgatcgaacgactgtcacacagaaagtcgaccatgctgttaactgttattccgtcgccgagaaatacagctcagctcgagtgctcgacgcatgcatgcagcaccgcaaattgacaagtcgtacgcgtggtggctgctttgctttgacaggcaagtggtgggcacctacgcgacggaggccagggcgctggcgctgaggctgctggaggccatatcggagagcctgggcctggagcggagccacatggtggcggccatggggaggcacgcgcagcacatggcggtgaactactacccgccgtgcccgcagccggagctcacctacgggctgccgggccacaaggaccccaatgccatcacgctgctgctgcaggacggcgtctccggcctccaggtgcagcgcg

SEQ ID NO: 12456 - DNA, 733 bp, Zea mays
  Clone ID: 701177719_FLI
ggccaggaggtgctgcggtctgtcgacgcctgtaaacagctagctagaccgcgcgctatggccttgagagcggtcgtgtgtgcacagacgggcatgattttgtgaggggtgttataccagcgagcataataaagagggtcactgactggaaggagattaggagaaggactgcattgcagctctggtgaagtgcgagcaagatcttggagaggttgtggcatgtgggactgagggctgtaaacaaggtcattccaactttcttgaggaggtaaaacatctcaagtttaagtaaattttatataataaaatactgacgctttgtatatcaaataagtattgttacattatttattattatatttttatagtataactatttgatgtcataaatctatatagttatctctataatttttaactaaacgtaagatgcttgaacttttaaaaaaatggaatgatgaacgaatgatgcaaactttctcactcgtcccgttgttcatggaattacactacaggcctccctccctggcagtgagaaatgttaaaggacggtagcaaggagaaatgttaaggcggagatgggtaagaagggaaattggttcactgcgctcaagaaggccttcacctcaagccccaaggagaagccaacaaatgtgcatcagctggtagcgcagtacccgtctactcacgcgcacggctgggagaagaagcgatggggaggcttcgggcggtc

SEQ ID NO: 12457 - DNA, 292 bp, Zea mays
  Clone ID: 701177724_FLI
ctcgcagacatcttatcccctcccgatcgaggcccccgtttcctcctcctccggccaccgcacctagctgtcttaacttgccgttcgcagcctcacgcccatggctaggaagtgctctagctgtgggaacaacggccacaactcgaggacctgcagcgggcacggcgccgggggcgggggcgtgaggctgttcggggtgcagctacacgtggggtcctcgcccgtggccatgaagaagtgcttcagcatggagtgcctgtcgtcgtcggcgtccgccgcgccggcgtactac

SEQ ID NO: 12458 - DNA, 324 bp, Zea mays
  Clone ID: 701177807_FLI
gggcgatcatgaaggcccatgacctggatcagtggtccacattgcacttggtggacacgctggtctaccatctccccaagtgggagagtggacgtcataatttgtgctagagggggtacgcgttcgcgcggcccctaccagttttaaacatttacttttgggaccttggcgggtttattatgttatgtgggacttactcatctagtgcaaaaaaataaaattaaggtctcgttaaataaaatctagtctgggcgactattaaaccataaatttaaatattgattgttcagttgtaagattaattaatataaaaatagaaaaaac

SEQ ID NO: 12459 - DNA, 393 bp, Zea mays
  Clone ID: 701177958_FLI
ctggacctttccctctgactgctttttttttctctcccgatgaaacagcataaggaatcccagctggatttttaaggctgggacaaggatggcctctgtttcaaccgccatccttgttgatattccgacatgatatttaggtatttcaagcatgtgtcccttgttgcatggtttgcagttgcacagcggcatggagtagtgttctgtctttaagggatctccctaaaggcttggaagaggagacgggttttatgctctcctctgatctttagttgaatgtttaagttttctgcaagtactgcattgtgtactagtactactgcacaaatatgagcgtcagtgtgtgcgtgtgtgttgtgtgctttgggtctggaatatatgtatgtcattggc

SEQ ID NO: 12460 - DNA, 1344 bp, Zea mays
  Clone ID: 701177961_FLI
ctcacactcatatacccaattttcaacactgtaatattcgttttcaagatttgctcatataaatacaaggcaccatgccgacagagctagaagaactcgttggcttcatcgcccatccaaacccccagatcagggccgtcgcgacagaaaatctggtcccttactctctctctgatccggccatcttcaagactgaagagctgaaaccggtgaaacatctgaaatttcttgttcgagatcatgagaaaatcgccgaaaatgcgttgaatattctcatcaacttgaccgaggacccagtggtcttggagtctgtagcaacagatgagaagttcttggagatggtattctcacatatagtctaccctgaggagccaaatgccgatctactggccatgctcctcgccaacctctccaaatacgacggctcaaaagcgttcctccagcgaaagcaagaagccccctcacagctcggctcagacgacaacgtcctcaaccaactcatggacctcttcgtcaagggccaagacggcgcatataacaaaaaggcagactacgactacctcgcctacgtcttcgccgacctcgccaagcacacggaaatccgccagtacttcctcacatcccagccttacgacggtgtcatccccctgaccaagctcaaggtcttcacagagcacaagtccgacattcgaagaaagggcgtcgcaaacaccatcaagaacgccgcctttgagatccccgcccacccgtctttcctgtccgagtcagacatcaacatcctgccgtacatcctcctgcccatcaccggcaacgaggagtacgacgtggatgagacgatggagatgttgcccgatctgcagctccttccgccagacaagaagcgcgattcggatacggccaacattcaggctcatgtggagacgttgacgctgttgacggccacgctggaaggccgtgagttgatgagaaagatcaacgtatatcctattattcgggagacacacatgagagtgaatgacgagggtgtacaagaagcatgtgatagactggtacaagttctcatgagagatgaagcgacggaagacgcaccggaagaggtagaggagcgcgttaaggagattgaagaggacgaggatgaagagttggttgaagtttgaaaggaaagcaaaggcaaaataaaaaggtggaactgaaaatcagtaaaaaaaaaagagaagtcgcacagggggactagcaatttaatattggtcgtcgtcttttgaccttgattctagatgtgcatgggcctcatagctttagactaggatacaaaaagagtttggatggtgcatagttgcactatat

SEQ ID NO: 12461 - DNA, 408 bp, Zea mays
  Clone ID: 701178015_FLI
gcgaacaaaaaccttgctcattcttctctcgtctcgtttcatagcgggagcaaacaaagggaacaacaggggtaccaacacctaatccaaaggtagaacggacactaacacggtgacagaagcgaacggtaacacgatactatagatagataagataactccattagtacatcaaattcaaaacgacgaagctatgtgtggaacccccgattcgcgagcgcgcacgcgtgatctgtggaacagatcttaaacttctccccttcaacaccaccctacgcagcagaccccaggctgtgaaaagcgattctctatcttagaactcggcgagttcctcggtcccgtcacctctcggcgagatgagcggcggcggcggcggcggcggcggctatgagggaattctttgttaac

SEQ ID NO: 12462 - DNA, 1132 bp, Zea mays
  Clone ID: 701178181_FLI
cgacagcaagatggagtatacacgactgggcaagtcaggtctgaagatctcaaaagtagttctggggggaatgtcctatggctcctccgagtggcggaaatgggttctcgacgaagaagactccctcccgctcatcaagcacgccttcgactctggcataaacacgtgggatgtagctgacacctattccgacggcgcctctgagagaatcgtaggcaaggctctcaaacaatacaacatcccccgcaaccgcgtcgtgatcctgacaaaatgcttcttcgccgtcgcggaaccaggagacgacaaggacatcaaagggaaggacaccgcgcaatgggttaacagagttgggttgagccggaaacacatcttcgatgctgttgatgctagcgtggagaggttgggaacgtacattgatgtcctccagatccaccgcctggacaaggacacgccgcgggaagagatcatgaaggcgctgaacgacgtagtcgagagcgggaaggtgcgctacatcggcgccagctccatggcagcatgggaatttcagaccctccagaacatcgccgacaagcacggctggcacaaattcatcagcatgcagaactactacaacctcatctaccgtgaggaagagcgcgagatgatcccctactgcaacgacaccggcgtcggcctaatcccctggtcccccatcgcgcgcggcgcgctcgccaggccgttcgatgcgcggtccacggtgcgcgagacgtcggatccgttcctgactagtttgatccgctcgaaggagacggagactgacaagacgattattgggcgcgtccaggaggtggcggagaagaagggcgttagtatggcgaaggtggctattgcgtgggcgctgcagaaggggactagtccgattgtggggctcagcagcaaggagaggattgatgatgcggttgaggcggtgaagtggcagagtggtggtgggttgacggaggaggactgcaagtatcttgaggaggggtatgctcctaaggctgtggcggttgtaatgtgagtaagtgagatatatcacgtcttgggaacataccacgcttcaccaaaagttcagtatcgtttagcgctatattatcagcaaagttagtggaac

SEQ ID NO: 12463 - DNA, 774 bp, Zea mays
  Clone ID: 701178370_FLI
aagagcttcccaagcggccattcttcgtggtccttcgctggcctaggcttcctgtcgtggtacctggcgggcaaggtcaaggcgttcgaccggcgcggccacgtggccaagctctgcgtcgtgctcctgccgctgctgctcgcggccatggtggcggtgtcgcgggtggacgactactggcaccactggcaggacgtctttgccggtgggattcttgttccctgctgcagggttggtggttgcgtctttctgctaccttcagtttttcccaccgccatctggtgaacaaggattctggccccatgcgtactccgagcacattctcaaccctgagcgcgagggccaagcgcagtcaacagcgagctcgaaccagcaccgacgcctgtccagcagaggccacgtggcagtggagatgagcaccgcgatcgcgaccgcgaccgcgagccaggacgcatcgtcgttaggtcccatggaggagatggagatggaggaaggacgcggagcccggtgacggaccagcacgctgcatgcatgccgcccgttacgaacagcgcgcgctagctgcagcttcagtcttcaaagtcgcttcgtttccttccttccttccttttcttttttttttttcttcttcttcttgctcgcttggttgatagatgtgatggtctatctagtagcagtggcggacccagcccaaatattgagtgggggcccaaatgtgagtgggggcctaaataaagtgctgttaataaataaacctttgtaactacagtaaat

SEQ ID NO: 12464 - DNA, 956 bp, Zea mays
  Clone ID: 701178419_FLI
ggactttcaattaactaacaactaacataagatcctctgtcatcgttgccatcagttgtcgtttatcaccttctttttatattcccatctgaggacatataatcagcttgataaaatggtcgcagacgctctggtctaccacccctcggtggctcactacctacgctttgtcgcaacaaccctcggtagagacaaagccctccgcacaattcaatactttgcccgcttctactcctggtatctcttccgcaccaataacccaacctccgccattgcgccctgggacgccgtcaaaaagcaattcggcctcactcgcaaaatcctgcggtttggcaaattcgtcgaacacatcaaagccgccgccgtcgcctttgacaataaggctcccgcagatgcagtgttgaggaatctgactgttggtcggcagctgggttatgcgggttatttgagtctcgatgcaattacgttgtttgatgcgctgggattcaagaagtttgattcagcgaagaagctgcaggagtatgcgtatcgggcttggttgtccgggttggtgtgtagcgctgttgcgggtgtttacaccttgtaccgattgcaggagagggagaaggccgttaataggaaagagggtgagggcgttgttgaagccaagaaaatcgagcgggaacgcgtcgccgctcgcatccaactcgtctctgatctttgcgatttgaccgtccctctctcagcattgggctatgccaagcttgacgacggtctggttggtattgccggaactatcagctcactcattggtgtatggtccgcctggaagaagactgcttgatttgatctacaagaggtgggatgagttgaatgctctacaatcgagttttcacttgtctattatttataatccttctagtctatatgtatatttttgttctgcctgccattaggcaagatacatccttttatcg

SEQ ID NO: 12465 - DNA, 961 bp, Zea mays
  Clone ID: 701178420_FLI
gcgcgctgtccaacctccggacgctggacgtgagcttcaaccagatctccggcgccatcccgccgtccgtcgccgcgctgccgtcgatcaccaacctcatcctctgccacaaccagctcaccggcggcgtcccgtcgttcccggactcgtccccgctgctccggctggacctcaagcacaatgcgctctccggcggcgtgcccgccctgccggccgggctgcagtacctgtcgctgtccgcgaacaagctcagcggcacggtggaccaggtgctgccccggctggcccggctgaacttcctggacctgagcgtgaaccagctggagggcccgatcccggcgtcggtgttcgcgctgccgctgtccgtgctgcagctgcagaggaacttcttcgcggggccggtgcagccgtcgggcgacgtgacgatcccagtggtggacctgagctacaaccggttctggggccagctgtcgccgctcctcgcgggcgtcgggcagctgtacctgaacaacaaccggttcagcggcgaggtccccgcgcggctggtgcaggagctggtgggctccggcggcctgcaggtgctgtacctgcagcacaacttcctgacgggcatcgagatatcgccgtcgtcgtcgctcccttccacggtgtcgctctgcctgatgtacaactgcatggtgccgccggtgtacgcgccgtgcccgatcaaggccaggtcgcagaacacgcggccggccgaccagtgcccggagtggaggggctgagacgccaatgccaaataccggatcaccgcagaagaacgacggatggagattgcgaaacggcggtctctgattctttgattgttttttgtccagttgttactagtgtttcttactattcttttccggtttggggaaggaggatagttacagacatgtaagtgccttgatagccgtgatttacaggtgtaagttttttt

SEQ ID NO: 12466 - DNA, 891 bp, Zea mays
  Clone ID: 701178432_FLI
gctggtaaaaggcaatctggaaaagatgctactggaaaagttgcacactcagcaggttcttctctacggcgctataatgaagcagcactgaaaaaggtgttgaatttgatgcttgttgacttttatgtgtgcagtaaaagcaaatgtctcagcttattttttaggtgtctttcgtttttgtttgccttattgcaggaagttcaagaattaattgtttcatggaagtcatactttgagacatgtgtttgtgccttcatttatgctccatctaggaaccgccagatgctcttcgacggggagaagactcagtcagtaattcagtcttgtgatgttcgtccagttccattgactgttcatcgccccaccatgaaggaagcgaaacgggtatattgtaacctaacacaactctactatgagatggaatgttcaaccacagatgaaacactacctgatgctggaagtgtgaaaaatgttgaacaaggtcaaggaaaaaagaatgaagtgactgcagaccctggggaatctatttctgacttgtctgcccgtttggaattgttgaataagaatgaagcagcaaccataccatcatcaaagaacgaaacaacacctcttcatgaggcagcaaagtgtggcaatgctcagctgaccctggagttacttgagcagggtttggatccttgcgtaaaagatgcaagaggaaagacatcttattcgctggcttcagataaggaagttaggaatacattcagaagatttatggcgctcaatcttgacaaatgggactggcatgctgcagatgtgcctagtgcactaacaaaagaaatggaagaatcacaagctgcaaaacaagcagacaaggacgccaaaaggaaagcacgtgcaaaggaattg

SEQ ID NO: 12467 - DNA, 652 bp, Zea mays
  Clone ID: 701178481_FLI
gccctgtcacgggctaggggctggtgccaacctattgatccaaagtgatcacctgttgcgggccatcatgtgtggcaatggttctaaactggggtggtgagagccctccattttgttaaaaatatgcatgggaaggatgaagatcatcttgcatagtcatttgcttccaggaggcgcacaggaggtggagtaaaggtggagtaaaaacgaacgtatttatggtgcctagaggacggttttttcagccactgccaaaacggcttgaatgacgccaccgaagtagtggagttcaaatggctcattgtttgccgcaacctcaatttcaagcgggtttgttcagcggcttatagcttcttctctccttttgttgtctcatctgttttagattgtagaatttgggctagttgcttcctgctgtaaatccgaattttgatgtagtgacggaagtgctacctttttgttgagcatgatcgaaaagtttacaagaaaaatcgtttttttgtagatgaacgtccagtcttgtctgtagctacaatttcttgcgcaatcagtgtaacatccgttgtgtttatattctgctcgacaacgagtacggatttaagcacgtgatatcagtgaataagacagacattagggtctaatcgtttttatc

SEQ ID NO: 12468 - DNA, 1084 bp, Zea mays
  Clone ID: 701178484_FLI
aaaaaatgagcgtactgatcccgagagggcagcaataggagagctgctggtcctttcaaggcataacatggagagtagaatttccattgcaaaccacggtgctatacccttcttggtgaatcttctttactctgcagaccccagcatgcaggaaaatgctgtaacagtgatcctgaatttgtcgttagatgacaacaacaagatcaccatcgcaagcgcggacgccatcaagcctctcatccacgtccttgagacgggtaacccagaggcaagagcaaactcagctgcaactctcttcagcctttcagtaaacgaagagaacaaggccaaaatcggacgatctggagcaatcaaacccctggtcgacctgctgcgagatggcagtgcacaggggaagaaggatgcagcaacggctctcttcaacctatcgatatttcacgagaacaaggcccgggttgttgaggccggggctgtaaagcccctggtggagctgatggacccagcagctgggatggttgacaaggccgtcgccgttttggcaatccttgccacggtgcaggagggaaggaacggtattgctcaggcaggtggcatcccggtgctggtcgaggtcgttgagctgggctcggcacgggcgaaggagaacgctgctgctgctctgctgcagctctgcacgaacaacagcaggttctgcagcctggtgctccaggaaggcgccatgcctcctttggtggctctgtcgcaatcgggcacggcgcgtgcacgagagaaggcacaggtccttctgagctattttcgcaaccagcgtcaagtcggcaaggtcaccaggcgctaaattcagacactgttgtggccggggccgggtgtaaatgtagaatgcacaagcaattcagtagcagtagcatcatggtatgacgatgagagattgcatgctactttaattataggcaattcagtacaacaataggggcagttttgcaaagggtgttggtgtctttttacatctaatttaacatcgtcggtggttgttaacgtaatatgggtagacgccagctttggtttcaaaaaagaggtccgattttgc

SEQ ID NO: 12469 - DNA, 692 bp, Zea mays
  Clone ID: 701178511_FLI
cccaagacgctcatgacaccagaggagggtatggcacgctggaggagctgctggaggtcatcacgtgggcgcagctgggcatccaccacaagccggtaacacacacacaaccaacccctcgtagctgcactgcacctgcattttgacgaacgaacgcgcccgcgctgcatgccttcttcccgcgcgcgcaggtcgggctgctgaacgtggacggctactacaactcgctgctgaccttcatcgacaaggccgtggaggagggcttcatcaaccccagcgcccgccgcatcatcgtgctcgcgcccaccgcgcaggagctcatggacaagctcgaggagtacgagccttaccacgacagggtggcgtccacgctcaactgggagaccaccatggaccacctggcctactgacgcccacgccgccagagccgccagcagacaactgggacatctctgatccatcggtggcattcaggaaacatgcttttagcttgccgtcagattgggacttttgtttcgtttttaactgcatgcagatcggtttaatttggagtgccggagggagagaaaaaaaaaacaggttgattattcggttcgcgtagcaggagtacgtagtacgtgcttgttttgtgtatatggtgccttgtgtttgcttcccgccaacggggataattgatggcttgcggtgttgtc

SEQ ID NO: 12470 - DNA, 706 bp, Zea mays
  Clone ID: 701178536_FLI
gcaatcagaccaagttgaattagaaaaggagcagattcagcaaatagatgcctcagtgagccctctcatgagcaaagggtcatgctaccaagctccggaagcgctgaagacactgaagccctcccagaaatgggacgtttactcctatggcgtggtgttgcttgaaatgatcactggccggtcgccctctgttctcttggaaaccatgcagatggatcttgttcaatgggtccaattctgcatcgaagacaagaaaccttctgccgatgtgctggacccttttcttgcccaggattctgaacaggaaggtgagatgatcgcagtgctgaaagtcgcccttgcatgcgttcaggcgaatccagagcggaggccgtcgatgaggcatgttgcggagaccttggagcgcctcaatggttgacgctaatgaagtgttcccctgataaagttgtgcgattttcggtggaatgggttctagaactcagttgttggacagaagcctaggaggagagggcatgatgctgccttagtgtactccatgtaaaattatcatttccctagtggccactgactgtactggactactgggttgttaacgtgtgaggtagtagctagttaaggtaattagtttgctgttgagacttggaaggtggtagtatcgcgtgcttacttaatattgtgggtatatgaataatgaattagtttaacc

SEQ ID NO: 12471 - DNA, 715 bp, Zea mays
  Clone ID: 701178645_FLI
ggcgggcgcggcggcgcctctcgccgcggcggcctcgacctccccacctgtctactccggtggcgtccagggctcgtcggactacctgaggtaccaccagatgcttctgcaagcgtccacgggcagccagggcaccctgctcccgttctatggcggcggcatgagcaatccctacggcggcggtgccgccatgaccggttcctacggtggagccggcggcggcaacacgagtggttccttgggctcctactactcgttcccggcctcctctgtttctgtcgccaccgtgccgtcctctacttcctctgcttcggggtactactactcgtcgccgcacgactcgcaacacagcgaggcgtccgcggcggcggactggaactgggagagcgcgctggcctggcccgactcgagccagtacccgccgccacctcacactcagtagcagcagccagtagcggtcttcttcttttctctgtaacaataagtaaggtgagtacggttgcgcggagggagacgcgcggcaacgcaaagcaaaacaaagcagatcaacaagaggaggatgctttcatttctttcgtgttatgatgatgacacccgagtggtctttgtttgttgatttttagttttggtcgacgatgtggctggcggctatccccattgtttccatttaatcttggctgcgaatttaagagatgaaagctccaccccgttctcc

SEQ ID NO: 12472 - DNA, 615 bp, Zea mays
  Clone ID: 701178687_FLI
gcggctatgacgacaacggccgccgggtacggctgctgctgggcggggattccgcccttcgcgttgttgccgcggattctctcgacccgccgggagactcctcctcctcctcctcctcgcgcttcccttgtcgcctcctcctcgaagctcagggcgctggcaccacggctgagagtttcgaaccgtccaaggaggctcattgtctccgcttcctcctccggcgaggccaattcggacgcggcgccgtcgccaacggaagccgctattgatataaagcttcctagaagaagcttgcttgttcaatttacatgcaacgcatgtggcgaaaggaccaagcgcttgataaacagagtagcctatgaaagaggcacagtttttcttcagtgtgcagggtgccaggtgtaccataagtttgttgataatcttgggctagttgttgagtatgatctacgagaagaaaacgagctacaaggagaaaatgcggtggacaccagttctgaagattgatctgctgtgagaagcggtgttggtatgcaaaacgccctgtactctgtaggtttttgacaacattggttatttgtatagcataaaaatggcactttttaaagttgttgc

SEQ ID NO: 12473 - DNA, 679 bp, Zea mays
  Clone ID: 701178735_FLI
cggcgtcccaaagaccatcgataatgacatcgcggtgatcgacaagtcgttcggatttgacactgccgtggaggaggcccagagggccatcaacgctgctcatgtcgaggctgagagtgcagagaacggcatcggtgtcgtgaagctgatgggtcgcaacagcggatcatttcaagaagaagccccgtttcccgataactctcaagtacatcgacccgacttacatgatccgcgccgtcagttcaaacgcttccgacaacgtctactgcactctgctagcccacagcgcgctccatggcgccatggcggggtacaccggcttcatcgtcgctccggtcaatggcagacacgcctacatcccgttctataggatcaccgagaagcagaacaaggtggtgatcacggaccggatgtgggcgagggtgctgtgctcgacgaaccagccctgcttcctgagccacgaggacgtggagaacatgaagcacgacgacgacgagcaccacctgcacaacacgctgctcctggactcgccggaaaactcgtccaaatgaaatggggcacaagacttgttttgcttttttgggtgctggcgttgtagagattagcgaccgctatatgatagggttggataatgtgagcattttgtaataatataagcttcctgaagtaagctcgtttt

SEQ ID NO: 12474 - DNA, 468 bp, Zea mays
  Clone ID: 701178737_FLI
tactgttccgaccagacgcactttgccttccgcaaggcagcgcatattgccgggatccaccgcgacaactgccgcgagatcgccacgtaccgtgacgacatgttcgcgctctcgccagccgagctgcaggccgccatgcaggcggacgtggacgccgggctggtcccgctcttcctgtgcgcgacggtcggaaccacccagacgacggccgtcgaccctatcagagggctctgcgccgtcgcagcgacacacggtgtctgggtgcacgtggatgccgcctacgcgggctcggcgctcgtctgcccagagttccggcacctgatcgacggtgccgacgccgtggactccttcagcatgaatgctcacaagtggctgctggccaacaacgactgctgcgcgctgtgggtgaagaagccagctctactcgtagcggctctcggcacggagcaggagtacatcctcaaagac

SEQ ID NO: 12475 - DNA, 211 bp, Zea mays
  Clone ID: 701178752_FLI
cggtccgaatggtccgcgcctgtgggccggacggtccgcgcacgcgcagagtagattagggtttcgagttttgtgctatgtttattagctatatccgcggaattagctcggaatccggtcgtgtaaagggtccagccccctcctctataaaaagagaggcctacggccgatttgtaataaaacaatcgaatcaatacaagttctatttcgc

SEQ ID NO: 12476 - DNA, 682 bp, Zea mays
  Clone ID: 701178783_FLI
attggccacgcctttaaagaaagacaagcaagaaagcaaaggtcctggtcacggctaaatgtttcggagttgtctggtcccattctaaatgaaaataaccctgatgctagatgcctctgctggatgttgcttgtacttgttccaccgggtatggaatcccagaccaacagttttgtctcaaaatggttacttagaaagctcatgggttatggaaccggatatattggattggttgtttcttcagcaggcctatcaatttggacagagtggatcagttttccaaatgcatgttgtttgtctgttgttagggccagcgatcagcaagttattgataatgatatttggtcgtgttttggtcagtatgacatggcggcagtggtatccacaatgttgctcgtcaccggggtgactacattgctgcacatgtttgttggaacgagactatccacttgtgcagggtccatcctttttatacctggctcctgcccttgcgatcatcaactcacaagaattctttgggatcaatgataatgtatgcacgaatttctgtgtcttatgttgttgcatgcctagaacatggcaaatgttttagtcatgcaaggcttttttgttttctactagcagtcctgactgagcttaacaatttgcatttcattacagaattctaaacacataatgaagc

SEQ ID NO: 12477 - DNA, 326 bp, Zea mays
  Clone ID: 701178852_FLI
ccccaccttcttcgttgcctctcttcctccctctcctctcttccttcctctcgatcgatcgtcatagcaatccaagctagcaagcccgtccgtcgtctctcgtccaagaagcatacaactactaatggggaggtcaccgtgctgcgaccaggacgcgggcgtcaagaaaggcccgtggacgccggaggaggacaagctgctggtggactacatcaacggcaacggccacgggagctggcgccgcctgcccaagcacgccggcctcaaccgctgcggcaagagctgccgcctccgctggaccaactacctccgcccggacatcaagc

SEQ ID NO: 12478 - DNA, 596 bp, Zea mays
  Clone ID: 701178895_FLI
ggtggacgacaagaagccgatggagtcaagcttcaccgacacgttcgccccgacctgtggcgtccaggccacaaccctctccaagatcaccggaaggctggtggcttgccagtcccagtacttggctccagctgaggcctttggcgtcttgttggtgaacgacgcgaagggcctccagatactgcgcagcaagaaccacacggaggtcggggcggctgtgagcggcaccgatggcggtggaccgtacttctggtgcgtcctgttcagtgacggcaagccgactaccagcttcaaggtggatggcgaagtgccgaaggcagccatccacccgggatgcttcagtggcaacaatgacgactgctcgggccccacaaatggcgccgttttgaccagtgctggtgcgctgaggctggtgacggccattctttttgctgtagctgctttgtgagcgtgtaagtaggtgtaatgttttctgccattattttgctttgtcaccatctcctgtctgtctgcagtggcacgctatatattctttgagcatatgaactatgtatgcaaggatttgtaggtcgttgttcagcattttgagactatcc

SEQ ID NO: 12479 - DNA, 590 bp, Zea mays
  Clone ID: 701178965_FLI
gaatattctgtttggcagtcaaatggatagacaacgttacaagagagtcattgcagcttgctgtcttaagaaagatcttgagctgctccagtacggagatcagactgttattggtgatagaggcattaatttgagtggaggtcagaaacaaagagttcagcttgctagagcactctaccaagatgctgatatttatttgcttgatgatcccttcagtgctgttgatgctcatactgggagcgaactgtttaaggagtatatattgactgcactagcaaccaaaacagtaatctatgtaacacatcaagttgaatttctaccagctgctgatctgatattggttcttaaggatggccatatcacacaagctggaaagtatgatgatcttctgcaagctggaactgatttcaatgctctggtttctgctcataaggaagctattgaaaccatggatatatttgaagattccgatagtgatacagtttcttctattcccaacaaaagattgacaccaagtatcagcaatattgataacctgaaaaataagatgtgtgaaaatggacaaccatctaatacacggggaattaagg

SEQ ID NO: 12480 - DNA, 1253 bp, Zea mays
  Clone ID: 701178972_FLI
ccgcagccgccgccgccaaaccacaccgcgctcctctctggcggatagcggacagcgattttgatcggcggtcctcagacctcagcccagcccggcccgcgatggagaagacaaagctgccgctgccgctaccgctacccctggtgcacggcgagcgtctgtgggcgcggccgtggcggtggctgaagacggccttcttcatcgtggcgatgctggcgtcgctgctgctcgtgtgcgcgccgccgctgctggtcgtgctgctggacctgctcctgccgcccgcgctgctctccagcttcctccgcgcgcagccgccctcctccgcctccttcgccgccgcgctcgccgcccaggccaggcccttccgcttcgcctcctcgctcgccgacctccccgcgctctccgccgcgcgctccctcctcatcctctgcgcgtacgccgcggccggaggcggcggcgccgcatacaggtgggtcgccgtcgcctgcagcgccgcctccgtctgctacgtcctcgccaaggccgtcgccgtcttcggcgccgcgcccgtgtggcggggcaacggccagctcgtcgccgtcgaggccttgttcctcatgtcgctcgcgctcgccgtcgcccacctcgccatggcgtaccgcgcgtcatgccgcgagcgacgacgcctgcagctagtctacagaatcgacgtcgaagcggtaagactgaagggaggccagacgcccaaggcactgaagcaatgcatgatatgacacccatctgctcctagtatcgccgtccccgctgggtggaggtggaattggaaggaaggaacctgaagatgcacggcgcggcggtcttcgtggtgcagaccggcagtgcagtgcagtgcagggggctcatccgcgcccaagttttggctcgagaagctgtgcataccgatcgccgcgtctgtccgtccactccctctgcgtctgtgaatgtgtgccagagtgaacgtgtagtgtcatcctgtacatacgtatggaacacaacattcgtgcttcggcctcctgcagccaatgcgatccaggatgagccgtgtgccaggtgcttgcgttgcctcgtcggcccggaattgtgaatatgcctgtcacgtgcgggcggaggtggcaaatgggcatctctaaatttggtgtttatcctgctttcaagtggatttggaagccttttcctcttagctaaaacataagatcgctcttttatcttctgttaagaatttaagatcgctcttt

SEQ ID NO: 12481 - DNA, 765 bp, Zea mays
  Clone ID: 701179020_FLI
gtgcgcagcgcgtcgacgggcggcggcgaggaggtgggggagtgggcggagcagtcgtcgcggtcggcgctgtcgctgttcaaggagaaggaggaggagatcgagcgcaagaaggtggaggtgcgggacaaggtgttctccatgctgggccgggtggaggaggagaccaaacgcctggccttcatccgccaggagctggagctcatggcggaccccacgcgccgggaggtcgacgccatccgcaagcgcatcgacaaggtcaacaggcagctcaagccgctcggcaagacgtgcctcaaaaaggagaaggagtacaagatgtgcctcgaggcctacaacgagaagagcaacgagaaagccacgctggtcaacaggctgttggagctcgtaagcgagagcgagaggctgcggatgaagaagctggaggagctcaacaagacgatagaatccctctactagatctgatctcatggaagacgaggacgatgatgatgatggtaacgtagtcgtggtattacggcccataagagaaatcgagctagcaatgactgaagctcaacgtgcaaattttttttctgcgacgtacttgatgattggatttgtgtatttgtacacgtgatttgtaaccgatggctcactatccttggattgtaatcgttgctctgcggcaccattggtcctaaacgtatttgaaataccaatatcagataccaaatggttcttagatttatcattatgtaaatagaacgacgagctcactttatc

SEQ ID NO: 12482 - DNA, 823 bp, Zea mays
  Clone ID: 701179040_FLI
gtcgatggcaagtcctgtcctgtggtgttttccagtatgttaacttggttggaactgccgttgggtatacaattacagcgtccatcagtgcagcgtgagtaattcttgcataaaaaaaggctcatttagtagtgaatgttttggcagattcagtctcatcgtcgattgagaaaccccttttggctgaatggcgatgagcagggccgtgcacaaggcaaactgcttccacaacaagggccacgcggccgactgcagcacctacgacaccatgtacatggtcgtatttgggatcgttcagatcttcttctctcagctccctaacttcagcgacctttcgtggctgtccatcgtcgccgccatcatgtcgttctcttactccagcatcgccgtcggcctctcgttggcgcggaccatttcaggccgtagtggtacgaccactctgaccggcactgagatcggagtcgacgttgattcagcccagaaggtctggctcgcgcttcaagctcttggcaacatcgcgttcgcttactcctactccatgattctcatcgaaatccaagacacggtgaagtctcctccagccgagaacaagacgatgaagaaggcgacgctgatgggcgtgacgaccaccacggcgttctacatgcttgctggctgcctcgggtactcggcattcgggaacgcggcgccagggaacatcctgaccgggttcggcttctacgagccctactggctgatcgacttcgccaacgtctgcatcgtggtgcacctggtgggcgcgtaccaggtcttctcccagcccatcttcgcggccttggagacg

SEQ ID NO: 12483 - DNA, 1085 bp, Zea mays
  Clone ID: 701179138_FLI
ggcgatctcgtgggacgacgcgctgcggtcggggagccggcgcttcgagcacaagtgctacaacctcttcacctgcaacagccactcgttcgtggccgactgcctcaaccggctggcttacggcggctccgttgggtggaacgtgctgaacctggccgcgctcgtctggctgcgcggccggtggctggaccccatggccgccgtccggtccttcctcccgttcgccgtcgtctcctgcgtcggcgtcctgatggccggctggtccttcctcctgggcatgaccgcgttcacgctgctcttgctcggctggttcgtgctcggcgtctactgcatgaagggcctcgtcgtctgacgcacgctggctcggagccgaacgtgtgcccagcttcttcactgagcatcggggtcatgtagtagatgaatgaaggatcgaaatcttgaaaggggtgtgagtcggaggggagagacaacgggaaaacaaaatttgagcccgtttttaatagcggaaacccaaatccagatatttataaaatcgaagtttctatttgaaacaaagtagaagtacaagataaaaggaaggagggggaaatagcacaaaaacaaaattgggctagagtcttagaaccgttggaggccgaaactcacgccctccttgctgcgaagctgtcgatctgcagaatgcagctctgttaactgacagtctcctgttacgaggcaatcagaggctttttctagactggacctcgccatatccaccatatagatataggaggtaccagaagggggtgttctatatagcaagctgtagctgaactcattggattagacatatcagggcgatcaatccaatagcatctcagtgtcctgtcatttcataaaaaaacagcttcaacgatatacaattttacatttctatcaaaaaactataaagatatatcataaaatgatctaaatatacgtacacctgaataagagttggtatctaaattgttataacaaatttgataatttaaattagatatgtatgaacattgatcttttttatgttatcaagcacattattataaataaaaatatttttttgc

SEQ ID NO: 12484 - DNA, 449 bp, Zea mays
  Clone ID: 701179163_FLI
ggcgggcctgtttgcgtttgacacggaggaggaggtggtgaggctggcgaacgcgacggaggttgggctggcggggtatttcttctcgagggacttgcaccgggtgtaccgcgtggcggagcatctcgaggttgggatggtgggcgtcaatacggggctgatttcggacccggcggcgccgtttggcggcgtcaaggagagcgggtttggcagggaggggtcgttgtatggtatttccgagtatcagatcaccaagatggtgacgtatggggggatggggaagccgctgcaggggaaggagtccgagtgagacatgggggtggtggtgatggggaagatgtgttgacgatgacggatggagttgagaaccaggatatgttgtttgtcctgctgggaaaaaccgtcacggagcaggagtcggcgcatgaatgatgatatttcaagtctag

SEQ ID NO: 12485 - DNA, 1386 bp, Zea mays
  Clone ID: 701179255_FLI
cgaaaacagccggcgacacagctgaggcggcagaagcagcttctctcgtcgtggtgtttgagtttcagcaggcagcatggcgcatgctcaagaaattcagctccagatcagaggcattccggacgaggaatccgtcgacgcccgtgatggacccaaggtcgccacggggcggtccacgagaagcagcttccgatggtggatgacggtgctggtggacatgctgatggttctctgtgggacgactgtggccaccctcctcggccgcctgtacttcaactccggcggcaacagcaagtggatggccacgctgacgcagtctggcggctcgccgcttctggtcgtcccgctcctcctgtcgccggcgcgctcggcggaggagcgccggccggcggcgctcaagatggttgccatctacgcgggcatcggggtcatgatcggcttcgacaacctcatgtactcgtacgcgctgcagtacctgccggtgtccaccttctcgctcgtggccgcgacgcagctgggcttcaacgccatcacctcgcgcctcatcaacgcgcagcggttcacggcgctgatcgccaactccgtggtcgtgctcaccttctccgccgcgatcctcggcgtcggatcctcctccgacgagacctccagcaacgtgccgcgcggcaagtacccactggggttcgtactcgtgctggccgcctcggcggtgttcgcgctcattttgtccctcttcgagctcaccttcgagaaggtggtcagggtgcggacggcgcggtgggtgctgcggatgcagatgcacaccaacctggtggcgtcggcggtgtccgtggcggggctgctcgcgtcgggggactggcggacgatcccgggggagatggcgtcgttcaaagacgggaggacgaggtacgtgctgacgctggtgggcacggcggtgtcgtggcaggcagcggccgtgggcttggtgcggctgatcatgagggtgtcgtcgctgttcgcgaacgtgacgtgcacgctggcgctgccgctggtgccagtgtttgcggtggcgctgttcggggacaggatgaccggtataaagatcgtggccatgctcatggcggtatgggggttcctctcctacatgtaccagcactacatcgacgcacggcggcgggccggggccgagaacgccgagtgccgcgtctgcgccacacgcacgggaagccacgcggtcttgcccgcttgaggctccgttgtgggcctgtggctcgacagtgtgtagtactcaatgctacatagatagctagatgcctaaagatagcaaaatgtttagggccatgggatccatgttattttctaggatagtaattccaaagaatatcatttgaataagatattaagttattt

SEQ ID NO: 12486 - DNA, 985 bp, Zea mays
  Clone ID: 701179331_FLI
cgcgttcgagtcggtgctggccgccgccaaaggcaagaagatcgtcatgttcctcgactacgacggcaccctgtcgccgatcgtcagggaccccgacagcgccgtcatgtccgaggagatgcgggacgcggtgagaggcgtggccgagcacttcccgacggcgatcgtgagcgggaggtgtagagacaaggtgttcaacttcgtgaagctggcggagctgtactacgccgggagccacggcatggacatcaagggccccacaacacagtccaagcacactaaggcaaaggccggagccgttctatgccaacctgcgagggcgttactgccggtcattgaggaggtgtaccgcgcgctgacggcgagcacggcgccgatccccggcgcgacggtggagaacaacaagttctgcctctccgtccacttccgctgcgtccaggaggagaaatggcgcgctctggaggagcaggtccggtcggtgctcaaggagtacccggacctccgcctcaccaagggcaggaaggtcctcgagatccggccgtccatcaagtgggacaagggcaacgccctgcagttcttgctcgagtctctcggttttgctggcagtaacagtgtcttcccgatatatatcggagacgatagcaccgacgaggacgcgttcaaggtcctgcgcaacttggggcaagggatcgggatcctggtgagcaagattccgaaggagacccgcgcatcctactccctgcgtgaaccttctgaggtggaggagttcctgcgcaagttggtcagctggtccaaggagagcaggcaacgggactagtcatggtccagtcagcaggcgatggaaagctttgcctagaagcggtcgacagggccggctctcgtttttttaagggccatagaccaacctcgatgtttaggcctctgattttttattgtcaataactgtaataaaatagagggaaaataataaaaataatttaatggt

SEQ ID NO: 12487 - DNA, 1105 bp, Zea mays
  Clone ID: 701179351_FLI
gacatggcgtggctctccgtcgtcgccgcggccatgtcgttctcgtacgccttcatcggcctcggcctcggcctcgcaagaaccattgctaacgggacgatcaaaggaagcataacaggtgttcggatgaggacgcctatgcagaaggtttggcgcgtctcgcaggccatcggcgacattgccttcgcgtacccctactccttgatcctcctggaaatacaggacaccctgaagtcaccgccggccgagaacaagacgatgaagagggcgtcgatgatctcgatcctcgtcacgacattcttctacctctgctgcggctgcttgggctacgccgccttcggcagcgacgcgccgggcaacctccttaccggcttcggcttgtacggtccgtactggctcatcgacttcgccaacgcgtgcatcatcctccacctgctgggcgggtaccaggtgtacagccagccgatattccagttcgcggagcggctcttggcggagcggttcccggacagcgggttcgtgaacggcggctcctacaccgtccggttcgcgtgcctgcgggcgtgccgggtgaacccgctgcgcgtgtgcctccggacgctgtacgtggcgtccacgacggcggtggccgtggcgttaccctacttcaacgaggtgctggcgctgcttggcgcgctcagcttctggccgctggccatctacttccccgtggagatgtacttcatccagcggaacgtgcgccggtggtccgcccgctgggtcgtcctgcagaccttcagcgtcgtctgcctgctcgtcagcgccttcgcgctcgtcggctccatcgaggggctaatcagcaagaagctaggctaggctagtccgatccagtggaacaccctatctgcaggtctgtcagagagtggcagcgggctcggttattttcacagtgttgccttcctcctgcatcgggttgtaagttgtaacatatatgtcgtattgatactggcgagttcagatgttcagaagaagtagaacgcgtgtgacgattctgtgttgctgaatgccgcctatgtagtttcagttccagaatttgagggtttccatatccgcagcagtttcctct

SEQ ID NO: 12488 - DNA, 1256 bp, Zea mays
  Clone ID: 701179356_FLI
cgaacttaaaccctagagccgccggcccggtcgcgctaggcgctagcgacacaaatctcaaatcacccggagagaactcgctcgcgaaggctgaactcatggctcgcgtcttcgttgggaacctggatccgcgtgtcacggcgcgggagattgaggacgagttccgcacgtttggggttctgaagagtgtatgggttgctaggaaaccaccagggtttgccttcattgacttcgatgaccgcagggatgcacaagatgccattcgcgatttggatggtaagaatggttggagggttgagctgtcaaccaaagatggtggtggccgtggccgagaccgtaatggttctgatatgaagtgctatgagtgtggtgaagttggccactttgcacgtgaatgtcgcttacggattggttcgggagggctgggtagtggaaggcgtcgcagccgaagtcctagatatcgcagccggagccgaagtcgcagccggagcccaagacatcgaaggagcccaagctatggcagaaggagctacagcccacgagatcgttctcctaggaggcgaagttacagcaggtcgccaccgagatctcgtgcacggagtctcagcaggtcgccgccactgccaccaccgcctcctagaaataacagcatgtcaccacggggagcccgagaaatgagcagatcgtcaccaccacctcccaaaaataacagcagttcaccacgggaagcccgagaaatgagcagatcgccaccaccacctgctaaaaataacagcagttcaccacgggaagcccgagaaatgagcagatcgccgccgccaccacctcccagaaataacagcaggtcaccaccgggagctcgagatgtgagcaggtcgccgccaccacctcctgatgccagaagaagctatagcagatccccagaacagcagccccagcacgagtccccatatgccaatgacgcctgagaatctttagctgctcaaagatgctggaaaatgctaaggggcccagcatgttttgcccatgcgcgtcggtacaactgcaattctataggatccagtctgagattttgctcgtgttttgggtttcccttggacacaccgctgctgataccattgtagagggaggagcataacgtttccgtttcgagtattgactttgggcacttatagctgtcaagacatgacctggttcttgttagatttgtatcactagattgcttttgaattcgaacgaagtgttaatcgtgggct

SEQ ID NO: 12489 - DNA, 448 bp, Zea mays
  Clone ID: 701179408_FLI
ggcacatgggtaaattctccactgccgttaacctctgggccgtgatctggaccacattcgcttctgttatcttcttcttccctacgtcccgacctgtgactggtgagaccatgaactatgcaattgtgttcatggcatttatcatgttgtgtgccatggtgtattggtatgtgcgagggaagaagttctatgctggtccactcaaggagactaccattcagggcgaaaataccggtggtatttgggagtcggttcctgtcgagacggaaaagacaaactagtgtgcacgtcacgaagtacggcttgatgaggaagaatgcttgcttgtaacttgtaaatcaatagttcgagttggttttggccacttgcttaagattatgtagttagcgatggaaggagaagacattatcttcgcttgctaattcgatcggctcaattcgtatctcct

SEQ ID NO: 12490 - DNA, 622 bp, Zea mays
  Clone ID: 701179537_FLI
ttttattctgattgggacacattcaatcaacgttgtcttcatagttggagatgcagctctaaacagactgcatttcccgtggtttaggatagcatacttcctactgtggacgggcatttttgttaatgttcagtggatcgtccactttttcgtgtcaatagggtggccttacccatttctagacttgacattccctggtgcacctgtatggtacctggtggtggcactgctgcacctcccatgctacggcatgttcgccctggtgctgaggctcaagcatatgttgctggaaagctggttccctcaaacttatgcgaagtaatcaaggacgacaatagatggagttggttgtctctatacgcttccttcagcaaaaaaattaagcggaggttctgcaaactgtatgcaccacggaatcacattgaaatagatcacacctgtctgtcgacgggtttctccggaagtggacatgtagattgacagagcatgttccaaaaatttcgagaccagcagcttatttaaaccagctgttgtctccagcatcatacccttttttttgtttacccccaatggagatatcagacatgtgtacagtccgctaatatattcaatcgtttccagc

SEQ ID NO: 12491 - DNA, 329 bp, Zea mays
  Clone ID: 701179594_FLI
ggacggccacccctcggcctacagcggcggacacccgggcaacgattgcagccactggtgcctcgccggcgtgccggacacgtggaaccagatcctctacgcgtctctcctcctggcataggaccggggagagaaaaaacgcatactgtataccaattggcgcaggctataggcatttcgtatctaaaaattggtgattcgattgtttcctttttttcttcttggaaaaatcaatgttatgtcatatcagcatataagaagcagcagcaaacgagtttacaataatgttgtataataacatgattgaaacctggggtgattcagttatt

SEQ ID NO: 12492 - DNA, 483 bp, Zea mays
  Clone ID: 701179624_FLI
gcccggccaacaccagccagttcttcccgaacacgacggtgttcatggacctcatcacgccggaaaggtttgacaacaagtactacgtcggcctgaccaacaacctgggcctcttcaagtcagacgtggcgctgctgaccaacgcgacgatgaaggccctggtcgactccttcgtgcgcagcgaggcgactttcaggaccaagtttgccaggtccatgatcaagatggggcagatcgaggtgctgacggggacgcagggcgagatcaggcgcaactgcagggtcatcaaccccgttagtgccaccgatgatgtcgtcctcgcccgcccatcaggattcactggagtggctgcgagctagctaaccaactgtcggttcatgcacatgcgttgtgcacagtgtgtgatgtctagtgtgagttgatgtgtgaaattgtaataagtaatgagcagattatcttggtaagctcgcttgttactgtggc

SEQ ID NO: 12493 - DNA, 407 bp, Zea mays
  Clone ID: 701179627_FLI
gttttgacgaaccaccgaaagaagcttccttcaaatcaaaagcaatgccctctgcctccctgaaagatatcgttcacactctgctcaagggttaccaaacagaaaccccaatcctccagaagatcatcgatgtcttcttaatctatattcttattaccgggatcgttcaattcatttacgttgtcctcgttggaacgtttcccttcaattcttttctgtctggtttcatctcgaccgtaggatgtttcgttttgactgtttctcttcgtatgcaagtagatccaaaaaacgagatcaagggagtctcggtcgagcgtgcgtttgccgattacgttctctgcaaccttattttgttcctcgttgttctcaatttcatgggttaaattgaaaaagaaacatttcacctg

SEQ ID NO: 12494 - DNA, 270 bp, Zea mays
  Clone ID: 701179711_FLI
ctcgacgcaaatcgtgaaacagtttagaatttccaacgaaagtcctacgagcctgcgagtgctaaactgctaactgctaagactgcaatggcggccggaggcgagctgcagctgctgagctcatggtacagcccctacgtgatccgcgccaaggtggcgctggggctgaaggggctcatctacgagttcatcgaggaggacctcttcagcaagagcgacctgctgctgaagctcaacccggtgcacaagaaggtgcccgtcctggtccac

SEQ ID NO: 12495 - DNA, 744 bp, Zea mays
  Clone ID: 701179745_FLI
atttgtcaaccccttcacgccctattgaggaaaggtgcactgtttttgtgggcggaggaccattctacagcctttcagacactaaaacaggccctaatgttagccccggttcttgcccttccagatttctccactcagtttactattgagactgatgccagctctattggtgtgggtgttgtccttatgcagaaaggtcaccctttggcctttttaagcaaagcattaggccctaaatcctgtggcttgtcagcttatgagaaggagtttatggctattctggtggctgtgcaacagtggtgtaaatacttgcagaatggggagttcatgatccttactgatcatcaaagcctttctcagttaaatgaacagaggctgcatactccctggcaacacaaggttttcaccaagcttttagggctccagtataaaattgtctatcagcaaggtcataccaaccgggtagcagctgccctatctcgtcgccttgaacctaaattcaacgttgtttctgaagtgatccctcatggttaattgatgtacataacaactacctacatgacccagatgctcagtccttgctgactaaactcgctatagatcctttggctgttgtacaagagttcgtgcacaattgccagacatgtttgcaagctaaaccagaccggtctgcctaccctaggaaacttgaaccattgtcggttccgtccatggcctgggaaataatcattatggattttgttg

SEQ ID NO: 12496 - DNA, 373 bp, Zea mays
  Clone ID: 701179787_FLI
gttttttttactagtacatagatagggctgtttcacaataacatttggtcatcaacaagaagcatagatacccaaagggagctttatagtatactgatgaggaggaacagccatcggtttataaatagttgtacacacgaattccctacatcacaaaggagtttatatttattttacttgatgtataagatatcggcagacacggtaagatttgattcatgtgctttccgcatggcgacaattgagacgaacagtaagatttgattcatgtgctttccgcatggcgacaattgagacgaacactaaggtctcgtttgtttccttttattttgaggaattataatcttactaatggaatagactatttttttag

SEQ ID NO: 12497 - DNA, 746 bp, Zea mays
  Clone ID: 701179796_FLI
ggtccctgtccctgtcgatccctcgcaaggatcccacgatggtgaagttctcgcgggagtacgaggccagcatcatccccgagtggaaggccgccttcgtcgactacaagggcctcaagaagctcgtcaagaggatcaagatcgcccgccgcgaccgcgacgcccgtagtaccagcaacgaccacgacgacgccaccaccaccagctatggcttctccgtcctcgaccccgtccgcgccctcgcctcccacttcaacaacgccacgcccccggcctcgccagagggcggcagcgacgacgacgccttgaggaccttggaatcggattcaggggagctcgtgagagccacggacaagcatgtatgcagtgctcgcccttgatccatggatcgatcgatcgatcatctagctactacagtcgtaatattcattattagtactatcattctatattaaattagctgttatgaattgaacaaagtaggaaaaagaaagaaagttacagtaactacacacggctagctagcttgttaattgtttacccatgtcatgtcgtacatatacttatgcgcatgcaggagcaagagtttgtggagagggcggacgaggagctggagaaggtgaacaagttctacgcggcgcaggaggcggacatgctggcgcgcggcgacgcgctcatcgagcagctccgcatcctggcggacgtcaagcggatcctcgccgaccacgcggcggcgtcgtcccggc

SEQ ID NO: 12498 - DNA, 469 bp, Zea mays
  Clone ID: 701179930_FLI
gagaagaggaagaaccggctcaccgcggcagatccatacccagcagcggcggcgacggcggcggcaagcgagtcgtcgactaagcctccggcagtgaaagacgagggcgcgccgtgggtcggcgtgaactcggcgctcagcctcagctgaacaatctcatcgacggcaacctgcctacctatcgctatagggaaaaactagctatttcccggccgtaaaaatatgtacgtgtttggccccccttgacatttacaccagtaaaatggctgcttcagttcaggggaattattagctgggtagctaattaccatgatcggtttatttagttgtctgtttgagaattctttggccagaacgaagaagaattctttttttcttccttgctggtattcatcatatctgcgaggatacgaactgattaattagacctagtcgaactcatatatatacatagtgtgtaaattcaaat

SEQ ID NO: 12499 - DNA, 614 bp, Zea mays
  Clone ID: 701179970_FLI
cacgcacgaagagatcgaggacatgaccaacagctaccgcatcaagatcggcgccggcgggttcggcgccgtgtacaagggcgagctcccgagcggctcgcaggtggccgtgaagaagatcgagggcgtcgggatgcagggcaagcgcgagttctgcaccgaaatcgccgtcattggcaacatccaccacgtcaacctcgtccggctccgcggcttctgcaccgagggccagcgccgcctcctcgtgtacgagtacatgaaccgcggctctctcgacaggtcgctgttcaggccgaccggccctctgctggagtggaaggagcggatggacgtcgccgtcggggcggcgagggggctggcgtacctccacttcggctgcgaccagaggatcatccactgcgacgtcaagccggagaacatcctgctcgcggacggcggccaggtgaagatcgccgacttcgggctcgcgaaattcctcacgccggagcagtccggcctcttcacgacgatgaggggcacccgcgggtacctcgcgccggagtggctcagcaacgcggccatcaccgaccgcaccgacgtgtacagcttcggaatggtgctcctggagctggtgc

SEQ ID NO: 12500 - DNA, 1347 bp, Zea mays
  Clone ID: 701180001_FLI
tccagctcatctcttcgttctgtttgtccagtatcttgcttgtcattcatattaacaatttaaaatggccaacaaattatatacttatccggaaaatttccgtgcttataaggcacttttggctgcccaatacagtggtgttcaacttgatgtcgaccgtactttcaagtatggtgtgaccaacaaaaccgaagagtttcaaagcaaattcccattgggaaaattgccattgctggaaaccgcagatggacagcgtttatttgaaagtaatgccattgctttttacttagcaaatgaacaattacgaggatctactccagctgaacaagctcaagttattcaatggactgcttttgctgataacgaattgttgccaccagtcgctactttagtgtttactgcttctaaagtaatcactcgccctgctgaagaaacagccgcatctgaaaaacaattagctacacttttggcttttgttaatactagtttgaacggtcgttcttatttggttggtgaacaagttactttggctgatttggctgtagttggaatcttaattgctttgtatcaacaagtgcaaactccagaacaacgtgccacttacgccaatttgaacaaatggttcaacaatttggtggctcaaccccaattcactgctgctttgggtgatttgaaattgaagcaagctgctgctgctgccgctgtgccagcaggtggtgacgaattcccaactgaacccaaaaagaaagatccttttgccgcttttccagctggcacattcgtaatggatgcttttaaacgcgaatattctaataaatcagaagacgaatctattgcctggttctggcaaaactttgacaaagaaaattactctatttggttctgcgagtacttgtaccctgaagaattaaaaatggtattcatgagctgcaacttgatcggagttatgatgcaacgtttggacacaatgcgcaaacatgcttttggttcaatgtgcttgtttggagaagacaatgcttctaccatttctggagtttggatttggagaggacacgaattagctttcactttaagcccagactggcaagttgattatgaaagctacaaatggacaaaattagatcctgacaatgctgaacatcgcaagactgttgatgaatatttgcgttgggatggcgaattcggaggcaagaaattcaaccaaggcaaaatctttaagtaaatttattggttttgaacatttctaatgcgtctgtaattctccatttcacttttgtactttaaaacccactgtttttacttcagatgattttttttttgattaaattatttttaattttattattt

SEQ ID NO: 12501 - DNA, 404 bp, Zea mays
  Clone ID: 701180004_FLI
cgcgcgtgggctcggtgttccgagacggctctcgtcgtgctgccccaactcggcaactccccatcagctcaccccgatctagggtttcggcaccatccgcttacgcgcctccccaccaagcaaagttgagggcccgcggcatctcccttcgggcgccatggcggctacagggcaggagggggatgacgtcgaccactacgaggtactctgcctcccgtcgggggaggaaggcgcggcgctgaccatcgagcatatcgagaaggcctaccgaacgcagtcgcggctgcgccaccccgataagcgccccgacgaccccaacgccaccgccgacttccagctcctctcgagttcctacaaactcctccgcgacgagtcccttcgccgccagttcgacgcgcgcctcc

SEQ ID NO: 12502 - DNA, 446 bp, Zea mays
  Clone ID: 701180088_FLI
ctacgacatccactctcctaggattccctccacagaggagatcgcagaccgcgtcgagaagatgctcgccgtgctcgacaccaacatcctctgggtgaaccctgactgtggtctcaagacacgcaagtacacggaggtcaagcccgccctgaccaacatggtctcggccaccaagctcatccgcacccagcttgccagcgcgaaatgaggtcgtttgatagctccatggtctgatagcgcggaatgagccagttgttttgaataatttgggtgttaccccctgttccatggtgttagtgttaggttagcctctcattggtgagatacgccgtttcaagatgtgttctaagtttggagtgtgtgttttcctttgggctatgtttctgggggtatgtgtgtgctttggttataaacagaaatgaaatatgcagtcttccaattgtatc

SEQ ID NO: 12503 - DNA, 585 bp, Zea mays
  Clone ID: 701180251_FLI
gtctttcgctacagtacactttaccacttctatttgctccaccagctcactattatcactctttacatctcaatcatgtatgcctctatcatcttttatgctctcgtcgccctcaacggcgtcatggcgtctccggtccaagggcccgaggttgagcctcgagccattgaacgccgtgtgcctagtatgggagacatcccgtttccgaagttcccggcccgcaacaagaacagcaacaagatgggcaaaggcagcagcgactgtagtggctcgggtacgaacacccaggtaaacgcctgctctgccggtagcccatactgttgcagcagcgacggcaacggcggccaaacttgttccaacaccactgcttgtacggaaacgattatttgctgcaacaacaacaacggcttccaaatttgcattggcgacctcgacttcaacgtaccgatcaccatcaatgtctatgagtaaaagactcgttcgagggaaggacgctgttgaagtggcgagtggccgaggggccgcaaaaatgtataggtacaccagacagccaacttagatccgtaatacatggacgtacctatg

SEQ ID NO: 12504 - DNA, 838 bp, Zea mays
  Clone ID: 701180355_FLI
caagcagaccgctggcgcctccagcgccgtcgccggaaacggcggcacaccacccggaagcacgacgacagccacgcacaccggcggcggcgagacgaacggggcggcggcggcggcgctggcggcacggccagcgctggcggccagcagcatgttcgccaaggtgcacatggagggctacgcgatcggcaggaaggtcaacctcagggcccaggacggctacgactccctctcaaggacgctcaccaatatggcaaccaacttcttctgccccgcagactgttcaggcgcggcagaaaaagacgctccaaagagtgacaagttcatattcctgtacgaagacttcgagggcgaccgaatgttggttggtgacgtcccatgggaattgttccttgcgtctgctaaaggattgtacatcgtccgaaaacccagcatcaggcgacaaaggtcggggtgaaggtgacagaaactataaagccgaagaaccaacgaccaacggctgatgatgcaggcactctcttcaagcaagtgtggtcgcaaggacaggagcatataaatatatatgcactacatgctaggacatcttcttggttttggcatatatatagctccgaattacattttcttctgctggtactatatatttaatagtaaggtagttagtagagctatgtgagttatgttgtactgttggtgtttcctgatatcaatgtgcatatagttttgatcgctttgtaatggggggaaaaatctacaaaaggccggaagaaacatgctcacattggtctcaacaagtcaacggtgataaataaggcagatatattatgacttgttaacc

SEQ ID NO: 12505 - DNA, 735 bp, Zea mays
  Clone ID: 701180507_FLI
gccgaactggcccgatgtcgctggttgcctacgatgcctcctccgatgaggaagacgccggcgagcctgccgccgccgcggcgccacaccctgcccccatcggtccgcagccaaggcctccgtctcctacggcagtgagccctgctcctcggcctacgcctacgcttacgccgccgccgccagcagccagccagagtgtagcaccaattagttcgagtgatgtctctctgcccacatcatcattagatctcccagatgttgcagatctctttgctccccctgcagacaatgcatcaaggaagagggaatcaaatgggtctgctcttcatgactcgcgcaataaatttccaaggatgcaatcacaatcccaaggcataggaagtgctgcagggaacgccctaattccaccgcagcttcgtggaaggagcaatgttgttaccgaagacatgagcaaactctttgtggctaaacgaaaagagtagcatcttaaccttttctggacctgaacctctgtttggactccatagactgataaacgcatgtactgagtgcaatggatgtgccggcatgatccaaggttgttgctgaatcctaaagaaccggacgaaggatgctaacggtaggacgacctggtctcttagcctaccgtgggctgttgtcagatgtcaaaaatgccctcttagaagtttagaacatttctttggtgctcactcgcgtttcatgttcaacggtgct

SEQ ID NO: 12506 - DNA, 768 bp, Zea mays
  Clone ID: 701180513_FLI
ccaaaatcttcaggaaaacaaactggagatgaaaccctaatggaaaatgaacctgtgaaggcagtagcagtggaagaaaatataggtcgtgatgacagtttgtccatttcttatcaactagcctgtaagacagtagcagaactgcctgttacagatgcccagtcgcctgctagttcttctggtcattttattgctggaaattttgacaacacacatccaacatcttccgccacttcggacaatgctattaattctctgacttcaaagttcggtgcagagctagcacaaagtcatgattctacggacaaaaagggacagaatgatgctgaggaggttgaggagttagagagtatgacaccagcagcctatagtgaacctcccagaaatatacaacttagcttacgaagtgcttccgctaaggtcaagccttctacactaccaagacgatcagcgaggcttcttcctaagtaaccgccgtaaatgatacagatgagatccagtgtgagaatagcctcactaccggcttagtcagattccatgaggatgaagggatagaaaacagttaacaagcttagattctaattttgtatgttcttgttaattcttttttgttccagcaactgagtagaacttggtttctgaagcttaggctgcgtgactttttatctcctcgtgtccatcaacatctgttacagttacagtcgtactgtcgagctttcatacactattgtacaaacgactcctacttttacagcatctgtttcctct

SEQ ID NO: 12507 - DNA, 684 bp, Zea mays
  Clone ID: 701180577_FLI
ggccgccagcgccgcaggcccgcagcgttgatggccgccgcacctggcgcaccagaggagcgactcggcgtcctcactcctcaatgcctccgggagaagaccggaatctccgagcccaggtcggaggtgcacagggacggaaactaccaccgagcggtgaacgtgtggatctacagcgagagcaccggagctgctgctgcagcgccgagctgattgcgaggaattgtggcctgggcagtgagacatcattagcgccggccacatctccgccggcgattcctcgcactctcggcagagggaccttctggaagatccaggcatcaaccatttcagtcgatgctttcgagctcatgtgtgtgtttcttcaggaacggtgacccatatccacatgggtatacgtatgagataaattcatatccacaccaatggatataggtgatacaataggttttttgttgttgtggtcagaggcggagctacgctacgtagaaattaaggggtgcacatgcacccaaaaaaatggaaatatagtggtttggaccaaagttttaccatatatgcatcacctgtaaattgttatcatgcatcctcaaggtatatgtatcatcccctgacttactctagcttcgctactggttgtggttatcagtatatgataatatatgtaggtatttacctgttgcc

SEQ ID NO: 12508 - DNA, 477 bp, Zea mays
  Clone ID: 701180596_FLI
gtttcatcttcctcaagagctcacacgaaagttgacctaagcaagctagaactgactgcactgctgagatattggcgtcacttcaatctcgatgcatgtcctaatccatccagagagcagttagttgatgctgttcaaaggcacttcacagcccagcaattggatgagttgcaggtcattgtcggctttgtgcaagctgcaaagaggctaaagacgactatgaaagtggcctgactgtgaagcctgaacttcaactaacagattcaagagaggatgtagcatgtttgatgaatgttgccgtgctatgtaatatatatgcatgaagttctttagattcaggtggctaggttaatggacaactagactatgttagcctcatctgatgtagatatgcagtatcctgtctaaagatgtttcaacctctagctcagttctttcctgctgactggatgtggattgaaatgacaagtttaaaac

SEQ ID NO: 12509 - DNA, 579 bp, Zea mays
  Clone ID: 701180632_FLI
cttcaggatgaatgggtcgtgtgcaaggtgcaccacaaaggggccgaagaggccagcgccgccaagaagtccgccggcgggggcggcgaggagcactactactccaccgcaacgcccaacgtcagctccgtcgaaggcggcgacgagttcctcgtcgactccctgctggattactccagctacttcaactgcttcgcaaccggtggcttgcctctgcccagcacgacggccaactcagccgcagcacctgcaacgaacgacgacgactcctcctggagcatgcttcgtcacgcgccggcagaccagcaagcaatggtggggagctacagcttgcaccaccaggcaatgaaggcgaaaactgtaggcggcgtcacctccccgagtttctccgctggtttgccgagctcgccggtggcggactacgtgggaaacgatgcttctggctaccatacaaacaactattaattaacgatggatgatgagccgctgccgaaaatatagtgatccaataggtggtgttaggctattcacacttactgtacagttttaaaacaatgtcacatcaaattttgtttatgg

SEQ ID NO: 12510 - DNA, 779 bp, Zea mays
  Clone ID: 701180666_FLI
agcagttccagtggtgagttcctcacatgatgaatctggtgcgagaagcctcattcctcctactcaagatcaccagcagaggacaggaagagatccttccatcacgtccacttcacaagaattgtggggttctctatcgtcatacatgaggtcaaggcaacttggtccagtactagcaatgtcactggtagctctcattatcctaatgcaggtgaccatcatagttctactaacaagacccccccaggtccaaatggatcctcatgggatctggacgggcagttcagggtacagcaaagaaagcatagagtgggtgcagaagcgcctcagcttactaagcgaggagatgcagctcgcggaggcacacatggagacgatgaggcgcgagtttgcctggctcaggtcttacctggagagactgcagaggacgcggggcagcacatgacggcggcgcgtgtacatggcacaggggcacgagttcgctacgcgaattcggaggtgtatacaaatacaatacaatacaacccggaggtggtgttcagtgtttcttctgttgttacagatggtacagatgcaaacagagagaggtggattgttgtttgcagaggtatttgccgtaaggcagaactgcaagatcccggtatagcgttcgatgtaaatagctggagcttccccattgcgctggggtgatgtacaatgtcagggacgagtcactgcgatcacgctacggcggtgacgcgttatgttatttataaatttctgactgaattttaacttct

SEQ ID NO: 12511 - DNA, 1264 bp, Zea mays
  Clone ID: 701180711_FLI
catgataatgcaaaatatcctcttgatgaaaaaactcaaaaagagaaaaagaaaggaagcaagcgtcagcaaaatggaggacctcttgtccctgaaattgatgattttgatgaagatgaactaaaagaggctagctctatggttgaagaggagattcaataccttcgagtggccatgggtcatgaaaatgaatcttttgaggacttcgtgaaagcacatgatgcatgccaagacgaccttatgttttttcctaccagcaatagctatggtttagctagtgtggctggaaatgctgataagatttctgctttgcaaaatgagtttgaaactgtgaagaagcgaatggatgatgaagctaagaaggcttctcggcttgagcagaagattaagcttctgacacaaggatatcagatacgggctggaaaactgtggtcacaggtccaagatacattcaagcagatggacactgccgcaacagagctcgaatgcttccaagagctgcagaaacaggaacatctcgctgcttcatatcgaatccaaaatttgtctgaagaagtgagtaaacagaaggcactagaaaggaccctccagagccgctacggcgagctggtttctggtttccagaggatccaagaacaggtcgaggagcacaagaggcaactcaaggtacaagaggcggtagaagccgaaagtcacgctcaggaagaggaagctgcggcatcaaatcatgctgctgctgaggaagaggatgaaaggaaggaagatgatgaaaggaaggaagaggatggaaggaagtctctcagctctgaagagaaaccacagcagacaagtacggctaccgatgaagaacctgcaggaagcaaaggaaccaccgaggatcagatggacgtggacagcgggaatggagagggtggagttgtaggccctgtcccaccagcaccagacactgaagggggtaatgatgaagtatcagttcaagagatcagtgaagcccagcccttgccttgaagacggcgctcctttcccttcaagctccgctttcttctcccgcacctggcgatcttcacgatgttgttgttgcacagcaggtccggactgagtatttcctatttggttatatttttagtgcactataatatcgcaagcgaagctacaattggttgtgagctaaatttgcatatccttccctttgttgtattcccttgaacaatgaatcagaacaactgtttaccatttttctaaaggatcgacggcttatgtactc

SEQ ID NO: 12512 - DNA, 763 bp, Zea mays
  Clone ID: 701180715_FLI
gcatggcccacctgccattgttagaggcgttagcccacaggcggacccgaatccagaattcctgtcactgctcgaaatcgatccgatctccgctcgcgctgaagcctgatctccaccgggttcgcagcaggggcgcaggacctcgatcacgaggaggcaggggagcagcatccacaaccacaagccatggcggggagggccaacatccccactaacaactccgccctcatcgcaatcatcgccgacgaggacaccgtcactggcttcttgatggccggcgttggcaatgttgatctgcgcaagaaaaccaactacctcctcgtcgacaacaagacgacagttaaacaaatcgaggatgcgttcaaagaatttactacgagggaggatattgctattgtgctcatcagtcagtatattgccaacatgataaggtttctggtggatagctacaacaagcccgtccctgctattctggagatcccatccaaggaccatccatatgatccagcgcacgactctgtgctctctcgagtgaaatatctgttctctgcagaatcggtggcgtctgataggcgatgaaggcatccttgcgtagcagtacccttcgatgcatctattttgttatggtattgaaaagaagatggcacgtaccattgggtgcgagcgagccagcatgaataataatgagcttgcaaacaatgattggttgaactaaaccaacacaattttttttcataaatggttcgaatgatattttggtgct

SEQ ID NO: 12513 - DNA, 695 bp, Zea mays
  Clone ID: 701180736_FLI
atgccgtccgtgctcctcgtaactggactcacctggctctcgtggttcccgttcatcctctacgacaccgactggatgggccgtgagatctaccacggcgaccccaagggtaccaacgctcagatctcggcgttcgacgaaggcgtcagagtaggctcgttcgggctgctgctcaactcgatcattctaggattcagctcgttcctgatcgagcccatgtgccggaaggtggggccgagggtggtgtgggtgacgagcaacttcatggtctgcgtcgccatggcggccaccgcgctgatcagcttctggtcgctcaaggactaccacggatacgtgcaggacgccatcaccgccagcacgagcatcaaggccgtctgcctcgtcctcttcgcgttcctgggtgtccctctcgccatcctgtacagcgtcccgttcgcggtgacggcgcagctggcggccacgaagggcggcgggcaggggctgtgcaccggcgtgctcaacatctccatcgtcatccctcaggtgatcatcgcgctgggcgcgggcccgtgggacgcgctgttcggcaagggcaacatcccggcgttcggcgtggcgtcggggttcgccctcatcggcggcgtcgtgggcgtgttcctgctgcccaagatctccaagcgccagttccgcgccgtcagcgcgggcggccactgatc

SEQ ID NO: 12514 - DNA, 693 bp, Zea mays
  Clone ID: 701180794_FLI
gtgcaccatgcgtcaccagtcattctcaccatggtcagcagcttcaaaaacatggacgcccaagcctttttcccatctttcacgcccacctcggtcttcatcctcaacctttgccagaaatttggttaaatggacgaaccagaagatctccagaattttatggatgaagaagaaaataaagtcgaagagtgacgctcgctagatgctcgacgaaaggcgtgaaccgaagatttatcactattcctcaattgccgaattaaattttttttgaggtgagtgattcactgctcctccatgatagatcgaagcatggaatggtttcgtatattagatgcgataattttcttgtcgtggttaggatgtgttgtggctgtattaaatattcgttgatgtatcatatgtgcgatgtatgtttgaattggtgacgagaaggataggtctagtatttttattgactagccatcatatttttcaggattatgctagttttgtttattaagatgtagtcgatgctcgactctagtagtcattattttctatgttcggtgaccgattaaatgtcttaagttgatgaaaacgtagattagacaaggagtgcttaggtagacgtgtaggtctagtacgcttgaatcagttctatgtttacgacgtgaagtataacgatgatgcgtggaataaatttagtatttactc

SEQ ID NO: 12515 - DNA, 408 bp, Zea mays
  Clone ID: 701180880_FLI
cggcaggaggctgctgttcgagcgggaggtcctcgcgcgctgcgccgtgaacgccatagcctgcgagggagccggccgtgcgcaccatactcggagctacaagcagtggcaggccaggagccggcgggcagggctgcggcagctgcctctggacggtgacgttgtccggacgctcagggacaaggtgagcagggaataccacgagggtttcgtgatcaccgaggatcagcagtggcttctccagggatggaaagggagggtgctctacgccatttccacgtggacggcagacgatggattggcagggaattgacgatctttgtttgtgcattgagcttgtcatagaatattaatttatgttcctgatgtactcactctgttcaaaattttaaactgttctggattttt

SEQ ID NO: 12516 - DNA, 1249 bp, Zea mays
  Clone ID: 701180894_FLI
gtaaaaaaaatctttttatatatataggtgcaaaacctcttctcggcttcgagggagtcaagcagaagcagaagcgctgaagcagcgcgtttgcagactgcaaagacccctgtgaatttgtgatgtactgaggtgttgtccagccaacagtccttgctcccaagattcttccgtactcccccctccatcggaccatcctctaccatagatctcccgaactccgccgtaatcgggacgaatcccgcgcgtgctcttgctccctgtcgttctccgcggccggcgcgagctgccggtggttcgttgccgtcgacctcgtctggccgctcctctgccctgccagctgccggattcctgctgctggactggattgctgcgcgtggagtcgtgagtatagctccatctatcctgactgatacggatcgacctctcctctcgtggggtcatgaagacagatacaccatatacgtgcatgcatcaagagatataccgagtcattcaagtccaatattcgctggcagggatattcgaagcgaaaaggtgatatggggcacgatttctatgcttgatgctgaaaagaggctcttggcccatgccctacaagatcctgaaaaccagcattttgtcttgctttctgagagttgtgtgccacttcataacttcgattatatatatagttatctcatggagacaaacgtcagttttgttgactgctttgatgatcctggtccacatggagcaggtagatattctgagcatatgctacctgaaattgtgaagaaagattggagaaagggtgcgcagtggtttacagtgaaacggcagcatgcgattcttattctcgcggacaccctttactatgggaagttcaagcgttactgtaagccaggaaacgaatggcataactgctattcagacgagcactacttgccaaccctctttaacatggttgatccgactggaatctcgaactggtcggtgacgcatgtcgactggtccgaagggaagtggcatcccaaagtctacagggctgcggacacaagcttcgatctgctcaaggacatcgcgcatgtcgcgcagaggaggccgtgcgtgtggaacggcatgaagcggccctgctacctgttcgcgcgcaagttctacccagaggcgctggacaacctgctgaacatattctcgaacttcaccatcatctgagcgagcggtggatcggggaggggtttccgtcctccctcttgagtgctgcggcatc

SEQ ID NO: 12517 - DNA, 780 bp, Zea mays
  Clone ID: 701180970_FLI
ccgacgtgaagagtaagttacaagcaaaccctcttcttccgaaaatcaccatggttggcatctcaatgggtgatggtgcacagatgagcaaagccaacttaaagaagacaatggaagacttgacaaaagagttggagcaaacgagtgaagaaaatatgttcggtgatgaaaaagacccactttttgttgccaacgttggtgactactcaaggataacaaagattagctctgcatgaggctcgttgaccaacaggcgacagcaagggtgttgtactgaactgctaacgaagtctacagtccatgatactgatcttagagggctctactgatataatgatgcaaatcggaggtcatcagatcatatggacattcgactgtcgaccgttctgactttagaggctatccaacgtcaacagttacaagccaatctaaattttcggatatgatttgccaaaaggatgattgtaaatagaaaagtttgcagaatgtccaccatgcagttaggcgtgaagatctgaagcaacatgttgttggatttctaagatcttagctcgtaacagctgtagagtatggtggtatagcttcaggattgagatgggggggtcataggagtctgtcaggtgagcagagtcgaataaaatgatgtgggtagcatttttcttcactagctgcgtatcggatctgagtttgtatggcgagaggtacggtaaatgttggttcgcatataggtccttggattatttattgtatgcgatatggtgaaaagaggttgtaactaac

SEQ ID NO: 12518 - DNA, 706 bp, Zea mays
  Clone ID: 701181044_FLI
tttgtggtacatcaccagtgttgacataagctcatctgaaaactttctacaaggtggcggcaagcctctgtctctcagtgtgcagtctgctggtcatgccttgcatgtctttgtcaatggacagcttcaaggttctgcatatggtactagggaagattgaagaatcaaatacaatggcaatgctaaccttcgagccggcactaacaaaatttccatgctaagtgttgcctgtggattgccgaatgttggagtgcattatgagacgtggaacactggtgttggtggtcctgttgtgcttcataggctggatgaaggttcacgagaccttacttggcagacttggtcctatcaggtcgcccgagtgctacttgtgctaccgagtgctgctgtgcagcctatgctacctggtgtgtgactgcgtggtgactgcttggtgcttggctgcttgctgccgagtgtaagacgccaggaccaggaggcaggaccgccggagcagcgagtaggagccaggagcccaacctaggtccatgtggcgagcacagatgtgcagagaagataggcagacaacaaaatctaccttgtagttcaagtatacccttacccaaacccaatactttgggtacttgaaatttcaggtacctaaaatattcagctcaagttcggtttgacctgttagatacctgaaatatataaaacccgaactacc

SEQ ID NO: 12519 - DNA, 1258 bp, Zea mays
  Clone ID: 701181075_FLI
gccgcgctgctgccagccagctcagcctgtactgcactgccataggaggcattggagctgccctcatggcagctttcatgtaccacatgctgcggcgcactgaccagctcactggcctctgggtcgtgtccatcttctgtggccttatctggttcatcggcatctgccatggcctcttcacaaacaggcccagcagctcgtcacccaccaccgcattcgagcccaacttcttcaccaagctcagctacagcatgaccctcctccgttacccgcaggccattggcagcctggttgcggtgttcctgtcctctttcgccacaatgtgcatcttcaccagcggcacgctctatgctatcggtggtgtctgcatcaagccggtgctcgtgcttgcgctatggatcctctactttctgttccccttgatctcgctcccgctcctccacccgatccagatcataatccgcgcggacgccgtgcgcatgcagctgctcgggttcataatctgcctgttcgtgtccggtgccgggttctacttcaagagccacaggtggagggctgcccacatcatcgtcatcgccctggtccagagcaccgccaatggcatactgtacgcgttcggccgcatcctgctcctcgatgcctcgccgccggggaaggagggtgcgttctcggtctggtacgcgtttgttcgtgtcaccggtgccatgatcggcttcgctgcctcctccgctggccctgggcgcgcgggagggtcctttgctgctgcgttcctcgggagcttcctgggcatcatcgtgctgatcttcggcaacgtcagcaacatcggggcgctgaaggcggccgggcacctcaaggggatggacgacgagaagaggatgggcggtctcgggatggagaagggcgagggcatgggtagcgccgtcgctgattctggcgagagcagggggagggtatgatgatgactattcgtgacagtgaattcctgggaggtgggggagaaaaggattgcgttctgtggaggttgtgcttgtgagaaggatttgttctctcttttttttcttgtttctttggccgtgtttcagtgacactgttgatggatcccagtgctttgcccgtttgatgcatcatggtggtggtggtgatgatggatgacatagtggtagggggtgtgtgctagttgttaatgtgttatttattcttttgcttgcaagacaattgtaactgatgatcgttagatcatatggttcttccttcgttc

SEQ ID NO: 12520 - DNA, 419 bp, Zea mays
  Clone ID: 701181082_FLI
gtgcactgaagctggtatggctgcaattcgtgcagagagagattatgtagtccacgaagacttcatgaaggctgtgcggaagctaaatgatgcgaaaaagctggaatcaagtgcgcattacagcgcagattttggcaaagagtaatgtatgatgctggacagatgcataaggcgtgtatcatcagggagctctgtcagatgcgatgcaaaagcgaaagaaaccagctatttatgttcaggctccaggcagctccactttttcctgatattcacaattttagtgaggaggattgtcaagctgaccagtgggggaaatcagtcgagaatttagtagttctgcgccagatggcctttgcttctgtaaatcgtacgtaatctgcttccgtgcgtcttagtctggtaataactctggttggacc

SEQ ID NO: 12521 - DNA, 1077 bp, Zea mays
  Clone ID: 701181114_FLI
ctgttccaacagccagggcagaagtggttgattggactaagaacaatactacaattcagtcagtagaatccccacctaagtacatgtcagaggagagtccaacacttctgcaatctagccagaccacaacagtcttctctaaccaaattaacggcaatagtgatgggacctaccacttgtcattctcaagtggtaatgtgacagacagtctaccagattggcctgtggatgagttcttcagtaactcagaatatgttccaaacttaggcttctccgagcatggttcttctaagggtgataacgctaagctggagagtgctggtggatctctacaatgccgtttagctgaaggctccattgctgaggaactattaggacaggtgcctgggttgatcactgatgattatatgagccgggtacctgagaattcatggacagtacctgaggttccctcgccaccaactgcctcggggctcaattggcatgggaatttgtgtttccctgcatatgacagcacaatgtttgttcctgaaattacatccctccagaactcccaaaatcagttcaccgtaccttcgagtttcaagcgccggagaagagagtattgaggtgacgacaagatcactagatatccactgtccagtttaggccatcttgagaaaggtttcttgctgtaccaaatgacggagaaaggatatccaggactgggttatcattcaaacttcaacagaacaatccaagtagctaggtttgaagtgtgctgcaatgcttcaatgatgttcattttccaaagatctaagcttcgctagtgttggggtcttcttctccgcgaaggccctttaggcaaaaacaccttcagcaagacagtacaaaggcaggtgcaacatgaagatataagccgaagctacaatcaaaagagcttcggtttggtgtcatgctaaagacgaaggacgataccgacttaaagaggaaaatactgtatagcccttggtagtctgtattatgatcataattagttattaatgatataaatgtaattttgttcgggctacggctcgcgcctataaatagatgaac

SEQ ID NO: 12522 - DNA, 540 bp, Zea mays
  Clone ID: 701181182_FLI
cttctttctcagcccacctctctctttcacgcacgcctctctctctctccctctccctatctgtcttcctgcctgaggcagccatttcctcttccgatcgtggagaggcttggagtggaaggaggctgctggttctcggcacggcggagatgtctgaggtgtcggtgataaaccaggcggaggtggaggacgcgggcgccgggcagctgatggacctgccgccgggcttccgcttccaccccaccgacgaggagatcatctcgcactacctcacccacaaggccctcgaccaccgcttcgtctccggcgtcatcggcgaggtcgacctcaacaggatcgagccatgggacctgccaggcagggccaagatgggggagaaggagtggtacttcttctgccacaaggatcgcaagtacccgacgggcacgcggaccaaccgcgccacggagaccggctactggaaggccaccggcaaggacaaggagatcttcaggggccgcggcgtcctcgtgggcatgaagaagacgctcgtcttctacc

SEQ ID NO: 12523 - DNA, 736 bp, Zea mays
  Clone ID: 701181349_FLI
acaacggccaggtcaagatcggcgacctcgggctggcggcgatcgtggacaagacgcacgtggcgcacaccatcctgggcacgccggagttcatggcgccggagctgtacacggagacgtacacggagtcggtggacatctactcgtacggcatgtgcgtgctggagatggtcacgcgggaggtgccctacgccgagtgcggcagcgtcgtgcagatcttccacaacgtcacccggggcgtcccgcccgcggcgctcaagcggctcaaggacgccgagctgcggggcttcatcgagcgctgcatcggccagccccggaaccggccctcggccgctgacctcctgcaggaccccttcttcaacggcgtccgtggcggggacgacgacgacgacgccgcggcgctcgccgacgcctccagcgtcgtcgccgccgcgcccgtgccgcgccccaggagctacgtcgacgacctcgccgggctccggctggactgacctgaccgtccctcccagcgttctgcctttcatcagtaccgggattccggcgcgtgttagacgtgttttattagaagtggattcctggccggcgagcgactgcctgcaagtgtgtatagattattgtttatttttacgtctccccggcgattggctagttttcactgtacctgtaccaataattgttgttggctttgcgccagatgaagcgctgtatttgactttgcgtgctgattctttcaaac

SEQ ID NO: 12524 - DNA, 267 bp, Zea mays
  Clone ID: 701181365_FLI
gcggcagcattccgacgagacgagtcacgaatccggatagagcgccgccccccaacctgctgcgccgaccctgctcgccgccggcccgagtagagagagagagagaggagagaaggaagcatgacgacaatccgtcggttctgctgcgacgacctcctccgcttcgcctccgtcaacctggaccacctcaccgagacgttcaacatgtcgttctacatgacgtacctggcgcgctggcccgactacttccacgccgccgtcagccct

SEQ ID NO: 12525 - DNA, 760 bp, Zea mays
  Clone ID: 701181370_FLI
gcacgccttatcgccacacagacacagcacaacgcacggagtcagattgcgggcagcgctcgctaatcgccatagcctatagctgtagagaaactgctccgggaggaagtagacaaggagagagagagagaggtcaacagggcactgccggatccggagccaaaaaaaaacccagaaggatccatggctcccggagccggagacgactctgatcccgcctcttatatccacacggtgcagcacctgatagagaggtgcatgacgttcgggatgagcatggaggagtgcatggaggcgctggcgaagcgcgccgacgtccaacccgtggtcacctccacagtgtggaaggagctggagaaggagaacaaggagttcttcgacaagtacaggcagtggatctcggagaagagaagcgggagtacctcctagtcctagtagcacgggactcgatcgtgtctctctgctggcttagctcgctttaaattagcccgtgatgtgtattacgtgtgcttagttattttaggatttattattacttactgtgtttgattagggaggaataagcggtagggagggagggaggcttgtaatgtgattctctgtaagcaagcagagcagtagtcacctgtacggcgcgggctgtggcgttatgtgtacagggtaaagcagggaaagccatctcatcatgcgcagcgcagaactgtacgcaagtagccgttgctggcgtggcgtatgtatgtgtatacacaatttgccccct

SEQ ID NO: 12526 - DNA, 791 bp, Zea mays
  Clone ID: 701181412_FLI
aagcattttgcagtccagcagcagcagcccctctcgtactcctccgcctcccgcaatgccgcccggttccgcctccgccgccgccatcgccacccgcttcgcgacccactggatagctgacgccctcgccggcgacgagtacatagacttctccgtgctcaaggttctggtgggggcctcgtcgaagcccctcgcgggcgccccggagtttacgcgtgagcgggtcgcgctccggtgcattcaggaggtgtcgtccgtgatagccgccgggggtgacgccgcggacaccgcgggggtgcttagggttgatggcgcccaatcatgccagaatgtgctgtttcagcttatgagagaggttggtagccccggagatttggagaaggatttgcttccacatttcagtcaagacatccaggaatatttatgtaccgagaaatttatgctaccagaaacttccttccagatgttccaatcctgttgcgagagctcgaagacgcagaaaactctggtggacagcagaagaagaagcaatgttgaaggatgggatggcaaaattctctccacataatgatggtcaaatttcatggacccagatactgcaatatggccgtggtgtgtttaacatcgcgcgcctgccatgtgatttgagggtcaagtggaggaacatgcagatgaaggagaggcgggcagtctcttacacacacatataactgttgtgtgtcatactaaattactaaccatgccttcatttgtttgtgtccatctgcagatataattgatgtggcagatat

SEQ ID NO: 12527 - DNA, 1421 bp, Zea mays
  Clone ID: 701181470_FLI
gtcgaaacagaatcctgacttcgagtcttgtcttgtgggctgtgcctgtgacggactgacggcacagaggtaatggaggccgcgcctaccaccatcaccgtccaggtcaagttcgccgggcggacgatccccgtggaggtcccggcagcggcttccggcgcggagctgaagcgcctcctccagccgctgaccaatgtcctcccgcgcggccagaggatcatctgcaaaggcaaagtgctccaggatgccgcaagcctgagctcgatgcaagtagtgggcggatccaaggtgatgctcatcgcgtcgcaggggctccatcagggggatggtcctatcacaaataatagcagtagctcagcaacaactgtgagaaggccttcaaatgttaaggagaatcaaacacaaaagccagaggtagttgtcaccaaaagccgatctgagcgctggaagttaacaggtgttgttgcgctgcaagactgtgacttgaaggtaatacctgaagaagtctgggattgtggcacctcgatacgaatactagacattagctacaactgtatcaaggaaattccacacaaaatctctgctcttaaatctctaaataaattgctcctaactgaaaatgatatagttgatgatagcatctgctgggaaggtctatcatgtcttcaaaagctattgaatttatctttaagcgaaaaccgactggttagcttgccaccaactttgggttcactgacttctcttcgtgaactgtgtgttgcaaagaacaggcttgataacttgcctgtagaaataggactgctgaagcacctccaggtcctcatagcaaataacaacaggataacttcattgccttcatcaataggagattgtgaatctctcactgtggttcacctgtcatcaaatctcttaactgaactgccagagacctttgcgaaccttcgtaatcttaagaatttgcttataagcaacaatggccttacgtccttgccagcagcgtttttcaaaaagtgctcgcagcttactacactggatctccatggcacagaaatcacaaatgatgttcttcgacaggtggaggggtgggaagagttcgaccagcggcggaggcagaaacatcagaagcagctcgacttccgtgttggctcatctggtgtgttcgatgaaggcgcggatgatgataataggcgaaggtgactgcctgaaaattgtgagcataatactttgctacgatatttctcccaaagaaccgtagaaatgtacaactgaaaactacttctatggagcccgagatgtacaacctttttcattcagtcacgtagatagacacgtcaggaaaacaacatccttggaaagccatggcagataatgaggtaataataacaacgccgcactcatgcgacgcccccattgaccctgat

SEQ ID NO: 12528 - DNA, 770 bp, Zea mays
  Clone ID: 701181575_FLI
acgaaccaatcccattccgtcggccatggcgaccgccacgctgctgggctcctcctttgccattcccgccgcagcccgtagggcgtcctcctctgcctccacctccttgggcttcgccacgtcgcagctcgccggcctctccctctccgcgggcgccgcaactccaaccgccgtcgccttcctcccaaagaggcagcagctccagcccattgtcgcgcggcgggtgtgccctttcacgggcaagaagacgaaccgggcgaacaaggtgtccttctccaaccacaagacgaagaagcagcagttcgtgaacctgcagtacaagaagctgtggtgggaggctggcaagcgcttcgtcaagctgcgcctctccaccaaggcgctcaagaccatcgagaagcacggtctcgatgctgtcgcgcgcaaggccggcatcgacctcaacaagaagtgagaacagccaaactatggtgtggtggcacactggcatcgaccccagtttgatttgtgtaccataccaatcagtgtaggcagatcgaggttgcacatgctgtgggtctgtttagttcagcttttttctgaccaacttttctgaaaatctggatacgaggagaatctagctgtggggagaacctgagtatcattacgattacgtgtgaagaaggataaagttgttcatagggctcaagatctagaaattgacggattcctactattacaacaactcaaccgattatgtatttatattgattttggatggtttttgtcccaac

SEQ ID NO: 12529 - DNA, 968 bp, Zea mays
  Clone ID: 701181593_FLI
cacagtctaggaggcttcttccgctcgctcaggtaggtgtactgtactgtactgtagtaggttggttctccattcatcattcagctcacaggtccctccgcctccgccgtatcggagggagaggaagcggaaggcttggaaggagaagagaatggcggggcggcgcgcggaggaggagtacgactacctgttcaaggtggtgctgatcggggactcgggcgtcggcaagtccaacctcctctcccgcttcacccgcaacgagttctgcctcgagtccaagtccaccatcggcgtcgaattcgccacacggacactccatgttgagggcaagatcatcaaggcgcagatctgggacacggcaggccaggagcggtaccgggcgatcaccagcgcctactatcgcggggcgctgggcgcggtcctggtctatgacgtgagcaagcccaccaccttcgagaacatcagccggtggctcaaggagctacgcgaccacgccgactccaacaccaggatcatgctcgtcggcaacaagaccgacctgaggcacctccgggccgtcgccaccgacgacgctcggagcttcgctgaggcagaaggcctgtcctacatcgagacgtccgcgctggaggccaccaacgtggaggaggcgttccagctcatcctgggcgacatttaccgggccgtcagcaagaagcctgtggcgtccgacgaggttggcgccggccagggaggcgtcaaggaaggtaagaccatcgatgtggcgactggtgctgatgccgccgctcacaagaagcagtgctgctcggcttagaagttagaagaacccatgctggtggtctctcgttcagtggcgtatgtgttgttgtgatggttgtcgttgttgttttttttctcttcttccagtccaaaagtttgttgattcgttttgccagatagtacctttgttggagggataatcatgctcacat

SEQ ID NO: 12530 - DNA, 187 bp, Zea mays
  Clone ID: 701181622_FLI
atgacatgtttgctggtagctagaatcttgctcttggggtcctcgttttttgtttgcccttgaaagttgtatgcaaacaatgactcgatcatctgttcatcaaatctgcataacgtatgctgttgtaagatgtaataataataggagatgaaatgacaatctagatgggaatcattttttgtagctt

SEQ ID NO: 12531 - DNA, 1241 bp, Zea mays
  Clone ID: 701181690_FLI
atatcttgcagggagcagtggttggaaccattactggaaattgtcgattttatgatgcatcagataatctcctgaggtttgaaacacaagttgcagtcagtggcaagaaaaagtcttctcttaaaagaatcactgctttcgagttctcaccaagcaacccaagtaaattaatggttacctctgctgactcgaagatcaaaattcttgaaggaaccactgtgactcagaattatagcggactccgtactgggtcttgccagtcattggcaacattcactcctgatgggcagcatatagtttgtgcaagcgaagactccaatatttatgtatggaaccatgaaaaccaagacgaggcttcactgaaacacgcaaaaacgatatggtcctcagagcgcttctactccaacaatgcagccatcgcaataccatggaatggcccgaaacccagaaacccggtctctctggcctcccaaatcttgtcaccacaaggagataacttgtggtgcatgagtaaggctgtgaagtgcagttcgagtcagagcgaagattctgctatcaacagttttgtgtcaaggtttgctcctggtattttcaatttgaatcaggagttctcctctgagtccacttgcagaagttcagcgacctggccagaggaaatcctgccgtctcgctcgattcgtgcaattctggacgagtcgcagtacaagttcctaaggaactgtttccagagcacaccaaactcctggggtcaagtgatagtcactgcaggatgggatggcaagatcaggtcgttccagaactatggcttaccggcgcaccagtgatcaacagctggagcatctgctgaaactacaccggcagttttggcaacctcacatggcgtgaagagaagtgcccgagcacccagctacgctggtccagcgtgtggtttgttggtacaagacatcacatgctcagtgctcctcctgctgaattgtacatggaccagtgttgtacataatcaaacctggtggtcctttgagatctccgcgtcagcggttgttcatggcaggacccgtggattgtacctttttgtagaaaattttttgtgtgtagatcagatctctcactctccctttgccccccttatcaattgctcattgatatatatactacagaaatgttagtctcagctgagtgtaagttcccctccccattgtattgcgggaacagccagatatatatatgtgccactcaagtat

SEQ ID NO: 12532 - DNA, 230 bp, Zea mays
  Clone ID: 701181696_FLI
cggactagttttttctgaagattcggcgatggcggcgacgatccaatccgtgaaggcgcgccagatctttgacagccgcggcaaccctacagtcgaggtcgacgtgttttgctcagatggaacctttgcaagggcagctgttcccagtggagcatcaactggtgtatatgaagctctggagttgagggatggtggctctgactatttggggaagggtgtctccaaggctg

SEQ ID NO: 12533 - DNA, 348 bp, Zea mays
  Clone ID: 701181721_FLI
tggtcgccgccgacatcctcagggactgctccaaggccgtcgccaggatcatcggcaagcccgaatccggacacaacttcggcttcaacggatccacattctaagtcgactccagcagaaaccgaagatgatggtcgctgcgtccaaacatccagctcaatacataccaacaccactacatcaataaacgctgatcatgtgtcatccatcacccgcacgtccatggaaaatcccgctcgagcacgagacgcaccaccactagtttatgggctttgtactttcacctgaaagcatgcagtgcatgatggcatgtatctgattccaaattttattgaacttcattttttc

SEQ ID NO: 12534 - DNA, 490 bp, Zea mays
  Clone ID: 701181820_FLI
ggcaaatttcagacagacttgggaaaagcatgggcagcggagattgcatcgagaagaaaaacaaagtgatcaaacgatgctcattttaccacgtcggttccaagacaacttgctggcacagcatttctgttgaactttgcttttactagatgatacttcgaggtggcattgagacgtagggttgccttgggaatgtgaacttcaccacatttcttggtcctgccctgaccctgaggcatattgggcttgcgataccagggctctagataagtaagataacccactttgggtattggttgtagatgctcctgccaagggcagttagctggatccaacgggaaggttcagcaccagctggtggtgatgtaaaatccttcacttcatgaattactgtaccattaccgtttctcttgttaatccagcctcacggtttcggccttttttaatgtaattctattgttttcaagtataatgagcctgaatatttgct

SEQ ID NO: 12535 - DNA, 896 bp, Zea mays
  Clone ID: 701181836_FLI
gcggcggtggggcgctggttgacaggattctggacaagactgggatgaaggggaccgggaaatggaccgtgcagcaggcggcggagcttgcggtggcagcgcccacgattgccgcgtcgctggacgggaggtacctctcagggttgaaggacgaacgggtcgcagccgctggggtgctggaggaagaggggatgccggcaggcctgttggagacggttaatgtcgacaagaaggtgctggtggatagggtcaggcaagcgctctacgcctccaagatttgcagctatgcgcagggaatgaatctgctgcgagccaagagcgtggagaagggatggaaccttaacctcgcagagcttgccaggatctggaagggcgggtgcattatccgtgcgaggttccttgataggatcaagagcgcgtacgacaggaatcgtgagctcgccaatttgattgttgacagagagtttgcaagggagatggtgcagcggcagaacgcgtggaggtgggttgtggcacgcgcggtggaggctggcattagcacgccaggaatgactgctagcctttcgtacttcgatacctacagatcaagtcgattgcctgcaaatctgatccaagcgcagagggatctgtttggtgcacacacctatgagcgcattgactgtccgggttcattccacaccgaatggaccaagctggcgaggaggagcaatggcgcagccatttgaggaattggttggcatgagaaagggatgttttctgctttgtgtgatttctctctgtgggttatcttttgttttactattgttatctttatgcttctagatccaagtcgagtacttcaaataatgctgtactgtatggttggcaagtgaagaacattgtgtagcttcagtttc

SEQ ID NO: 12536 - DNA, 855 bp, Zea mays
  Clone ID: 701181840_FLI
ccgtgactacaaaatgctctgcagcattaaagcaaaaaattaacaaattccttgcatacaaaagggccggaaagagctttaatgctgaagtgcgcaacaggaaggactatagaaatcctgactttttgcagcatgctgtgcgataccaagaaattgatcagatagggacctgtttcagtaaagatgtttttgatccttatgggtacgataaaggtgactactatgatgagatagaagctgaaatgaagcgtgaacttgagagaaaggaacaggagaagaaaaggaatccaaaagttgaatttattactggaggagtacaaactccacatagtgcatcaataccgaagatcccaggtttggcgggtgtctgtacactaccggtacctacagaaggtgtacagaaagagactagaccaaacaagaaatcaaaatgggataaggttgatgatgatgttaagaatcatgtagttcctagtggacacgacaacttatcagcaactgcttctgtggcactcctgacttcagctaatgttggtgctggatatgctgcttttgcgcaacaaaagagaaaagaagctgaagaaaagagaagcgatcataagtcagacagaagatcgtagcaccacttttttttcattctgagcagtcagcgtatcatttagtttttcagtaacatagttttgtattgtgggtaaggaaaagaaggaaacagttaaaatcagtctgacgaaaatggttccagaaaagcccctctgagcgacttgttgtttatacaggtatcagaaacttaacgttttagaccaagaaaaagagaacagtgagcgttctgcacttctgccccccgttacggtggac

SEQ ID NO: 12537 - DNA, 769 bp, Zea mays
  Clone ID: 701181905_FLI
acccgatgcagctaggcttgcgatcgaatatggcgctgctgggatcatcgtgtccaaccacggcgcgcgccagctagattatgttcctgcgactatcagctgcctggaagaggtacgccgaccaaatccttctgtgattcagagcttcagagtcttcaggggggtaaaggcgaaaagcttgcttgtgcttcctggctttccatgttcctgtctgctgaggttttcactataaagtgcgacgtgaattcaggtcgtcagggaagcgaaaggccggctaccggtgttcctcgacggcggcgtccgccgtggcacggacgtcttcaaggccctggcgttgggagcttcaggagtgttcgtaaggacgacgacgacgacgcgcccactgcctgctaaaaacgctgctatttcgttcgagcccggcacctgacgctgttgcttggtgcgtgctgcagatcggccggcccgtgctgttctcgctggcggtggacggcgaggccggcgtgcggaaggtgctgcagatgctgagggacgagctggagctcaccatggcgctcagcggctgcacgtcgctgagggagataacccgcgcacacgtcatcaccgacagcgaccggatcggccgctcgcggctgtagaatcattgtgcagttcacctcaggaatgatgttggtctcgactgaactgtcctgattcgggatctatttgtagctcttgtgctctcattttacgttaggcaaataaggaagctgcgtgcgtatgtgtgactgct

SEQ ID NO: 12538 - DNA, 902 bp, Zea mays
  Clone ID: 701181916_FLI
gctgtaggccgagtacttccgccatctcctcaagcccgtgacgtagctcccctctgctctccacctgctgctgaataaacttacagccttagttttttctccatagcaactgaagtgggagaacatcccagtcgttcatcgggactttctgctggtagttctgtccggtggttgttttaatttattcatcatgggggacaaggtgaatccctggtgccattggcctaatcctcaatggaaattcaacactgagagttctgccggcaatctgcacccacctgatgtcgggcttgctaatgccgattcggtggcattgcctgcataccaccttaacgcagcacctatgccatttttcgcagcatcgtcgattgctgagagacctcttccaatgggcccgagacacgtcacgacattggcaccaagtttcgaatcgcctgcaccgtgtccctcgcgtaagagaccttcagtcctctaccagaaggaaactcatggtcccaccgcagctcctttgcggaggagcaaggggccactggatcctgtgccggagctccaaggtagcaacgagaccaacgtaaccgacgttggagcagaagaaaccgagggtgttcacgagaacacagacgagatcgatgccctcctggactcctccgactcggacgaagggccgcacgaactcgacagggccaggaggcagcctgctgcagagaacgagacctcgagcgtcgagtcggtggccagtgccgcaggttctgcgccgccggccaagaagaggaggctcagctcttgcacggacaggtccgtcgtcgacaccgccagttcggcgaggccggaccattccgtcgagcagaagcctctcgcgagcgactgcgacgcgcagtcgtgctgcgtcggcgaggtggtgg

SEQ ID NO: 12539 - DNA, 495 bp, Zea mays
  Clone ID: 701181948_FLI
caaagctgggggcaaagaaccagctttggaaccagagtctcatagaatagaggcgcctaaggttgtgcgctcatctacaatcatgtcagcatcgggacttagtttgctagctggaactacaacaccacctaaaagagaccagccgggtgctttcagcagagcaagttcaatgaaggaaggatcctctgagttaccgagtggtgtccgaagctcagcagaaccaagccccaggagatctggcggttcaaccctttttggagggcttggttttctaaggagctacaccagctgagacgtatgtgctcagatacgtgaatttttattcagactccatcagcttgagctgcatatgtaggtagtagaaaacatggcagttgccaaaaggatggctcccttttccaattgcgaatttttgtaggaacttaataccttgcagggcaatgcctcgagggttgtatattgcactggattatactagtagaatacatgtttggc

SEQ ID NO: 12540 - DNA, 985 bp, Zea mays
  Clone ID: 701181952_FLI
cgcacgcgaaatccgcccgcagctcttcgtccccggaggaccaagcctgcgcaccagagatgtcgtacgcctacctgttcaagtacatcatcatcggcgacacaggcgtcggcaagtcgtgcctgctgctgcagttcaccgacaagcgattccagcccgtccacgacctcaccatcggcgtcgagttcggggcccggatgatcaccatcgacaacaagcccatcaagctccagatttgggacacggctggtcaagagtcattcagatccataactagatcatactacagaggcgctgctggtgctcttttggtttatgacataactaggagggagactttcaaccaccttgcaagctggctggaggatgcgagacagcacgccaatgctaacatgacaataatgcttgttgggaacaagtgcgatctgtctcacaggcgtgcggtgagctatgaggaaggcgagcagtttgcaaaagaacatggtcttatcttcatggaagcctctgcgaagaccgcacagaatgtcgaggaggcatttgttaagactgctggagcaatctacaagaagattcaagatggtgttttcgatgtatctaatgagtcctatggaatcaaagttggatatgcaatccctgggcaatctggaggtgctggtagctcgtcttctcaaggtggtggctgctgcagctaatctgctaacgccgttaacaaatgcatatctgtcgtgtgtcacataccagctgcgctgtgaaaaatagttattgctgctccagggtgccttgttatttgacgcaccaatggatcctgtgcctgatcgacttgagagattcagtttatttacgtcaggtgtttataaactccctgtaaatcactagattcttcactgttttccgtcattaggcactcaacaatcgtgtgtccgtttgcatgtgtaaataaggcacatctacatattgtttgatatgatattaatttgtcctgttc

SEQ ID NO: 12541 - DNA, 861 bp, Zea mays
  Clone ID: 701181990_FLI
aaagggtgcatgatgggcaaaggagggcctgagaacgtcaactgcgtgtaccgcggcgtgaggcagcggacatggggcaagtgggtggcggagatccgcgagcccaaccgtggccggcggctatggctgggctccttccctaccgccgtggaggccgcccatgcatacgacgaggcggcgaaggcgatgtacggccccaaggcacgcgtcaacttctcggagagctctgctgatgccaactccggctgcacgtcggcgctttcgctgctggcgtctagtgtgccggctgccgcgttgcaacggtctgatgagaaagtggagaccgaggtggaatccgtggagactgaggaggtggtacatgaggtgaagacggaagcgaagaatggtgacttgggaagcgtcaaggtcacctgcgtcattcagtccgcggaggagactgtgctacacaaggaaggggacgtgagttatgattacttcaacgttgaagacgccgtcgagatgataattgtagaactgaatgctgataaaaaatttgaggcacacgaagaataccttgatggagatgatgggtttagcctttttgcatattagaaagcacggtcatggggggggggggggagtagtaggaatagcttcattctagatgatgctgatgagacatagctttatactatgagccaaccggtacaacaagttgtcctgtgtgttgagttcctgtactatagtagggatgagttcgtgtttaatgagctctcttggctgttaatattgcacatttgttcgggtggggtgaaccctaaattagctcaaggaaaaaggaatggttacactgtacaccgaataaatttttaggattgcatt

SEQ ID NO: 12542 - DNA, 1145 bp, Zea mays
  Clone ID: 701182008_FLI
ctcaaacgccaaacgcaacacccgccagcaggccacctgtgagcagcgatgagctcgtcgacgcccggccgcgatgacgacgcgccggacctcgtctgccagatcgactgcgtccacggcatggtggacgcgctctcctcagtccgctggaagcgccaccaggacgcggtgatggagctgtcggagcacgggatcgttctctccgtagaggagagcgggtgtctccaggccaaggtcttcctcaagcgcgagctgttcgtagagtacgactatgcgggggacgggaggcagcggttcggcctcagcctgggtctcttcgtcgactgcctcaacatcttctcatcgccaggccacgcgtccgccgtcgagatccgttaccctggccccgacatgcagcttctcctcaagtctgtgggctctgccgatgcatgcctgtacgcagaaatcagaaccaggattccagatacagtctcctgggattaccattttgagcatgctgggaatagtccagtcagttttaccgtcaagtccgccgtcctgaaagaaacgatcgacgacctcgaatggccaggttccagcatccagattcgaatgcaaccagatcctccaactgttatactaaaaggcgaaggtcatggcgacttgcagaccgaattcccctactatgcaaacaccgaccttctaatcgtgttccaatgcgagcacgaagtgtcacacaggtacaaatacaagttcctccgagcgaccacctcgaacatccccagcagtgccgtgaaggagaaccgcaggaccaaggtctcgatcgggaggggagggatgctgaaggtccagcacctggtgtcgcttgccaggccaggcatgccgtacttccgtagcattggtggagggaacgagcagacgagccggatcgcgcatatagagttcttcgtgaagcccgaagaagacgataacggtgcctagctagcgttttgtggagtgtgttatcggcatgttgtttgagtagttcatgtgaaactgaagccgggtcttggtttttgaaacggctagtgtcgtctatcatacaggcatcacgcttctaatcatgtggatcctgttactaggcacgcattattttcctaatcaggtgaaacacatgtttgtggcct

SEQ ID NO: 12543 - DNA, 594 bp, Zea mays
  Clone ID: 701182018_FLI
tgttcatttgttctgtaatttcctcactctggactttccatctgacgcatcttatcctttgtggaacaataaccaagaaagattctgctgcttctgttcctgccaaaagtaaatctgtctgaacaaacttgtttggctgaactattgttgcccttgattacatatgtgactgtcttggggatgcaactgtggagtctttgagatggaactgtcctttgtggaacaataaccaagaaagattctgcttcttctgttcctgccaaaagtatatctgtcacaaacttgtttggctgaactattgttgcccttgaatacacaagcctatgtgactgtcttggggatgcaactgtggagtccttgagatgaaactggatttacacaaaagtaaatcctttgtggactagcagtagttgcatatacatggatgggttgaagtttagccatcctggttcatattcatgtagtgcagttcatattcatgttgatatgcaatacaggttggtgtttgttcaacttgaatgcaagctaggatcggttgcttctatttatgtaactctgtattatctccagattagtatattcatatattcatct

SEQ ID NO: 12544 - DNA, 762 bp, Zea mays
  Clone ID: 701182047_FLI
ccgtgtaaaatgagcgcagtcgccaagcgtgtatctaagaagaggaagttcgtagcagatggcgttttctatgctgaactcaacaagtttctcgtgaacgagctttctgctgatggctatgccggtgttgaagtccgaaccacaccccaaaagactgacattatcatccgtgctactcatactcaacgtgttctcggagagaagggtagacgtatcagagagcttacccaggctgtcagcaagcgttacggcttcaaggatggtgccattgaaatccttgctgagcgagttatgttccgtggcctgtgcgcttttgctcaggctgagtccttgagaatcaaactcatttttggtcttgccgtccgaagggcttgctacagtatccttcgcttcgtcatggagagcggtgctaagggttgcgaggttatcgtctccggtaaggtcagaggtcaaagagccaaagcaatgaagttctgcgatggatatatgaagaaatctggttatgctaccacagaatatgtaaacagagctgtccgaaacgtgctcttgaagactggtattctagggctgaaggtagccattatgttgcctcatgatccccttggcaagaagggtcccaagaagcctctccctgatgtcattgaagttcttcaacccaagaaggacaatgttgtttccaagtaaatattgcctttggccttggcggctggtcttgttgtgtgtgcagataaaaaagaaacaactaaacttgccttgtacttc

SEQ ID NO: 12545 - DNA, 642 bp, Zea mays
  Clone ID: 701182124_FLI
ggagcttgaaggcatcttccggagcggtgtcgggtgggagctgctcccggtgcctctggacgaggacgagttcgaggtgctgccggggcacgtcgtggaagtgggcggcgccccgccggcggcgcttgcagtggtggagcggctccaggtggtggccgtcagaggcgaggaggttgtgcaggagtgcgctgtttgcaaggaagggatggaacagggggagctcaccactgggctgccgtgtgggcatttctaccacggggcgtgcattggtccatggcttgccatccggaacacgtgcccggtgtgccggtatgagctgcctactgatgaccctgagtatgagaagcggaggacgaggcgccattctgctggtggttcaacaccacagttgggtgcaccgatgcaggtttgagctagggctgattggtgctatgtcttggatgcaattccatcattccacggaagttagaaacctcactcattgaattggcgctaggatgtttacatgccagtagaattatacttctatgatcttgattttttcaggatttagcttttgtgctcgagagttgaatggtaagaacaattatcttaacaatttgtacatacatcttgtttcaatcaaattcttccttgcttttc

SEQ ID NO: 12546 - DNA, 545 bp, Zea mays
  Clone ID: 701182236_FLI
cgcgccatccgagtccatcagcagggagctgagccgaggtcagggggagatcgatttcggcgtcgtcgttgacaagaggcggcggctctcaccagaggaggacggcagcggtgggtgcagcaattctgcggtagcagatggagacaacagtcacgtggtgtgtgttcagagagggcggaacactgaggagacgagacccaggaaaggtgccaattcgagcaccactccttcttgccaggttgacggctgccaagctgatcttagtggtgccagggactaccataagaggcacaaggtgtgtgaagcgcataccaggacaacagtggtctgcatcaataatgtagagcatcggttctgtcagcagtgcagcaggtttcaccttcttcacgaatttgatgatggtaagaagagctgccgatcacgtctggcacaacataatggaaggagaaggaaagttcaaccgcaacctgctgtgaacgggaattccatgaatgaagatcagtctctaagtagcaccttattccttctgttaaaacaactttccg

SEQ ID NO: 12547 - DNA, 297 bp, Zea mays
  Clone ID: 701182246_FLI
gccgaccggccggctctcctccatcgcaacatttcaagggggccgggcgaaagcaccaaaaatcccagcgcagatcactcgaccgccgcctgctccatttggaccctcccaaccgacagcgtaaggctctctgcaacagagccggggttccggttcgacccgacggacgaggagctggtcgtccactacctcaagaagaaggccgccatcatcgcctttacaagttcgatccgtgggagctaccttgtaaataccctgtgatttataatcatgcgaaaaatagtgagattgttgttg

SEQ ID NO: 12548 - DNA, 1234 bp, Zea mays
  Clone ID: 701182262_FLI
atagacctgaacataattggtcagaagacagcttctcaggaccgcattgttggtgcacacttctttagtccagctcatgtcatgtcactgttggaaatagtttgtactcatcatacttcctctcaagttattgtggacctgattgatttggcaaagaaaatacagaaaacaccaatagttgttggcaactgcacaggtttcgctgtcaaccggatgttctttccttacgctcaggcagcttcttttcttgttgattatggtctggatgtgtatcacatagatcatgtgatcacacaatttggaatgccaatggggcccttccgattagccgatcttgttggttttggtgttgctattgctacaagaaagcaatattaccaaagttatcctgagcgaagttacaaatcaatgcttcttcagattcttgttgaggataataggacaggtgaatcttcttgtaagggcttctatgtatatgatgataaacgcaaagcctctcgagatcctgattttgggaagtacattgaaaaatcaaggaacatggcaggtgttatgcaagatcctaagctgatgaaactaacagataatgacatcgtggagatgatcttctttcctgtggtgaatgaagcctgccgagtgcttgatgagggaattgctctcaaagcatctgaccttgatgtagcttccattatggggatgggtttcccttcttacaggggtggagtaatgttttgggctgactcgcttggtgcgaaatatgtgtatgacaaactggatgcatggtcgaaggattatggggagttcttcagaccctgtgaatatttagctgtgagagctcgtcagggtgcatccctggctgccaaggttgatggtgtcaaatcgcgactctagggttttgttgttcatttgtccggacatgcttatacggactttggcctcaatgacattgagatgttgtgaaaacccttgagcaccaactgttacaatcatgcagttgcaaaacctgcacaagtgaattatacggaggcctagcgaagtggaaattgcatgtgccttcgtgggattgctgaggatctgcagcaggaatttctctgaaatattatgtgcagttttctgaagtgatgctgacaactttgcatagaatagttacagggagtttctcctagacgttttgcgggaatatactttgttgcagtggattcttatttttttaaaaataaaactcgtgaaatcc

SEQ ID NO: 12549 - DNA, 1295 bp, Zea mays
  Clone ID: 701182268_FLI
tccattcccaatttgcgttcccactcccaccaccgcttcttcccgtatcccttgtcctccctaatttcctctcacaaaaagcgggtgcggcttcctgccactcacctcggtctcggggggcgcccgtgctgctggtttcgctccaggggagaaggggcagagggagtagagcaggttaggtccgtttgcgttttcctttgcgggtttgtaggtcaaaagctccgcgagcactttccgctccacctcctcacgctcggaatcaaatcgatgcccccctgatttggttcctggtatcggtgcatgagcttgctccaagagatctcccttttggttcggcgtcaggggttctgtgaggtcacgcggcttcttcctcttggcgctcctcacatgtccgggcgcttcgatctctgcccactgcgcgagtgattctgctgctgcagcagctgttaggtgcgcgcgggccgttatggggtgaaccgaagcgttcctcgcagggctgtgggtttattacgccgcctgtttgcttccccgcaccttgtccttgtgcccatacttctttgcttttgtcacgcctgaaccgtgtcttcttgtagtatctgaggcttggcagttggcaagtacaaactagcaacttgcttaggtataaagtataaaccagtgtctggtgcagagcccaaaggggtcacgaatcgttgatgcatagatctgcttctggctgagataaggctctaagttcgctctgttgatggggcgaccatgaaccacgggaacgggatgttgaattctgtcaaggtggagaggtggccagcagcggtcgctgcaaatggccagcctaggccgatggatgtgctccatgacggcagctcgccgccgttccttaccaagacgtatgacatggttgatgacccaaccacgaacgccgttgtgtcatggagtgccgccaacaatagctttgtagtttgggatcctcatatctttgggacggtgctgctgccaaggtacttcaagcacaacaacttctccagctttgttcggcagctcaatacttatgtaagttgttaactctatagatgctttggtttcatgttctatgatgcggttgaggtgtgctggaatcctactgccttatttgtggagtgaattaccgttaggtactgtttgttttcgtgtttttaaccctgtaagcgattgcaccactataggttgccgttcttttgtgtttgtttctgcggctgcggaaccattcacggagggatgatgcggccgtgtgaaaggtcgttactttccattcaaaa

SEQ ID NO: 12550 - DNA, 662 bp, Zea mays
  Clone ID: 701182446_FLI
ggtgtgtctagtctctagtctagctaggcactactctagctcccaagtggccaagtatactcgccagagtacgtagagtgtagttgagcgtcgtccaaggatggcgtggacctcccgccgcatggtcgcgtccgcgctcgtcttcctgctgatgctgctcgccgcctcagagatggggacgacgagggtggcggaggcgaggcactgcacgtcgcagagccaccggttcgtcggcgcctgcatgagcaagagcaactgcgagaacgtctgcaggacggagggcttcccgtggggcgagtgcaggtggcacggcatagagcgcaagtgccactgcaagcggatctgctagtaattaactagccggctggccagcgcatgcatgcatgacgaccgacctacctgctgctggtccgtttgcgtttgtttcttgtcctttgggccttgctgtggcgcgcagtcttgcgtacgtgcgtgtgcgtgtgtcttttcagttactctcaattagtcatagcagacgtgcgtgggtgcgagcgtgtgtctcgttgcattgatgaaccggcttcacgtgctgtggttttacagtttctgatgtgttttagctaatctcgaataataaataataaggccccgtcttcacgcagttgcgtactgggtgcttacgt

SEQ ID NO: 12551 - DNA, 1363 bp, Zea mays
  Clone ID: 701182515_FLI
atcgacgtgcccacctcgttccgctctgacgtctgagatcgcgagatcgggaacccctgcccgtctgctccggaatctcgcccgcacgaaacttccccgacccatcgaccacaccagccccatcccctccgtcgctcccaagtcccaactgccgccacctctccgcgagccgacgccgacgcctacggtcaccaggacagagggacggctgctaccgcgggagtatgggggtggactactacaaggtgctgcaggtggggcgcggcgcctctgacgacgagctcaagaaggcttaccggaagctggccatgaagtggcacccggacaagaaccccagcaacaagaaagaagcggaggccaagttcaaacagatctcagaggcatatgaggtgctaagtgattcccaaaagcgggcaatctatgatcaggccggcgaagaggggcttaaggctcaggtcccacctactggagcaggtggtcccagtgggtcttccttctatggagggaatgcatcgacattccagttcaaccctcgcagtgcagatgatatttttgctgagttttttgggttctcaagcccattctcaaccatgggtggcatgggcggaggtgctgagagaggcatgaggggctccaggtttgggatgttcggcgatgacatatttgggtcccaccctcagtttcctggtgaggcatcaatgcatgttccacagcggtctcagaaggttcctccaattgagaatcggttgccatgcaaccttgctgatttgtacaaaggtaccaccaagaaaatgaagatttcacgagaggttttagatgccagcgggagaactttggttgttgaggagatcttaacgatagatataaaacctggatggaagaaagggacaaaaataacatttcctgaaaagggtaatgaggctcctcatataattcctgcagatattgttttcataattgatgagaaaccccatgatgtattcacaagagatggtaatgatctggttatgactcagaagattactttggctgaagccttgacagaatgtactgttaatataacaacattagatggtcggaatctgacagtgcagataaataatatcatctaccctggctatgaggaggttgttccccgagagggaatgccgattcagaaggattcttcaaagaagggaaatcttaggatcaaatttagcattaaattcccctcgaggctgacctcggagcagaaagcagaaatcaagaggctactaggttcataaggagcatgcacaaccttttttttttctggtgacgcaatgctgtatccagtgtacattcagatgttaaatgtgaataccagcaaagtctcggtttcctt

SEQ ID NO: 12552 - DNA, 2144 bp, Zea mays
  Clone ID: 701182558_FLI
gtgattttgaggacaccacactccaaatagaagaattgctagacaaactaagtgtctcattaactggtgaggaacttgagattattggcaagctctaccagcaagctatgaaactggaagtggagttcttttcttctcagcttatagaccaacctgttgtagctccactttcaagatactgtgatccaaaatataaactcttgatcttttctgattttgatttgacgtgcactattgttgattcatctgccattttggcggagattgcaattttgtcattccaaaaggcaaatcaaagtgggattgataataacctcgaccgtgcaaaatcgggagacctgagaagttcgtggaacatgctctctaagcaatacatggaagagtatgagaaatgcatggaaagactacttcctccagaagaattcactagattatgataaactgtataaaggcctggaggtgctagctgagtttgagaagcttgcaaattctagggttgtcgactctggtgtgctgaggggaatgaatttggaagacatcaggaaagctggtgagcgtcttattcttcaaggtggctgtaaaaatttctttcagaagattgtaaaaacaagggagaacctcaatttggatgtccatattctttcctattgctggtgtgcagaacttataagatcagccttctcatcagccggttgtctagatggtttgaacatacattcaaatgagtttgcctttgaggattctgtttcaactggtgagatcgacagaaagatgcagtctccgctagacaaagttgaaaagttcaagagcatctccaatataaacagtacagtgccattcctatctgtttatattggagactcggttggagatttgctctgcttattggaggctgatattggtatagtcattgggtcaaccacaagtttgcgtagggtgggcaaacagtttggtgtttcttttgtcccattgttccctggtctagtagagaagcagaggcaactggcggaggaagatgcatccgtattcaaggcacggtctggagtcctctatacggtttctagctggtcagaaatacacgccttcgtactgggaagtgatttcagctgatggatgtgctgcttcttttcttccattttttttccgcttgagaagcaaaattgccggccgatgctgatgcacatgatacgtgaatcctcaatgtggtcattttatgaaagccacatgtcaattctggctaccagtatgtatgaatgaataccgataccagtttgtggtgtggaatgggttgagtttgtacccttgaattgtgatcaatgtttcattgattcgtctgtccttgttccattcggggctaatttctgggtggttgctggcattatactgcaccaacaacaacagtataaacatagtggtatatatcccaagtccaagtgtaacgacgactgcataaatgtagagatgtttttttttttgaggcaaacgagcaatttctattagcactaggaatcgctgtacaaaggcaagagaggataaaaagataagtgacctagcccactcgaggcagcaatgcacttgtgctgcttcggctatctcatctccattcctaaggcaaacagccttattcctttccgtagtttagcatggacaaagacagaaaaggaatgagaaaacaagagaaaaatggaggacacaatggcagccaagacatccagcaagagtcctcatgaacctccaagaagagccttcagtaacttcttcagcgtatccacaatgctcgaaaacgaaggccgctgccttggatcgtcatcccagcaggcttccactagagcagcaagttctggactggtatctttcggaatcggaagccttctgttctggaacgctacagctcctactacctgcgcagggcctaggccactccatggttgctgcatcgtcaggagctcccacaagatgacgccgaagctgtaaacatcgcacttctcgttcgatggctcgccgcgcagaaactcaggcgccatccattctggtgttccagcaactgatttggatgatatgaaggtgtttgccttaaatctggacaggccaaagtcacctaccttcacagaccagttccggtcgaccagcatgtttggtgtctt

SEQ ID NO: 12553 - DNA, 660 bp, Zea mays
  Clone ID: 701182651_FLI
gcagtgaacaagtcgtcggccgggacgaagaagtcccggaagccgtacgtggtgagcaggccgcgggagaggtggaccgccgacgagcacggccgcttcctccacgcgctgctgctgttcggccgcgactggaagagggtccaggcgttcgtcgccaccaagacgggcacgcagatacgcagccacgcccagaagcactttctcagagcggacaagaagctgggcctcgccgtgccgccgccggacgtcgagacggttcagctcccgttgtctccggacgacctgcgcttcgctcaggtgtacaggttcgtcggcgacgtcttcggctgtggcgcgatgtggccggtcgaggcgcagctgcagaggctgctgggcgcggaccctgtagtcgtggacaccatcctacgggtgctggccaacctccaagacaacttccctccctgtagcttgtaggtcgacaatattttgtagccagttacgttatggcgggattggttttgaatcctgtgattacaaatttcctgctagataaaaaatagggatttttacgtcactagttctcaaagtcgatcggtacgagtaaaccgatctgtgctagacatgtcctcgtctaagggcctatgcaggaacttcatagaaattatgtgcaaattttagaag

SEQ ID NO: 12554 - DNA, 617 bp, Zea mays
  Clone ID: 701182722_FLI
cacgtctccagcaccgggccaccggcggcgaggtcgcgcgagcgcaggcaggggtggtactgggaggggaggaggggaagaaggaggtgactgcgatgtcgagccggttctggaggtggtacgcggaccggcagttccacaagtgggagaagacggtgctgtgggacatggtggagccctaccgcccgccgcgctccttcgcgccactcgtcggcacctacgtcgccgccttctacaccggcgtcgtcggggccgccgtcaccgagcagctctacaaggagaagtactgggaggatcaccccggcgaggcggtgccgatcatgccgcccaagttctactgggggccttggagggtgatgaacggagaagttccgcgcttcattcagccgcccgacgaggccaagacggcgtaggagcttcgagcttgcttcaaaacttttcagaagaagcatgtatctggtctcgatcgaaaaaaagaaattggagccctgcttttgtgcctctcccactctcctggttgtacgcctgtacctgtctgtctggaatacacgagtaagataagatcaggagaactgaagacctcaaataaagaaaaaaatcagaaaacgttggcatgg

SEQ ID NO: 12555 - DNA, 498 bp, Zea mays
  Clone ID: 701182729_FLI
gtaagattctgtgttcaaccatctcaatcattcttccggtagtttgagccttcttcacttgacaacctgtcacagaaatctctcactcaagaatcacataaatacaagattcccagattaaataaatcgttatatccatgaagacagcaactgctgcatttctaagctgaaagtttcaattattgatatttttgcctaaagataaggaaaggtgacaggaatactgtacatgaatatcagtatgctgattgcaactcaccggttaagcatccaggtcactgttaataacactatgtaccacaagagctgcttcaagtgctgccatggagggtgcaccatcagcccttctaactacattgcgcacgaggggaagctgtactgcaagcaccaccacatccagctgatcaaggagaaggggaacttcagccagcttgagaatgaccacgagaagacatcacaggctgggtcactggaggaggatgatcaatactcttgttc

SEQ ID NO: 12556 - DNA, 633 bp, Zea mays
  Clone ID: 701182736_FLI
gttttttttgtttgtctgtagattgagatgccgatcgacaaggcaatggagacactgctgcggttggggctggtgattgagcttcccactgatggtgggtcgagcgtgattggtctcccatgctcggaggcatacaggatcctgaaaagccgttgggacggcttgctggaacaagatacagaacaaggtagctgcggacacatgcatggcgatgatggcatgtagattatatatgtctaaaaaaagaaagattacatatgtgtaaaaaagaaagattatatatgtgtggtgatggtatacaagaattattctcgtttgtgcaggctgattagaacgagacatgtacgttggtggcttggagtggagtgggatgggatgccgtgctggtacatactcgacgcgtcggcaaagctcactcttgtttgtatgtatacgtaccagttgttgcagcaagtgtatatgtgctagctacgtgcatgtataatcgtgatctagtttgttgtacacaaacgattgcagtgtatgtatatgggagcacatgtttttttcggaagactagccatgtgtctgtaagtttttctatttgtaagttggtttccatttataaatatagagcataaacactgttctgtt

SEQ ID NO: 12557 - DNA, 825 bp, Zea mays
  Clone ID: 701182766_FLI
cgccacctctcttctctcctcggccctcgccactctcactccgccacgccggagcacgccgctgcggcgcgcctgcgcccgctacacacgaggggactatggacacggtggctccccgcctgagtcgctcctcgacgcgatacgggcccatcagcagcagtgctgcctccttcagtgggcccgtccggaagtggcgcaaggcctgggtgcccctcaccggcaccggcaccggcaccgccgggtccgggggagggagctcacgaggagacaacaaggtggttctgtttagatggacgccggtgaatggttgctcaggaggagggggaggcaccgacgggggcatggagctcgctgctgcgggggcctccacctgcaggcggcgctacgtcccggctgcaggggaggcgcaaagcaccaccaaaaagggcaccagcagcgagctcaacttgaacctcgagctggaagacccagacgacgacactgatgccgacatgagcaccgacgagccacgcgatgtagaagataacagcgcccgtctagaaagccgcttgaagcggaaagcattttagccgctggtcacctagagatgcggatcggcctgaatcgtctgccctagctaggcggattttgtgtaacataatgtagcagcatgtaacttgtatccgccacctcgtcgtccttcgtctgttccagtttagaacaatggcattgtccatgactgttcaagtccaagtgctcatgttatatttcatagctgttggttatgacttgccactttgtcctgtacgaaatattgtcatggactttgttctagtgtgtaatgct

SEQ ID NO: 12558 - DNA, 652 bp, Zea mays
  Clone ID: 701182767_FLI
ccctgccacggcgcggacacagagagtggaaaccggaagggaggaagagagatggattcctccacctcggcggcggcggcaggggaggcggccttgccgccggaggacgacgtctgctccgtctgccacgaccgcttccggatcccgtgccaggcgaactgctcccattggttctgtgaggttgcaagacctacccttcttcatccgaagactgttcagagaactaatggacccccagcggaccctcccactcgtgttcagggcgcggatgctgatgatggcatgctgggcctctttggattcgtcgatgacctgctcatcctgctgatcgtgttcctccacctcgccgcggtgtaccggtcgttgctcctgtaccgccacgggggccagtagaagtcgctgtgcataaaccgtttgttaagctggtttccatgtggagttctctgagatcgcagcagcggatttggaagatcgccgactcgccgagtagatggcaatgtcacggacggcttagcctgtccctgctctgtaccattctactacgcctgtttttctgagactctgacacggtgaactgaactttggttggttgatgcaagtgaatttcccttcgttttactcgtcaggaaaagaaagggaaagagtttgcgtt

SEQ ID NO: 12559 - DNA, 874 bp, Zea mays
  Clone ID: 701182780_FLI
ttggtggagaattttgtaagataaacatctcgggctgaattgggcgagacggctcaaaattatttcatactggaattgccttggagaaatcagcagggctcgtttttaactctttcctcttgacgcggattagatatatgaccttgtatatatcttatgacgatggattgccttgttgggtcaggaagaagaggatgcggaggaagagcactggccctgactccattgccgagacgatcaagtggtggaaagagcagaaccagaagctccaggacgagagcggctccaggaaggcgccggccaagggttccaagaaagggtgcatgatgggcaaaggagggcctgagaacgtcaactgcgtgtaccgcggcgtgaggcagcggacatggggcaagtgggtggcggagatccgcgagcccaaccgcggccggcggctatggctgggctccttccctaccgccgtggaggccgcccatgcatacgacgaggcggcgaaggcgatgtacggccccaaggcacgcgtcaacttctcggagagctctgctgatgccaactccggctgcacgtcggcgctttcgctgctggcgtctagtgtgccggctgccgcgttgcaacggtctgatgagaaagtggagaccgaggtggaatccgtggagactgaggaggtggtacatgaggtgaagacggaagcgaagaatggtgacttgggaagcgtcaaggtcacctgcgtcattcagtccgcggaggagactgtgctacacaaggaaggggacgtaagttatgattacttcaacgtggaagacgtcgttgagatgataattgtagaattgaacgctgataaaaaatttgaggcacatgaagaataccttgatgg

SEQ ID NO: 12560 - DNA, 228 bp, Zea mays
  Clone ID: 701182828_FLI
gcaccatcatcgtggccaaccagctcccgatccggtcccaccgcccggagtcgccggaggagccctggaccttcgagtgggacgaggactccctcctccgccacctccaccactcgtcgtcccccctgatggagttcatctacatcggctgcctgcgcgacgacatcccgcaggccgagcaggacgccgtcgcgcaggcgctcctcgagacccacaactgcgtgccgg

SEQ ID NO: 12561 - DNA, 166 bp, Zea mays
  Clone ID: 701182837_FLI
agaggaggctagggatagagcagcgtcatcgcaccgctcgccggcgagccagatcatcagtgaggaaggcagcgatggcggtggtggagctgtgggagacgctgaagcaggcgatcgttgcgtacacgggcctgtctccggcggccttcttcacggctgtggcggt

SEQ ID NO: 12562 - DNA, 792 bp, Zea mays
  Clone ID: 701182842_FLI
ctgttcactgttctactgggacgaccccaaatccccaaatcgaaaggggccgtccggctcagggtttctcgacggctccttgccctctccgccatggacgcacagcgagccctccttgacgagctcatgggcacagctcgcaacctaacggaggaggagaagaaggggcacaaagagctgaagtgggacgatccggacgtgtgcggcccttacatggttcggttctgtcctcacgaccttttcgtcaacaccaagagcaatatcgggccgtgctcgaggatccacgatccgaagctcaaggaaagctttgagaagtctcctaggcacgatacttatatgcaaaggtttgaggcagagcttgcacaacaatgtgagaaattggtaatggacttagatagaaagataaggcgtggtcgagaaaggctggctcacgattctgctgtgccaatgccaatccctggaaaattagctgagctgctttcagtgcgaaaagaacaggtgaagaagctgctggagcaaattgaggagcttggtgaggctggtaaagtggatgaagctgaggcacttatgagaagggttgacattttaaacgctgagaagacagctttagctaacgaagcagacaacaaagtagctatgcttgagaagaagatggaactttgtgaaacatgtggatcattcttagttgctgatgatgctcttgagagaacgcagtcccatgtgactgggaaacaacacattggttatggcatggttagggatttcctggcagaatacaaggcagcaaaagag

SEQ ID NO: 12563 - DNA, 419 bp, Zea mays
  Clone ID: 701182855_FLI
gcagccttcgcttcgctttcctcgcagcgtgaccgactgaccgcgaagccgccgtgaaccctcctcatccccgtcccccctgctccggcttcgccgggctcctctctcccacttgcgccaacattcaagccccgaccccaattcacatccgaggcgctcgcccctttccatctccatcgcccacgcccacgcccgcgcgtctcgtgtccacgcctcgccgcgacttctcccccctaaaccccgcgagaggccgaggtacatgagagagtgatcggcctcgccttcgcgcccacgctcgcgccgagagtgtgatgggcaacacgtgcggcgtcacgcttagatccaagtacttcgccagcttccgcggcagcgcgtcgcagcgccgtgacgcgccggggtactcacctgtcgccacctcc

SEQ ID NO: 12564 - DNA, 676 bp, Zea mays
  Clone ID: 701182906_FLI
accacatcaacccaaaccctatctcgacggttccacttccaccgccgaccccaaccccatcaatcgtcatccaccgccggcgtgacaaacggcaatcctgccgccacaaccgcgtctgacatagatccactcttccccacaggcccctccttcctccgtccgctggcgcgctactgcttgagcgtggagggtgtgctgcgggttagccttggtcgcttcatcatcttcgtgttgtgtcctatgcccccgcttcatctgtcgtatcccccagcgcagcccctccctctctccagtctcctttctcgcatcggcaatcagcttggcatggccgaattaatggcggtctacccatggcaggtgatggcgggcttcctcaccctctccatgttcgtcatgctcgaaaaaatgatcaagcacgaccacttgtctcccatcaccgagaactgcgaggagttcttgatacaaaagaataccctgaagggcccgagatctccagatggtgacaacatgcttgctcttggaaagtagaggaatgtaaggattgttttcaagactttgtacatgttcatttattttctgggcacgtacttgaaaccacatgtagcctgcatcatttgtgtgtatttaccaacaactaaaatgtaaacacgacattttcatagttgagtacaggaat

SEQ ID NO: 12565 - DNA, 1068 bp, Zea mays
  Clone ID: 701182975_FLI
gtaaactgctcgtgcaatgatgactctgatatgggtggagctatgttcagcagcaaagctgaaacaattgtggacgagtacaatcgtctcctggcaagccaacttgaaactcagagagagtattatgagggcctgttgtctgaggctaaaagaaacaaggagcaccagatttctgaagctgctgataaagctgtaagtgataagcttgaagagatgcaacttaagctcgagaatcttattgtggagaaaaagaaagttgcagatatgaacgaaaaactcactaggagccaagacatgtggcgccagacactaagagatatagaggaaagggaaagagcacagttgaagtcgaaggatgaaatgattctcgatctggaagaacagataaaggatttcaaattttccatcaaactgcagaagtcaatagagaagaacgatggtgtcaagggtggtacgctggttccactccctacggtttcagattctggaggcaagggtaaaaggtcatcaagaacaagcaagaggaggaattagtatcctttgctgagtagcaattagtcttgactggaacagacgtatacgaaccttattggcatgtatttactagcctgttatgatgaactacagcgtgatgtttgatttgtcacgaaaattagtacgatcataaactgcttcgaagatttgaacttggatactacatgtggaaaatacaatctaaatcgaagtacagccagttatttcgtaaccacatatagccaaatcttgaagcgtttcctgtcaaacggtagaatacaaacaagattgcacatgaaactttgacagccagttagtcactccatggtttcagaacaagcacataaccatggtttcagaacaagcacatgaaggatgggatcatcagatgtctgagtcgtgcgtcgttcctgccccctccgcgcgggcgcgcgccgctcacctgcacccagtaaatattagggacaatccctgtatggcatcaggaattatattttgtgccactggctctacatgtcatccacgtaataaatatctcctatatgctattcaatg

SEQ ID NO: 12566 - DNA, 439 bp, Zea mays
  Clone ID: 701182981_FLI
gtgcggagcggggctggacgcgacagcggaggcgatggtgcccgtgggctccacctgcgcagctgcggggccgcgccggggggctgcaacgctagccgtgatgcctacaactcggccacgcccagaggggaggagggagggcagctgtggcaggattgggcggtggtcacggaagctgccgaggcctgcgccccggggacggggttctcctgtcttataactcttctccggccaggtgaggccaggcgagcggcggcggtgcgttggggttgtgcctgagccaacacattgaagatatgggatcttaaccagactaattgcagtggattatctaccgattcttgccgcctgactctgaatggtcataccaacgagaagaattttgtagggctatctgttcatgatggatacataacttgtagtaagaaaacacttcatt

SEQ ID NO: 12567 - DNA, 935 bp, Zea mays
  Clone ID: 701182983_FLI
gcttggcacatctgcaccaagggagactgctgcagaggcaagtaattttcgcggaactagtgtctgtttaacctccgaagtgcagtcaagcgatgagaaacccatacaactggttgaagacatccttgaagaatttgaagatgatgaggaaagggacttctcttacttgctggatatactgattgcttctggaattcatggaactgccgaggatcaaatgtacaaggtgtgtcagtctctcgaccaccctgctggtgatgacgtatttgagaagctggaaaagaagtacaacaaagttgttcagtggtcaagatcagacaggaagcttctattcgacatggccaacacaatactatcacagatccttgccccgtgcttgaacatgcaaccttgggtctataccactaggaacttggccccactttggggcccagatggtcttctggagaaagtcttgcagatgctagttcagagacgggaacaccttgcacccagtgagactaagccagagaagaaaggatttgatccgaagtggccaggtttagcagactgcatcgacagggcaggaagggacattgagagaatggtaaaagatgacctgttggaagagctggtcgttgagctactgtccagttaggtttccacaattccacggccgtagtaggttttatcatagcagtacagattctttgttcttttgtttagtttttttagtcagttgtagttgttcctttggtccctgtccctgctatcactgctattttttttctcttcgttgttaaagcagtgggggagagttttttttttggtctagtcgccgtgcttccggtggtattatgacgtgaattccattggattagaggatctctgtagggaaaagttcttttctacctctccataaagagtaccttttgaagtgaggtttgtaagaatat

SEQ ID NO: 12568 - DNA, 572 bp, Zea mays
  Clone ID: 701182986_FLI
gaatttttttaacccaaaccgtggcttgtatacaacttctcaactccatgagtattttggtagcaaaacattgaacttttcatcaaaaagtgtatttcaagtccacttacatgttcaacagggtgcttttggcaaggatgctttgtttggatttggcctcacaacatattcgttgcttggactaggagtgcttggagggccactgtctcttccttggggtttgtacgtgctaatatgtcagagaacacccgagaaaccatgcttgaacgacgtgagcgatgttggaagttggaggagagcggccttgatagcttcagtatttcttgttgttttgacgctcattccgttgtgggatgaacttgcggaggaactaggtgtagggcttgtttcttcgttctgagatgcggtgcttaccgatagaattaggccgtgatgtagttcagttttgtgttgaaatgtagcttcccacggtggaattgttgtaaaggtatgtggaatttccggattaggtgagcaatgatatcgcttatgcgagtgtaatgaaattgtgccaactgccaagtatagacttt

SEQ ID NO: 12569 - DNA, 1964 bp, Zea mays
  Clone ID: 701182994_FLI
aacttaaaaggatatcagatattgatcgtctaacacatagtctccgaaagaaatcagctaatctgcagcctgttgttaagctttatcagtcctgtagcagaatcccatacatcaagggcattcttcagcaatataatggccaattttcaacattgataaggtcaaagtttcttgaaccgttagaagaatggatggcaaagaatcgatttggtcgtttttcttctcttgttgagacagctattgatcttgctcagctggagaatggagagtacagaatatctcctctatattcttctgacttgggtgtactaaaggatgagctttctgtggttgaaaaccacataaacaatctgcacgtggatacagctagtgatctggatctttctgttgataagcaactgaagctagaaaaaggatcccttggacatgtgttcagaatgtcaaagaaagaggaacagaaagtcaggaagaaactcactggcagctacttaatcatagaaactcgtaaagatggtgtaaagttcacaaattctaagctgaaaaatctaagtgatcaataccaggcattgtttggtgagtacacaagttgtcagaaaaaggtggttggtgatgtagtgagggtttcaggcacattctcagaggtatttgaaaattttgctgcagttctgtcggagttggatgttttacaaagttttgctgatttggcaactagttgcccagttccttatgttaggccagacatcactgcgtcggatgaaggagatattgttctactgggtagcagacatccttgtctagaggcacaagatggtgttaactttatacccaatgattgcactctggtgagagggaaaagttggtttcagatcatcactggaccaaacatgggaggaaaatccacatttataagacaggttggtgtaaatgtattgatggcacaagttggttcctttgtaccttgtgatcaagcaagtattagtgtgagggattgtatttttgctcgtgttggcgctggtgattgccaacttcatggtgtatcaacttttatgcaagaaatgcttgaaacagcatccatcctaaaaggcgcctctgataagtctcttataattattgatgagctggggcgtggaacttccacatatgatggatttggtcttgcatgggctatctgtgagcatcttatggaagtgactcgagcgcctaccttgtttgcaacccatttccatgaactaactgcattagcacatagaaatgatgatgagcaccaacacatttcagacatcggagttgcaaattatcacgtgggtgctcacatagacccattaagtaggaagttaactatgctttacaaggttgaacctggtgcatgcgaccaaagttttggtattcatgttgcagaatttgctaattttccagaagctgttgttgcccttgcgaaaagcaaagcagcagagttagaagacttttctactacacctaccttttccgatgatttgaaagacgaggttggatcaaagcgcaagagggtatttagcccagatgacatcaccagaggagctgcacgggctcggcttttccttgaggaattcgccgcattgcctatggatgagatggatgggagcaagatattggagatggccaccaagatgaaagctgacttgcagaaagatgcagctgacaatccttggctccagcagttcttctgaagctaattaatccccgcgtgtatggaggcaagaccataagagaacctcgctgatgctaggatctcctgatccattttgttaatacgcatcagcagatgtactctagtctttaggcttagccgacagtgcaacagggaaaaccatgtgcatatgtaacgcggcggtagtgctgcactgctgctactcctgcataccgttcgggtgcagttactctgctctgccgttctgccccgtctgtgattgcacgccgtcctttac

SEQ ID NO: 12570 - DNA, 608 bp, Zea mays
  Clone ID: 701183035_FLI
gaaataaggaagcaaaaggatataaacataaggttgtgaagttttaggatctactcagcctagtgtacaataaagatcaatcaaatggagagggtgctaaaacagcagctgaaagttcaaaggaaacgacaaaagagaatgataccggaggcaaggatgctccatattctgtatcttcctcgagtagtttaaaaagacaaagattagatgattcatttaattctatgtggtgtgataagtttgacatgcttacatctgcattgaaagatgacggtccgaagctaccctcttccgccgaagttctcgtcgtattacaagaggttgagggacttgatgaagacacataacttgagctttatgacatcctcacctctaatgcacgcaagtttgagtcgatgatggcactcctaatggaaaggaggaagatgtggcttatgatgtagctaaggaagtgaaacagcttatatgtgaacttagatctctgtgttgaactgattatgtgaacttgtctttgtgaaacttttgtgtgtgaacttgatggctatgtgaaactgttgtgtgcgaatttgatggctttatgaaattgttatgtgaagatttgatgtctt

SEQ ID NO: 12571 - DNA, 638 bp, Zea mays
  Clone ID: 701183093_FLI
atattacttataaccattacatatcacttagtatttggaattttccaaacttgtccgtgctgtaatcaatttatatacttcaattagctagttttcgtcaacttatgcatattttttattttaagttttgtgtaagtcattaaattcttcccctatatttctaagattcatcctaattacttgcatggtggccatacaaaattccacctgtagccggatcaactgaattttctgtttcgttcctcaggattgaggtttagcaatctgtactgtgaccctctaatcatccccggcggtcacaagatcacggcaaggcagcggtggcaaccaacaccgatgcagctgcagatcctggagagcatcttcgaccagggcaacgggacaccgagcaagcagaagataaaggagataacagcggagctctcgcagcacggccagatctcggagacgaacgtgtacaactggttccagaacaggcgggcacggtcgaagcggaagcaggccgctgcttccttaccgaacaacgccgaatccgaagccgaggcggacgaggagcctctcgccgacaagaagccgaagtcagacaggccgccgccgccgccgccgccgatccaggataataccaaggctacgggcgc

SEQ ID NO: 12572 - DNA, 1698 bp, Zea mays
  Clone ID: 701183193_FLI
gactttgcagaaatcacaatcttctgcctccaatctttctgatagaattgacttagcatggactggttctggtcagcttgttaacgattcatcaagtagcatggaggcagtttcattcatacctgctagtctgaaggataatcctgcataccagaaggttatagcacccattagaatcaaatcgtttgattctgctataagttccagaaatgttgatgattcaaatgctagtataagaagatcttattctcaaaggcccccaaaggctattgagagaactggtaagggtctgtcaccaacattcttgaacaagctctcacttcctggtatgattcatggcgagagtcggttgctgctgtcacaaaatgattcaggtgttattgttccaatttatgatgatgaaccatctagcatgatagcccatgccatgactgttccagaatatcacagcttcttgttgccacttctgtatcagaataatgaatctaatttattgaattatggttctgatcagcctcaacctataactagaaatgattctaagtataaccatttcactatttcttttgaggatgaagactcaaattccgttgataaagcaaaattttctgtgacatgttattttgcaaagcagtttgatgcaatcaggagaaagtgctgtccagatgaactagactatatccgctccttaagtcgctgcaagcgatggagtgctcaaggtggcaagagtaatgtctactttgccaaaacactagatgacagatttgtgataaagcaagtgacccggacagaattagattcatttgaggattatgctgctgattatttcaaatatttgatagactctgtatcatctggaagcccaacttgcctcactaaagtccttggtctttatcagatcactgccaagaatttgagagatgggaaagagctgaagatggatgtaatggtcatggaaaacctatttttcaagagaaaggtatcaagaatatatgacctaaagggttctttgcgttcccgctacaaccctgatacttcagggaacaacaaggttctcttggatcttaatctgttagagacacttcacacaaagcccatttttcttggaagcaaagcaaaaagaaggctagaacgagctgtctggaatgatacttcttttctggcatcggtggatgtgatggactactctctcctagtcggcattgatgaagaaaggaaagagcttgtgatggggattatcgactatcttcggcaatacacttgggacaaacaactagagacttgggtgaaggcgacaggatttcttggtggctccaaggatgttctgccgaccattatatctcctgaccagtacaagaagaggttcaggaaggccatgtccaagtacttcttggctctacctgaccaatggtcaccgtaacgccaacaattcatccaggccattccaagcgcggcgacagggaagaccactccggctttctttttctttttctctcccttctgtttcttttaggacaatctatccatctgtgcctattgtatgctgtttttgttcacaacaggcaggatgaactctgtggaagattgtggcgattgttgtccagccaagcagaggttaggcgtcaatacgtgtacataccctacactgtaacatgaaaatgcaaaggaaatgaaaatacgcgaactcgcgagttcctc

SEQ ID NO: 12573 - DNA, 597 bp, Zea mays
  Clone ID: 701183195_FLI
cgcccaggagccttatcctccatctgtcgacatgctcatcttctctccttcgtccgttcagccggcgcaagattttcctgtgtcttagttgttctcatcctctccttagccgccgtacctcactgcgtgatatttttgccgccgcccctgttcgctttatatgcgcgctatgcgtgctcgtgcggcagattgctcggctgtttcgggcagatgctggggcactcgattccctagcgcccagacttccttcttctccctgaagctcgcctagctcggccgtcctccaagtttcgcccagcccagtcgttcctcctatgctcggcgccggatttctgctcgcccggctctgctccttcgcggcggcagcttggaccaggatgtcagtattcctgtaggcgacctggagttgggggacgacaggagagcaggaactgatgaagtgatgggccggcgaacaaggaagcccaatagcaaatggtccggtgccgagtggatccgttgaagggtgggccggcgcttaatagctggttgtaataaatagtagcacttgtactgagaaagacagctttgggaataaaaatacagaactcacctctc

SEQ ID NO: 12574 - DNA, 1357 bp, Zea mays
  Clone ID: 701183210_FLI
tcaccttcaaccgcggcagcatgtgcggcgagccggcgcgcaccgtcgggtggagggaccccgggttcatccacaccgccttcctcagggacctctggcccaacaaggagtaccactaccggatcgggcagccgtctctgcagcgcgtgatcgtgttcggcgacatggggaaggcggagcgggacgggtcgaacgagtacgcggcgtaccagcccgggtcgctcaacaccacggacgcgctgatcgcggacctggacaactacgacatcgtgttccacatcggggacatgccctacgccaacggctacatctcgcagtgggaccagttcacggcgcaggtggcgcccatcaccgcccgcaagccctacatggtgggcagcggcaaccacgagcgggactggcccgacacggcggcgttctgggacgtgatggactcgggcggcgagtgcggcgtccccgccgagacctactactactaccccgccgagaaccgggccaacttctggtacaaggtggactacggcatgttccgcttctgcgtgggcgactcggagcacgactggcgcgtcggcacgccgcagtacgacttcatcgagcactgcctctccacggtggaccgcaagcaccagccgtggctcatcttcgccacgcaccgcgtgctgggctactcctccaacgcctggtacgccggcgaagggtccttcgaggagcccgagggccgcgagaacctgcagcgcctgtggcagaagtaccgcgtcgacatcgccttcttcggccacgtacacaactacgagcggacctgccccatgtaccagagccagtgcatgaccagcgagaagacccactactccgggaccatgaacggcaccatcttcgtcgtcgccggcggcggcggctgccacctgtccagctacaccacggccatccccaagtggagcatctaccgcgactacgacttcggcttcgtcaagctcacggcgttcaaccactcgtcgctgctgttcgagtacaagaagagcagcgacagcaaggtctacgactccttcaccatcgacagggactaccgcgacgtgctcagatgcgtgcacgacagctgcttccccaccacgctagccacctagttaattaaactaattaatgagacgccgccagttttaattggctttcatccgaataaaactaaacgacgtgtcaaccacttattggtagaataatgtgccccgtcgaggcacactgtactgtagctgtatgcctgtattcatgatagcgcacgcagggtcagggagtggtgttgctgtgctcctgctccctcgatctctgtattaaatatcactagctagcccgtgcattaccactt

SEQ ID NO: 12575 - DNA, 1088 bp, Zea mays
  Clone ID: 701183270_FLI
acttgttcccttggaaggggtgcggaaaagcttaagtgcaattcaaaaacaaacaaatgtttttgggaaggcaccatcacaattggatagctatttgcaatcaaaggttgatgaatcagaagaaccacctcaatctcttgagattcaagaaagttcacaaggaattgctcttacccctttatcggataaagatggagggaacactgaagataataataggactgagaaaataaatgcatctgaagcaggggggtctaaacgctggagcagggtaccttctttgccttcatatgtgccatttggtgagctttacctattgggagattcatcagtcaatacactttcagattcagaatactccaagatgacgtcggcatgtgcaggtgcagtctgttatatcggagttaagagagcgtttgcagtcgcactcaatgaagtcctatagggctagatttcaaaaaatatatgattcatgcatgtgtgcaaatgctcccatttttactggcattgagcaattgccacaattttcacatctacaagaattaattggtctaacagctactgattctgttgaacttggagatatcgtggaccctcctgttatccgaactgctacttctatccttcctcttggatggactggactccctggtggtaaaaatgctgagccactgaaagttgatataattgggcatgacctacaaatgtgcactcttttccaggcacaaataaatggaaactggtattccacagtaatagagactctaccatcagctacttcatactcaccaaatggagaactgcaacccacattacagaaaatgcggattcttgttggacaaccactaaagcagcctccaaattacattagtggggatttcatgattcctgtgatggcaggtgctgattcaacacccgactttggatttgagtcattttttgaagataaagattgctgcaagggtttgagtggatttctaatatatgggacaagtgattttgtaactgtacgtaaagaggtccacgttaggactcggagagtgcgattgcttggattagaggtatctccatgtatttaggtattaaag

SEQ ID NO: 12576 - DNA, 562 bp, Zea mays
  Clone ID: 701183312_FLI
gtcttactatggcatgtgtgggctggcgaaggagtgtctacatcagcggtacttcagcaaggaatactctgaatttctggatgagtttatggccgcagttaggcagaactatggacaaaaggtccttgtccagttcttgcagggattattgctgctctgaagtctgttggtgggactctagctgatcatacattcttgttcttcagtgcgagttatacgatcaagtgactagtgatgtgatttgccatgatgagaaaacttcttacaagatgggcgcaagagctttcctagtggccattctcgcttacacagacctgttttgataagagctgagcagcaatgcttccatttcggaccacgaccttagctaaaggctaatggttcgaaatgtctgaagtaccgaagacagggctagctcctcgttttttgtcatgtcaaataaattgtgtatgattgcaacaatattggcaaaatatcgttgtactttatattttgatatactgtgaacaaaacaagtgccctatgagaccatcgtgatttatgcattttcaaactaaatttt

SEQ ID NO: 12577 - DNA, 398 bp, Zea mays
  Clone ID: 701183357_FLI
tgaaaccgctgcagaacctgcgctccctatccctggagtcctgcagggtgacggcaagcgagatggataagctccggctggtcgccctccccaaccttatcagtgtgcggccggagtgatacgaccgccagcgctcccacagcgacctgtaactgtggagcaagtggcgcctggctagagcaggccgccttgtacatacttttgcaaaaacgaggtgtctgtacatattgttcgtcgtgtcgtgtcgtgtcagtgtgcctgatggcaacgggctaatacgtccgtgccaacgtgtgcatggtatcccacggaccctgtggtagtaaggagcagttgtaaatatgccgtgcttcctctccatgtggggtgctgctgtataaatagattggtgcattgcc

SEQ ID NO: 12578 - DNA, 808 bp, Zea mays
  Clone ID: 701183366_FLI
aggccattgtccatccgtacagtcttcacttaaaacagcgtgtaaaaccatgctgtacatttcaaacaatctgttgtaacttgtaagaggctccagcatacaatacaccagcgggtgaaggattgcatatgctgtagtgttgtactgatgcagcattgcattttgtcatgaatcaaggaaacaaatgggtagcaatctgtcacacctttgaagcttcctgctgtgctcactcgctgatgttttcagtttgtaatcgtcattgtacttcactacaaaacgtaacgtaacatcaggcatgcacttcttcgtgtaccttatattcttctttccatgaaattgtactttcatttttcataacataacttgataatgatcaaaaaaaaaaaatataaaaataaaaaaatgttgaaaataaaaaaacattagtcacaggcgattggttttagcctggacctcctattattgatgtccggatcaataacattgtgatgacccaccagatcccctacaggtacatgcctttacggagacgtatgatactaggaatacttcatggtcgtaggaaacatcatgtccgtcccagtttgccgttgcattttgaccatacctataacttgtgtaacacacggctggatactgggggagcctcctcagatacatagatcacatcaactgaccggccttccatgacagatacccgtaggggaaacttggtcctgccattcgatccatactattgtaaaagcccctggaaaaatagaaaacaaattggttttcactcgcaccatatgttcatacaccagctgac

SEQ ID NO: 12579 - DNA, 723 bp, Zea mays
  Clone ID: 701183379_FLI
acagaactacagaagaggcggccaagcattagcaaagcataccccaaaatccccaaaccctagcgaactcggcacggcggcgatggcagcggcgggcctgcggaaggggaacgcgcgcctcccacccgaagtgaaccgggtgctgtacgtgcggaatctgccgttcaacatctcgagcgaggagatgtacgacatcttcggcaagtacggcgcgattcggcagatccggctgggcaacgccaaggacacgcgcggcaccgcctacgtcgtctacgaggacatatacgacgccaagaacgccgtcgaccacctctccggcttcaacgttgccaaccgctatctcatcgtgctctactaccagcccgccaagatgtccaagaagtcggatgtcaagaaggaggacgagatcactaggctccaggagaagtacggaatagggtccaagacgcccggccctggctccaccgactgagcggccagagtattgcctctgaagcctttttgtatgaagagtaatcagagggaacaaactggtagcactgtgctgtgtttcatccagtgttgctaattactctgtgttgttattcggtcaattgaatatatatgtgcttaatgtgctacaatgcttgttcctttcgtgcttttgtaatcgcccatataatgttaatcttttctactagaaataagatgaatgggttagtatacgcctgttgctaggtttgc

SEQ ID NO: 12580 - DNA, 508 bp, Zea mays
  Clone ID: 701183475_FLI
cacacacacatcgcttctccacacgacctcgctgaaccggaagacccgcgcacacacgccacttgtgcaccatggcgccccgggtggcggacaagtcgccattgccgctggccaccggcctgaagcttggcgttggcggaggagtcggaggcatgggcttgggtccacactaccgaggcgtgaggaagcggccgtggggacgctacgccgcggagatccgcgacccagccaagaagagtcgcgtgtggctgggcacgtacgacacggccgaggaggccgccaaggcctacgacgtcgccgcccgcgagttccgtggcgccaaggccaagactaacttcccgttccccctcgccgtcgccgtcgccggcggtgctggtagccccagcagcgacagcaccaccttggaatcgagctgtggcggcagcgggtgtggcgtcgaagcgcctgtgcaggcggccatgccgctgaccccggccctcgacctcgatctcttccaccgggcggccgc

SEQ ID NO: 12581 - DNA, 718 bp, Zea mays
  Clone ID: 701183505_FLI
ccaaccggcggcggcggcggccatgcaggggcatggcagtggcctcggccccctagcgagcagccccggtgcggtgcaggctcgcggccctagccgtgcggccatccccggcgagctgcagcctcccccagcgcatgagcacttggccccggcggccctggctgcccggcgcacgcgggtgcgcatctccgggagcacgcgcgggcaggcccccgacggcacggcgcagcgcgggcgcggctccccggccaacacgcgcaggcaggcccctcggcggcgcgggctaagccccccggcggctcgacacgctgtagcgcgagcgcgcgcacgagcgcggtacggcggggtgccctcccggcgcacgagcgcggcccggccccagcgtgggtgagcaggggtgcggctgcctcgaccccggctgtgaataggcgcgcgacggtcgtcggctccgccggctcgggcttgccacccagccacgacggcgtggtcgcgtgaccccggcgcgggcacgtggccccggcggcgcgggctgcacgggcgtggcccccccggtggcttggggttcagcccctgacggcccgacgcgggtgggcacgggtgcagcgaccacggcgagcgtggctccggcgcggccagcagctatgccccgcggcggacgcggccccagccccagcaccggcggcagacgcgattccccacagcgtggcgctgtggccct

SEQ ID NO: 12582 - DNA, 348 bp, Zea mays
  Clone ID: 701183506_FLI
ccatcacctccttctctggctctctctcacacacgcatacgaacacactctctactagtactaacctctccctaatctatctctagcagcaagcacacaccgtaacaacaaagccaacgacgacgcggggccggccgcccatggccttcacgtcctgcttattgggcagcgacgcggagcggaaggtggcggtggcggaggtggcgctgcgggcggtgctgtgcgggctaggcgcgctggcggcggcgctggtggcgacggacacgcagacgcgcaccttcttctccctgcagaagaaggcgacctacacggacatgaaggccatggtgctcctggtggccgccgcgg

SEQ ID NO: 12583 - DNA, 1297 bp, Zea mays
  Clone ID: 701183642_FLI
gcccctgcctggggttttaaccctacccaaccgccgcccatggcgtccatctcggagcccgctgctagggagaagcccatcgtcgtccgggtcaagcgcaaaccttcgcaaaaccgcccggacgctttctggctagagattaatgagaggccggcaaagaaggcggcgattgatttctcccgcctttccatctccgaaccctcctcgtcctctgccagtgtcaaagcttcagaggaaccacgggttaagaaaattcttgtccagcacatcgagacagtacaccactctgaagctgtcgaagatgttttacaatctcttttgcttgttgactcaaattccaaggagacaaagagcaagacaaaggagtggaatgacagaatcaagcaagacaaaaaaccagagcaactacgatcagctgccagacagaggcatgaggatatgggaagaaatgctcggtttgcacaaatatggaagagtcgaaaaggagaaaaggctgatgctggtgactcattgagagaaatatgccatctttatgatgctgtccaagtagatcccgatgatgagaagcatccagcagaaccacggattacatcttttgaagagggtgctgttctatgcaactttcttccacttatacgggaatacttgccatcaactgccgaggaaattgaggcggatataatttcattggcgcaatcagaagattctgaagtttatgatatctatactgtcaaggaggtggatgacacaatggaggccacgtcagcagcttcatatccaaggttacaagtggatgatggagaagatgaatgctacgaagattgtccatatgacacagatgattcgaatgccgaagacaatcctctttttgattatcctgatgaatcttccgaggacgaggatgatggtaggaacgacgaggatccttttggagacaaagaaggttctgactcagattacgagaaggaagaagtagaggtggaagaggatgagtaacggtgaagggaagttgtgatgaaacgtgcggttgtagaatgtagatgcagggcagcaggggagctgactgatgaatgtttgtgttgctttatgctgtctaagaaacgggacttgtctcgacgttatgtgccagttagcatagcacatcgtgtgcagtatccggaggaagaattgggaaaaaacaatatttggaagcgtcagctagacacaggcgaatcgtaataattggtattttgccacttgaaaagttgcatccttctgtaattaccgtttgtgtagccttgtgtgttcttgctctcgt

SEQ ID NO: 12584 - DNA, 553 bp, Zea mays
  Clone ID: 701183676_FLI
cgacgacgtggtgcccggcctggccacgacgccgtgggagttcgaggacgacaaccccttcctcgcctaccagaggaacaacgctctgttcgatcaccagctggaggcatggaacaacgacggcagggtcgagctgttctgaggcgctgagatgatctacttcttcctcgatcgtcattagattagatgtagttaattaatacgtcatccccggcctacgatcgagcagttcgcgttgcacagaccagagcactcacggccgttgaaaataagcaagagaaagagatgaaagtggttgcacgcccggtttcttggttttctaaaacctttggccgggccgaccacaacttgcaaaggaacagttggagagaaaaaaaaatgttcgttagcaatctgccagtgctgtttggcattggagaacccttccgtggattgtttattggacaatgcaagacccctctacgtacgttgaaaatgggaataataaagccaggccactttgtaccgaatgtctaatttctactagaaatcaaggcgttccggtggttctcag

SEQ ID NO: 12585 - DNA, 625 bp, Zea mays
  Clone ID: 701183701_FLI
caggaaagtcatatttgaaattgaggaacttaaagatgaaaagcctggcaatagggcagataacagcaaaaccttgggacaagtagttatggttgaacaaaacgaaatagaaaacagacttaatcaagagcacttgcagagtctccgcctgaagcaggaactaactggtcttgagaacagaaatgcagaacttactgaggaactccacttagttcaagatcaactttctatcgaacaaaccagggcttccaaatttgagaatgaaatttcagatattcaacaacgactacagaagatggataccctagaaaaggagattgaatcacttcgctatgaactggacagcactgtatccgaagaagaatcttcaagtggcaacgagttgcaccgcagtcggggcttttggaggtggaatgggtgaactcctcgagactcaaggagtgagtattgaagagaatactcttccaaatagttgtcattattttaatttttatgtctttcacaaaaatatatgaattcgtggatggtactagttcggaagcatatagaggatctaagcaaactgcagcaacatcaactgtgaaaagcatcttacagaaagtaaaacgagtatcatgtggcccag

SEQ ID NO: 12586 - DNA, 791 bp, Zea mays
  Clone ID: 701183718_FLI
tccgtgctcatgaccttcatggtccgccacctcgccggcgatcccgcgaccctcgccgccatggttcaagagcacgacgagattgccaagaacaaggcccacggcgaggcgctgacctgggaggacctgcaccgcatgaggttcacatggcgcgtggccctggagacgctgcgaatgatccctcccatcttcggcagcttccggcgggcgctggaggacatcgagttcgacggctactgcatccccaaggggtggcaggtgttctgggcgtccagcgtgacgcacatggaccccagcatcttcacggacccggacaagttcgagccgtcccggttcgagagccaggcgccgccctactcgttcgtggcgttcggcggcgggcagaggctgtgcgcggggatcgagttcgccagggtggagacgctggtgaccatgcaccacctggtgagacgcttcaggtggaggctctgctgcggggacaaggacaacacgttcgtcagggaccccatgccgtcgccgctgaacggactgcccgtcgagctcgagcgcagagacatggctccaagcaagagcgcctgctcagtaccttgattccaactaaggccctgtttctttacctctaggttatataatctagcttaaataagttgagttaaacaaagaacaaagattattatgtggattatgtaacatagatgtctagattacaataatccataagcaggtcaatagatgcttatataatccataagggcctgttcgtttttgctggaacagaattaatttcaatt

SEQ ID NO: 12587 - DNA, 728 bp, Zea mays
  Clone ID: 701183772_FLI
ggcaccagccacagcccacagttcccccatttcatttgtgtggtagccgaggactgggagggacctactcaaccttttttttgtgtgtgtgaaagatcgagagcgccgctcaacgaatagagcggtttctctgccttgtgtctttcctctgtcctgtggtctgcggtggccgcagctgcggcgcgcggtgatggagttcacatctaagaagacggcttcgcttgccctcctctgcctcaagctctcctgcctcctcctccttcttcttcttccccggtcttcctctgctgcgcctctgtccagaagcctgtcgctgacgaggaaccgcctgcagcccgcggatgaccctgctccggaggttcccgctcccgcccagcagggtgcggatgcgggtgctggtgctggtgcggtgggagttcgagaccccggcggcgaggtggcggcgaggatggacatcgaggtcaacgactaccctgggtccggtgccaacaaccgccatgaaccgaggagccctgggaggccatgaggcttgaagctagcccatcgtcccctgcgtacgtctcagacaggaatcaggaatgaagaccatggcatggagctgctgctgcgctgtcttgagagttttataagtagcgaagcgaaggagagtacattgcttgttgttagctatagagaggtcaaggagagccttatcgtgtacttaattagcttgttaattattgctacgt

SEQ ID NO: 12588 - DNA, 534 bp, Zea mays
  Clone ID: 701183939_FLI
ccggaggccgtggccggcgccggcgccggcggcgagaacagggtccgtgtgggtgtcgagcatatcccaaggcatctacaagtccagcttctgaagcagaacacttcaggtcatcaccagagtttgaagaatgaggtttcaagccccatatctgttctggagcggaagagtggagagctccacaaggtacaacttcacgctacctctgccatgcttcctgtcgctaccatggagaaggcaacgaaatgggagcctggggacataaagggaatggagtcacatgatgcgtatctgatagccagccagctaaatcttcttgatgaacagcaagacacagtgtatgttgctggcctccagatggagctccagcaagcacgtgataggataagtgagctggaaaccgagcggcggtcggctaggaagaagcttgatcacttgttcaagaaacttgcagaggagaaagcagcttggagaaacagagagcatgaaaaggtgcgtgctatcctcgaagatatgaaggcagaccttgaccat

SEQ ID NO: 12589 - DNA, 1666 bp, Zea mays
  Clone ID: 701184029_FLI
gcgatcaaacgccggcgcaaactctcgcccgagcccgacagatcttcaattccccattccgcccaccgatcgaccttcacgccagtctcggtctcttccgaaggcgtcgcgcgcggttgtttgagaggagaggaggaagatgagggagtgcatctccgtccacatcgggcaggccggcatccaagtcggcaacgcgtgctgggaactttactgcctcgagcacggcatccagcctgatggccaagtgcctggagataagaccgcgggacatcacgatgatgccttcagcaccttcttcagccagactggtgctgggaagcacgttccccgtgcaatcttcgttgatctagaacccactgtgatcgatgaggtgcgcactggcacgtaccgccagctcttccaccctgagcagctcatcagtggcaaggaggatgcagctaacaatttcgcccgtggccattacacaattggcaaggagattgttgatctgtgccttgaccgtatccgcaagcttgctgacaactgcaccggcctccagggcttcctggtcttcaatgccgttggtggtggcaccggctctggccttggttctctcctccttgagcgcctgtctgtggagtacggcaagaaatccaagctgggcttcactgtgtacccatctccccaggtgtcaacctctgttgtggagccttacaacagcgtgctctccactcactcactgctggagcacactgatgtctccatcctgctcgacaacgaggccatctatgacatctgcaggcgctccctcgacattgagaggcccaactactccaacttgaatcgccttgtgtctcaggtgatctcatcgctgactgcttctctgaggttcgatggtgccctcaatgtggatgtgaacgagttccagaccaacctggttccttacccgaggatccacttcatgctctcctcctacgcaccggtgatctcttctgcgaaggccttccacgagcagctgtctgtggcggagatcaccagcagcgcgttcgagccggcttccatgatggtcaagtgcgacccacggcacggcaagtacatggcttgctgcctgatgtaccgcggcgacgtggtgcccaaggacgtgaacgccgcggtggccaccatcaagacgaagcgcaccatccagttcgtggactggtgcccgacggggttcaagtgcggcatcaactaccaggcgccaactgtggtgccgggtgccgacctcgccaaggtgcagcgtgccgtgtgcatgatctccaactccaccagcgtcgtcgaggtgttctcccgcatcaacagcaagttcgacctcatgtacgccaagcgcgcgttcgtgcactggtacgtcggcgagggcatggaggagggggagttctccgaggcacgcgaggacctggccgccctggagaaggactacgaggaggtcgccgcagagggcggcagtgatgacggtgacgaggaggaggaatactgatctgcttgcatgaatctgtttggctgtcgagccaggttgtggtgttgaaaaacctttgtttgtgtcctggccccctgggtaatgtttgggtgtttccttccatcatcacttgctgaactgctctagtatttgcatttgtaattgaagtctgtcgctttaagcactcttggttcc

SEQ ID NO: 12590 - DNA, 1145 bp, Zea mays
  Clone ID: 701184039_FLI
ctagcatggcgaccggcgacgaggcggagacggcggtgcgggcgtctgaggagttgcgggactggtccgacatgacgccagtgtgtcttgccgaagcgttctcgcggctggcgctggaggacctgtggcgcggcgccatgccgtgctgtcgctcctggcgggacgccgcgcgctcgcgcccgggactcttcgcggtgcttgacctcgagcccgggtttgctgagtccacacctggcgccgaggcggcagcgtggtggacgccctccttccagcgccgtgtcgacgccatggtgcgctccgccgccacgttcgccgtgggggagctgtgtgagatccatgtccgccactgttccgacgacgcgctcgccttcgccgccgagagatctccaagacttagtatcctttcggtcaaaactagcccggcagtaacagatcgatcaatgcttattgtcggagcatgctgccccatgctcacagaactggacatcagcaactgctacgagatttcatacaagtcactcgaggtgatcggccaaaactgccagaacctcagggtcctcaagcgcaacgtcttcaactggatcgacccatcggagcatgccggagtagttcccgaggactatctgagagaatgccccgaagacggcaacagggaagccattacgatatccaggttcatgccgaagctgagacacctcgagctgaggttctcgaagctgaccgccgtcgccctcggctccatccctgaaggatgcaaggacctggaggtcctggacctgttcggctgcgcgaaccttacgagccggggaatagaccaggccgctgctagtctgaagaatctggtgacgctggtgaagcccaacttctacatacctcgctcctccttccacatggggaggtacggccactggcagctctacgacgagaggttccagaccaatgtgtttcagatatgatcatagtctcagctcaggtactcaggtcctccctgtgacctatggtttatattctgtgtatgtgggtgcatatagtagccaataatgtgtggtttgaatcgtttctctcgacaacattttgtacagatggttatgctccagctgtttgtggagtgtggttggttttaatataaatgacttattgcctgc

SEQ ID NO: 12591 - DNA, 1498 bp, Zea mays
  Clone ID: 701184133_FLI
gattccgccgcctgctgatcgatctgaaacacgagaagtgaagagtcagaagagctggaggactcaggaggggatggggcaaatcgcggcgagtgacgaagagagcgctgcctcgcctggtggaggagggtctcgactgctttgagcttggaggagatccaccctgccatggcgctgtgaacggaggcgccgcggggcgaggggattggagcgccgcactaacaggcgactagatctagacatctccctctcccaagatcaagatcagctcgaacgaggaaacctgcgcgacctacagcaacagcagccttgctcctcatctccgagcacattgccggacccgctccaccaccaccacctctcactcccggtccctccctctcgccgcgccctgacaccaacaccatgccaccgccatcgccgtgtccatgcagatctcgtgcctcgacgtcgttaatctctccaacatctacttcctgagacagctcggtgtgagcaatatcagtagcgtgtagctggccgaggtccggccacctgctgtcgttgccgccaataaggagggtcgcacgcgtacggagcgtaccctcgaggttgtcgaccacccgttcctgtcctgcctatacggcgtcgccgagggggaccattagtaatgctgcattgaccaacagtaacacaagcactaggagcaagtggagtggagtagcattgcagcagcgtcccctgcccgtgacccgcatggcaattggcatgttcagaagctgaatgtgttgcagttgcatgcgtgtggaaattcacatcccctttattctgagtttattttgaatattttttaaagttccttctgctgaatattcagtagtactctgctaaatacaaccatgtttttcatataccttgccgcagggatcttcatatagtttggtgcctttttatataccaacctggacaagagatgaactgttcctattttaactaataatgttgttttttcaagtaggagtttgcacgtgatatgaaaaggatcatgttttaataacattttattggtgtatttgttgtggcaattctacaggagtacaaaattaaagtgagaaactctactcatgtggagtagagtccctaaaatggaggtgactgtggtttcaaaacaaaatggaatttggatgtaatgaccactgaccaatcaatgtagaaatagatttatgacaatatgcgcaaagatctcgcgtctagaagctccagtatattgcatagtttgagagaagagttcagtccttacagaggaaatagaagtaactggcagaggcaagcagaatgttcaagctgggggttggattttacagcattgggctacagttcttttatgtagttttcattttttgggggccatagtgacttgaggacggtgtacacatccatagtaaagggtacaatcgagcaagttagaatgatgttattgggaagttcacaatgaaaatccaaataatagtaccgctgc

SEQ ID NO: 12592 - DNA, 576 bp, Zea mays
  Clone ID: 701184147_FLI
attggttgagcttttagtggaacaaggagcggcggttaatatgcaaaatttcgttggagagacggcactctttattgcttcttctttgggattaaatttgatttgcctcttcttgcttgagaatggaggtgacacaagaatatctaccttagaaggatcatcacctcttcacgctgcatcagcatgtggtcatctttctgtcattaaatcccttgtttcacatggtgcctttgtgaattctacggacgaagaaggagatacgcctcttcattatgctgttagagaagggaagaaagaagcagttggattacttgttcaattaggtgctcaattgatcaagaatgaggatttggaatctccattggatttggccgaagaattcgatgagacttggatggttgatttgctttcaaatcatttcccttcccttagatctgactccgaacatggcttctgtttctaaaaaaaatacgtttatataatgaggagagggggaacacgagttgtccgaaaggagtcctcgttgtgtagctttcagcaattcactattagctatattaaagttttccttcactc

SEQ ID NO: 12593 - DNA, 838 bp, Zea mays
  Clone ID: 701184169_FLI
gcacattgtttgtttggagaaatccaattttctactcacggacgccgcccctgtgcctcgccatcgcctcaggtacgcaaggcggccgaacacgagcgcccgccttcgttcttgcctgcgctgcccctctcctcgccgtttattcgggctcctacctcttgttacaacttgcgcggtgggggcagtgaggcagcaagacgtgaggtccaggatgatgaacaacaacagtggcggcggtgccggaggccctggagggggcatgggtacgggagtgggtggagggggggacgggcggcacgacgacgaggctgcgctcaccgagttcctctcatccctcatggactacacccccacgattcccgacgagctggtggagcactacctcggccgcagcgggttccactgccccgacctgcgcctaacgagactggttgctgtagccacccagaagttcctatcagacattgctagcgattctcttcagcactgcaaggccagggtagcagcacctatcaaagacaataagagcaaacagccgaaggatagacgtcttgtattaaccatggatgatctttctaaagctttgcgcgagcacggcgtgaacttgaaacacgcggagtacttcgcagacagcccttcagctggaatggctccttcgaccagagaggagtagactggattaggccaacttgtacggaactagggagggatcgcgtggaatggatgggcatgttggcattcttgcccgatcagatcgatgggatgtattactattaagtactgctactatgactagtatatttctcaattaccattgtcactgagagaatccagacac

SEQ ID NO: 12594 - DNA, 1109 bp, Zea mays
  Clone ID: 701184223_FLI
gtcgcaaattagcttatttgagcagttgctttgatgaatacaagcaggtagacgccctgtcgcgaataaaccacaagaacttcgtcaacctgctcggcttctgcgaggaggaagaaccgttcaccaggatgatggtgctcgagtacgcgccgaacgggacgctccacgagagccttcatggtaggcggaacagaagctcttcttgctaatacaaccacaccattaattgagcttgagccgcagcagtagcagtagcagtgcgtgtcgtagtcgtagctctcaaaaacacttgcgcacgagtgatatggactaacagttttgtggggggaaacaaatcacgttgcagccgaggatttcgagcgcatcgcttggcgaggcaggatgagaatcgtcatgggactagcgtactgcgtccagcacatgcacgagctcagccctcccgtggcgcaccctgacatgcagtcgagctccgtactgctatctgaagacggcgctgcgaaggtacatactccttgtccagcactccagctctccatgtgtttagctagctactagctacagcttggtgttccaattccaacctctgagttcccccctgcctgcagatagcggacatgagcgtttggcacgaagtgatttctcaaggcaaaacgacgacaaatggtgacgaacaagcgtcgtccgctggcctgctggcggggaatgtgtacagcttcggtgctctgctgcttgagatcatctccgggaagcttccgactccataccccgcacacgagcgctccctgcagatgacctcggtaacgagctatcgacggaacaccgttatgtttctaacaaccagaagaagaacaccaaatggtgacgttatgtttcttcttcttcctaggctctggtggagcgcgtaaccaacgacgaccggagcgtagcctcgttgcttgatccaacgctgggtggagaccacagggaagacgagctagcggtcatcggcgaggtgatccgggcctgcatgcagagcgacccgaggcgaaggccgagcatgagggaggtcgccgccaggctgagggaggccgtgggtatctcgccggtcgctgcgacgccgaggctgtctc

SEQ ID NO: 12595 - DNA, 553 bp, Zea mays
  Clone ID: 701184261_FLI
gggtgcgtttatgatggatggtgagaacgtcgaccagatccttgcggggatggaggatcctcagctcatggatgagcctgaaccagaggaggtgaaagctcaggattctgtggctgcccctgatgcggatgatgccacgggaaagaaatcaaagaagaagaaaaagaagggagggtttacgatggatgtggatggtgaggagtttgaccagatccttgcagttatagatgaccttccgcctcctgaggaggagcctgagcccaaggaccccaaggatgagggtactgcagctactgctgcccttgtggatgatgctgaagggaagaaatcgaagaagaaaaagaagaaaagtggaaggacagcgaaggaagaagaggagttggacaagattcttgctgagcttgatggagtccctccagtggaggaggacaaacccactcaggcaccacaatctgctgctttggccaaggaggacgttggtgctgcagaggatggtaatgtggaggacaaagctgaggaaggaggagaggtggaatctgctgctgccaagaag

SEQ ID NO: 12596 - DNA, 1512 bp, Zea mays
  Clone ID: 701185186_FLI
ctagaccgcagcggaaggggagcaggcggcggccccgattgcggtaatggagctgtcgatgagtggcagctccctgcgaacgttcggccggtgcgtgaccttcctcgcgcgcgttgcctccgagctcgtgctccaggcgcaccccgccaagctggagatgcacacgcttaacagctcgcggtcggcgtacgcttcgatctccctagcgcgcgacttcttcgaccagtatcacctcgacgccgcggcttcggcaccgtcttccacgccgctgcagtgcagcgtcctcctcaagtccctgctcgccgtcctccgcacgccgcacgccgcgctcgaccgactcgccgtatccctcccagaacccgacgcacccaagctccagatcaccctccactgcctcaatggtgtgaggaagacgtactggatcgtgtgcagcgcagagcccgaggtgcagtcgctgtcgctagaccggggacggttcccgagccgcctagccattcggccgcgggagctggcgcggctgttgtccaacttccagtcctcgctgcaggagctcacaatcatcgctacagatcctgcttcagggttacctgatgctagcggtgacgtcgggggcaaggctgttgagctccggagctacaatgacccgacaaaagatgactgtgacactagactgcacacacaactgtggatcgaccctgccgaggagttcgtggagtttgttcatgctggtgatccggtggatgtcacctttggggtaaaagaactgaaggcttttttaacattttgtgaaggatgtgaggttgacatcctcctattctttgagaagactggcgaacctgttcttttggtcccgagattcggattggatgatggagcagcttctgattttgaagctactctagttctggctactatgactgtatcacaattatctgacagcgatgatgcccaacaaccagctacatcagcacaaaacgcgggagaaccaggggctgctgcaccaacactagttcctgaaaatgtctcgaaccatactaaaatatggtcggagctttcaggtagtactcccaaaagcattgaagctaacagagaaaatcatgcccagaagaagagaaacgcaagcactaatatgctgaacgacatgtcaatgctgcccaatgttacaaatgctccaagcaagccaccagttgcagataatgcaaacaatataatgcagcctttgcaaatggatcacatggaagaacgtcctgaaggtatcagtggtattcctcgatcacaacaccacccgagcaactgggtcggtgctgatgataacgacgatgacaatgaagacgacgaggagcttttagtccagacaacaccctactatatggactgaggataaatgctgattctaaaatatgtaggtgcatttcagcgtagtgtactatacgaacgaattaggaactagctgaaggctttacgtgtactcttgtagtcttatttctagtagggctggagttggtgactttg

SEQ ID NO: 12597 - DNA, 124 bp, Zea mays
  Clone ID: 701185244_FLI
aaggagcaaagctaccgtcgccgaagccgagcgacgttccaagaaacgaaacagccatgatgatgatgggagagggagcgcacgcgccgccttggcagcagtcaccggcggccagcggcatcat

SEQ ID NO: 12598 - DNA, 683 bp, Zea mays
  Clone ID: 701185311_FLI
ccgacgcccggttctgcaagccgctggacacggcgctgatccgggagctcgccgccgagcacgaggtgctgatcaccgccgaggagggatccatcggcgggttcggctcccacgtcgcccactacctcagcctgaccggcctcctggacgggcccctcaaactgagatccatgttcctgccggaccggtacatcgaccatggcgcaccgcaggaccagatcgaggaggcagggctgacgccgcggcacatcgccgccaccgtgctgtccctgctggggaggccattggaggccatgcagctcaagtgaacgacgacgacgacgataacgacgacctagcttcaccatcaccaccaacagataaataaaaagcaaaccaaaccaaggcgtttgtacagtacaggagatgggtccaaggccttgggccggcctgttggcaccgtagtagcaaggatagcaaatgcttccaaacgcaggctgtcaagtgcaggtggatatgtctttctcctagccagtgacgacatagagcatacatctgcgcgggcggtcccacaagtcagctgatcctctgctagttttttttatttttattttaaagaacgtctttttgtataggatgctgcaagcatgtacgcatggtactagctacaagcatatatagaataacaaatcaaaattcatgtg

SEQ ID NO: 12599 - DNA, 448 bp, Zea mays
  Clone ID: 701185342_FLI
gccgggggctcttccactccgacgccgcgctgctcaccgacccggccaccagggcgtacgtccagcgccaggccacggggctcttcaccgccgagttcttccgcgacttcgccgactccatggtcaagatgtccaccatcgacgtgctcaccggccagcagcagggcgagatcagaaagaaatgcaacctcgtcaactgacaaataatacgtacattaattgctgctggttttgacgatgcctttcacttacgttcatccacttaattcatgcatccatgttggttgggttcattcaattattatattcgttgcttacctttacttttgcttggttaatcttaattaaatcgtgtgagttttcttttcttttcttgagtatatatatgtatgtacgtagagcgtgatgagtgccttttcacgctctacgtacatacatatatatactc

SEQ ID NO: 12600 - DNA, 761 bp, Zea mays
  Clone ID: 701185353_FLI
gcgaccgccacgctgctgggctcctcctttgccattcccgccgcagcccgtagggcgtcctcctctgcctccacctccttgggcttcgccacgtcgcagctcgccggcctctccctctccgcgggcgccgcaactccaaccgccgtcgccttcctcccaaagaggcagcagctccagcccattgtcgcgcgtaagccttccgtttccccttgctgttgcttccctcccgaacggtccttcaggtttagtggttgctctggtcttcagctgtcccggctgttccattctcttctagtagtatagtagaatcagttaatctctctgcagatcggtcgccgtatgattgacgagatgacggggtgtgttcagggcgggtgtgccctttcacgggcaagaagacgaaccgggcgaacaaggtgtccttctccaaccacaagacgaagaagcagcagttcgtgaacctgcagtacaagaagctgtggtgggaggctggcaagcgcttcgtcaagctgcgcctctccaccaaggcgctcaagaccatcgagaagcacggtctcgatgctgtcgcgcgcaaggccggcatcgacctcaacaagaagtgagaacagccaaactatggtgtggtggcacactggcatcgaccccagtttgatttgtgtaccataccaatcagtgtaggcagatcgaggttgcacatgctgtgggtctgtttagttcagcttttttctgaccaacttttctgaaaatctggatacgaggag

SEQ ID NO: 12601 - DNA, 501 bp, Zea mays
  Clone ID: 701185360_FLI
cgtaccaccaccaccaccgcacacccgccggcgccaatgacagcaagaagcccaccccgcccgccgccctgcgcgacctcttccgcttcgccgacggcctcgactgcgcgctcatgctcatcggcaccctcggcgcgctcgtccacggctgctcgctccccgtcttcctccgcttcttcgccgccgcctgtgcagttcagttcagttcagttgtcctgtgggtcggaccgttcaccgcttcactccacgggatcaggcacagtgatcagtgccgtgctagctgtgtggaacgcttgttttagtgttgtatccacatgtacgatttgtaacgtttccttgcttctcgtacctgtgggtcggaccgttcaccgcttcactccacgggatcaggcacagtgatcagtgccgtgctagctgtgtggaacgcttgttttagtgttgtatccacatgtacgatttgtaacgtttccttgcttctcccgtttcgtgttttcgtatggt

SEQ ID NO: 12602 - DNA, 1007 bp, Zea mays
  Clone ID: 701185406_FLI
attagcttcatgtattgctgctgaattagcaaaaggcgcaacgatgctgcatgctgtccaggctgcgaagaaatttgtggaatctgctctttatcacagcaaagatcttgtgattggaaatggacctcagggcccttttgaccaccacttcgagctcaagtctccatcatacaagatgggatcactgcaaaagttcaatccagatgacctcttcctgtacgcagtgacagactctgggatgaacaagaagtggggtcgttcgataaaagatgccgtgaaagctgccattgaaggtggcgctaccattgtccaactgagagaaaaagacgccgagacacgggagttcttggaagctgccaaggcctgtgtggaaatctgcaagtccagtggagtgccgctactgatcaatgaccgcgtagatgttgctctggcatgcgacgcagatggcgtccacgttggccaatcagacatgccagcatgggaagtacgacggctcctaggacctggaaaaatcatcggcgtctcatgtaaaaccccggcccaggccgagcaggcatggaaggatggcgcagactacatcggctgtggcggtgtcttcccgaccacgacgaaggcaaacaaccctaccttagggttcgagggcttgaggactgtgtgcttagcttcgaagctacctgtggtggccatcggcggcatcaatgctggaaatgcaggctcggtgatggagcttgggctcccaaatctgaaaggtgtggctgtggtctctgctctgtttgaccgggaacgtgtcgcggctgagacaagaaacctcagatccatcctgatgaagaatgcttactcaaggtcttagagcaagttgggatatgccgcctgttcatttactttctttgtttaggcccgaaataagtttgtaatcaatcactttgtcataaggagaaaccaaacaggcgctgcaatcttcaataaaccggagtcattatttctctggaaaagaacaattctgtgac

SEQ ID NO: 12603 - DNA, 699 bp, Zea mays
  Clone ID: 701185413_FLI
caaatcttcgcctaccgttgggtcgacaagatcctcggcccggtcaactcaacccgagtttcgtcggcgctatccataccgataatcgccgcttaccccttcatgacgcgcttgtcgggaataaggcttggtgtgcctctctacgtcgcggcgatgctcaaaagcgtcctcgccatcaccagagtcaccggcacatcgctcctgcagaacaacgctgtggtgcccacaggagcagaggggcgctgcgaacgggatagctacgacggcgatgtccctgtccaaggcgttcgctccggccgtggccggtatcttgttctcgtgggcacagaagcgccagcatgccgcgttctttccaggtgaccagatggtgtttctgctcctgaatctgacggaggtcatcgggctcgtgctcaccttcaagcctttcctcgcggttccccagcagtacaaacagtgaaagcggtgctgcgtgcgtgcgtgctctgcatggatactatagagaggtagctagctgctagccagtgtgtgtgggcgagagcgagacgagggagatggacatgtcaagtagaagcagaggatatgatgtcattatacatatttactttgcgagatatgtagttcctcatgagtcttcgctgtgcggttttctaaaaaaaaattgagataaagttggtctctcaattatatggtgcattccgg

SEQ ID NO: 12604 - DNA, 897 bp, Zea mays
  Clone ID: 701185465_FLI
ccacgccgtggggtggacgcatccgagcccttctcgtcgttggagtttgccgcgtagtcgctcagctcgcccccatctcctcctctccccatggcagcttcccctggagccctccctgtgcgcgctcctctctccatggctgttgcatccctacttcctgttcccagcaccggatcccctcccccgcgcgtcctcttcttcgccatgcatccatggagtcgtcgaccgtctccccaaactgcaccgctgtccactcctacggcgaggtcgccttccctgctctagcgcgccagctccatctccctgacgacctctcatctcccagaccctctgctcaccagccatatcctccctagcgctcgcccctgccccagccatggacaccagcgcccctctgctccttctttccatggctgcgcacctctctgtagcaaccctcgccgtcggacatcctcttgtagccccgcgccatccgcacacgtatggtgtttgacaaaatgcccaagtggattgccgtgtcatggacagtcctattagcgtcgtcggatgtttgatgttttgcgcagcccatccgcgacaccagtgacggatctaggaatttatctcagggtatgccgaaccaataatttagtagcaccatatagaaataataaaatttgtctaactaaatagttacaaatatatataattggttccaatataataattttataatcatgataatatattaattcagttcaacatatgcataaatttcacttactcatgggagtatgtactagaagattacttatttttctttggcccgcggtttctgatggtaaaagaagtcttgattacatcttcttcatccagttgaaagaaaacatctcgctcaatatatgtgagtagacagtt

SEQ ID NO: 12605 - DNA, 518 bp, Zea mays
  Clone ID: 701185496_FLI
gacacatcgtcatcgatcatcacacgcaatcgacacaagaagttaataaacagcccaaggacgcagagatcagctgatcgagaaggacttgtactactactcagtattgtcgtcacatgcacatatatgtacataaagagctagctacctgagctctacccaaggtcgcgttgatcgatcgatcatggcgcggttcgtggacccgctggtggtggggcgggtgatcggcgaggtggtggacctgttcgtgccctccgtctccatgaccgtcgcctatggccccaaagacatcagcaacggctgcctcctcaagccgtccgccaccgccgcgccgccgctcgtccgcatctccggccgccgcgacgacctctacacgctgatcatgacggacccagatgcgcctagccccagcgacccgaccatgagggagtacctccactggatagtgactaacataccaggaggaacggatgcaaacaaaggtgaggaggtggtggagtacatgggcccgcggcgca

SEQ ID NO: 12606 - DNA, 442 bp, Zea mays
  Clone ID: 701185506_FLI
ctctcccccccctgtgtgtggttatgtatttgttgtcataaagatgattttgactccagctaatctggtgtctgcgctattggcttccctttagcgccacacgtttgttgtatggataattttttttgagccaatgtttcgccacgctttgccgctgtttcaaacaggcaccacctgaagacattctgatgtgcttgtgatgcttaactaggaatacagtgccaggtaccaagctgattgaaacggcaaggtatctgaaaggttgggtgatgatgaggccttatgccaagcgtgccattctgttggtgctcgaatgcgtgcggtctacaggtaagcgattttaagggcatgtacaacggccatgtacaattggttttctttgtacaagagacatttaagaaactgtatcatacagtggagagttcttaaaatcagtcatatc

SEQ ID NO: 12607 - DNA, 510 bp, Zea mays
  Clone ID: 701185551_FLI
gacacatcgtcatcgatcatcacacgcaatcgacacaagaagttaataaacagcccaaggacgcagagatcagctgatcgagaaggacttgtactactactcagtattgtcgtcacatgcacatatatgtacataaagagctagctacctgagctctacccaaggtcgcgttgatcgatcgatcatggcgcggttcgtggacccgctggtggtggggcgggtgatcggcgaggtggtggacctgttcgtgccctccgtctccatgaccgtcgcctatggccccaaagacatcagcaacggctgcctcctcaagccgtccgccaccgccgcgccgccgctcgtccgcatctccggccgccgcgacgacctctacacgctgatcatgacggacccagatgcgcctagccccagcgacccgaccatgagggagtacctccactggatagtgactaacataccaggaggaacggatgcaaacaaaggtgaggaggtggtggagtacatgggccc

SEQ ID NO: 12608 - DNA, 398 bp, Zea mays
  Clone ID: 701185555_FLI
aacttgcctctggtggcaagctctgtcccgcgctgattgtcataagagagcacctcccttctggtaaagcatgcttaagagtcaacattgatgcaaccagagtgggaaatgtggctcgctttatcaaccattcatgtgatggaggcaacctgcacccagtgctggtgaggagctctggtttgttgctcccaaggctctgcttctttgctgccagggatatcgtggagggagaagagctcaccttcagttacggtgatgctagggttaggcccaagggtttgccatgcttttgtggaagctcgggttgttctggtgtgcttccttcagaagaaacttaagaactgatgccatcaccttggatgtcttacaaatgagtttgattctatttctgacttcgc

SEQ ID NO: 12609 - DNA, 1076 bp, Zea mays
  Clone ID: 701185646_FLI
ggacttcaatatttgtctggtgacatatctggtggcaatgctcgctgtatagcaatgcttcttgcattcagagaggcaataaatgattactccatgccttctgaaaaaattctgaatagagatcttactgctaaaatcagtagctatgtgtcatttctcatcgagtgcagaccactttcaatcagcatgggcaacgcaattagatttttgaagaacaggattaccaagctaccacttgcattttcagagtcagaagctaaagttagtcttcaatctgatattgatcgctttataaatgagaagataatagttgcggataaggtcattgttagtcatgctgtcacaaaaatcagagatggtgatgttctattgacatttgggtcagcctctgtcgttgaaatgatttttgataatgctcatgaacttggaaagaaatttcgtgttgtggtggtcgactctcgtccaaaccatgagggacaaggattgttgcgccgattagttgcaaagggtatcagttgcacatatacacacataaatgctgtatcttacatcatgcatgaggttacaagagtgtttttgggtgcctcttcagtactatcgaatggtactgtctactccagagttgggacagctttggttgcgatggttgcacatgcttttggagttcctgttctagtgtgttgtgaagcgtacaagtttcatgagagggttcaactcgattctatatgctttaatgaacttggtgacccagatgctatttcaagagttcctagggatgaaagtttgagcaatctcaaaaactgggctgagaatgaaaatcttcatcttctgaatcttaagtatgatatcaccccttccgattatgtttcaatgctcataacagattatggaatgctcccacctactagtgtaccagtcattgtaagagagtaccggagggagcacgtttggatatagaagccaccgttttcctttctggttttgtttgagtttgtaatttgttggagttcatcaccggcacagctgatcggtttggactttggaccacttgaacattatggccggtttcaagatcc

SEQ ID NO: 12610 - DNA, 1252 bp, Zea mays
  Clone ID: 701185673_FLI
gttgacttcgagtgttctagtggaatactgctgcatatcgaaacaagacttgaggttcaggcgccagagctggaaaaggacattatgaagactgatattagaggcaatcctaatggggacgcgagttcagatttccttgatagtattgagcaatatggtaaccaattcgggccttcagaagtttcggattttgcagcagaggtcaacgatgaagcagataccttaaggaaatcaaagagcgctgggtgggcatcaacatatatgtcaaggtggagaagtatcttgaattcaatagcggaccaggtttcacaggtgccgctatcattggcgattaaaatttcttcagttcgtggaacgatgcggatacatctaaagcctcctccgggtgatcgagtttggtatgggtttacgtccatgccggagatagagtgggagttggaatcatcggttggggataggaagataagcagcagttacatcgcctcgcttatcggcaacaggatcaaggcttcggttcgtcagatcttggtgatgcccaactgtgaaagctttcctatttcctggatgatagcagatacggatgactgggtgccccgcagaattgcaccttttatatggctgaaccgtgagcccgctgataggcgtgctgcagacacaactagagagatgatgccaggggaagcttccacatccaaggccattgcaaagaacaagtcgagtccgctgccgtctacaaaaagaatcaccaacggttcctggaacaagacaaagatacgtgttgatgggcaagagcaagagcaggcagaagcatcaacgagctcgcagtcttggctggtttcagcaaatggtgatgcaacaagggaacagctgaggatgccactgctgagcagcagcggagacgagagagcaggccctgtggaggagcagcaagcatcaccttctgctgctgaggaggagggagatgcgaagaagaggaagaggcgtgcacgggtgatggatctaggaaggaggatgggcgacaagctggaagagaagggcaagcgtttcgtcgggaagatgcgggagaacgcgaggaacaaccgcttgctattgccggacttggagcaggccaccacccctcctgctcctgctcctagttaggcattttaaggatgttactcgacaaaatgaaaattaatcagttgcagcgcctagcaacagctcctaattaggagcacttgtattatgtaaaagaaagaaagaaaaagcttat

SEQ ID NO: 12611 - DNA, 359 bp, Zea mays
  Clone ID: 701185694_FLI
aatcaatcgaggacatggattcaatgggagttgcgtcagctgatttgaatttccaatccagcggtttgctttcggctaagagaataatggagaacatgggctggaagcagggagaagcccttggaaaaagcagaaagggcattgtagaacctatacagccttccatcaacaaacatggtgccggtttgggatggaggcaaacccgctaagatgttcctttgaagattccagtctttgtatttgtatcctctgaaggtaagttccaattgtatcgaataaaccggagggaactgaattgaacttgattctaaattttgctgcttctctcacacagttttaaaaagttgcaacttgtactt

SEQ ID NO: 12612 - DNA, 1155 bp, Zea mays
  Clone ID: 701185742_FLI
gtcgtctgtgagtgcatgcgaggcctccggttgatccggctctctctcggtgcagttcgtccgggagggggagataagcgaggtggagtggtgtggtcctaagccaagccaactagatcgagtcgtcaagaaggttggagaggagagagagatggggaagcaggcggcggtggtgctggccgtgaacggcaagcggtacgaggccgccggcgtggacccgtcgatgacgctgctagagtacctgcgcaccgagacgcccgtcaggggccccaagctcggctgcggcgaaggtacgtgcccgccgtacgtcaccatggaatggatatagatagatgtgcatgcactcttgtatacctcgtgccttcgtctccccagctagctagtggattcgcggctgagcttctatagcttggttgttcctcaacgtcaggagagaagaccgccaagcacacagatgcctgtctttgtagtagaggggaatataatagggcaataggcggggagggaatccgcgtacaccgtacacgtacgtacgtgtaggcttcaccgtatatatgttcttcgtcggcccctttgcgttcccgctcctggcctgcctgccttcagttttctcgtttcccctcctccccgattttcttgtgaggtcagccgtctgtctcactgacgcgccaagaagctgagagccatagaaaggcacaggtgacaggacatcccatcccgtcccactatcccagtacaagattcgtaaaagcccaggtgtcccagatacaccctctctgatcgaagaaaattcagacacgatatattattaccatcttcaattaacaaagcaacaacagcgagatcacagttttcgccagaaaagacagctcccagtcccaggctaggcatctagcctgctttcgtgccaaaacacccaggaacagacgaagagactaaataaacatacatgcatgcacagcagcacccaggttgaagaccactctgttctcggtttcggcaggcaactgctaatccaattcctgctcttcaggtcttcttcgtcatactagctgaatgcccgtgcgttgcaacgggaatatataataccagtatactacgataacttgtatacaaaatgtgtgttataccgttataagaaaatgtttcataatc

SEQ ID NO: 12613 - DNA, 1903 bp, Zea mays
  Clone ID: 701185792_FLI
gctgtcaattgcccatcttggtccactctgctgaagtacacatgaagctaaaattgcaggcttttttttctcacagtgaaatatggcagctaagcaaatcagctttcgaggataagaagatggacatacataccaagcttatgaggagatacaggcaggtccccgagtggtggttcatctgcatccttgtggctagtgtttcagccaccatgcttacctgcgagtactacattgagcaactgcagcttccttggtggggagtactgcttgcatgtgcccttgccattttctacacccttcctattggaattctcaaagcaacaaccaaccaggtatggactccaaacaaacatgaatgcaggtgcaaaactacatagtatatagcagcaacatacagcccaggagcaggaacacagctaacaacacaagtgtaacaggctccaggcttgaatgtcatcacagagtacatcatggggtacctatatcccggacgacccatggcgaacatgtgcttcaaagtatacggctacgttggcccacatcaagcactagagtttttgcaagattttaagttgggccactacatgaagatacccccaagggccatgttcacggctcaggtcagttcaactagccacaccaactataagtattacactaacaaaagaatgataactacatgctccagttacatctataatgttgtccatattggaaaataacaggttgtgggcactttgattgcgggctccgtataccttggaacaatatggtggctcctggacacaatacctgatgtgtgcaacacagagcttctcccagcaggcagcccttggacatgcccttacgatcatgtgttctacgatgcatccgtattatggggccttatcggcccacgcagaatatttggtgatttaggcacttactccgctgtgaactggttcttcctgggcggtgccattgctcccctccttgtctggtgtacacacaaggcattcccagctcagaaatggatccggcatgtcaatgcgcctgtactgattggcgcaaccaccttcatgccacctgccactgcagccaactataccacgtggatactcgttgcgtttctgtcaggttacgtggtctataagtaccggcgtaactggtgggagcgacacaattatctgctgtcaggtgcccttgacgccggtttggcgttcatggctgtgttgctctatctatgcctgggactggagaataaaagtttgaactggtggggcaatgatctggacggatgccctcttgcttcatgccccactgcaaagggtataactgtggatggatgtccagtgcataactgagagaggtcaccattcagtatttgagggtagaattacattatctctaaagggacatatgcacagatcactgaaccatacagataattgagaggttcccttattgctgcatccatgcctaggagtggagaacaaaagtttttgctaggacaatggtttggatggatggcttcatgccacgctgcaaagcacattgaacttcacatagatgtctggtgcataattgagagtattctaatcattgccagtactgggggataaaactagattatatcttgatgacaccatcaaagatcaatgtagtctttgccaaattataaaagatctcaactacatgatgaagacacagtcagaagtgtgagtgtatttcagataagaactaaccagattcagattagaactaatcagcaggaatagcagccattaatgaatacaaatggctggagtctgacaggagtagcattgcagcaccactgtaacagttggtaattgtcgcatgtcagctgtcagcacaggtcgatcatctgctgaacactaacgctcccgaggccctccacgagttc

SEQ ID NO: 12614 - DNA, 680 bp, Zea mays
  Clone ID: 701185825_FLI
gaagcgcgtggcggtgggcatcgtggccggcgcgcacgcgtcgtcggggcggtcgtcccgcgcgcacgccgtggcggtgctgtccgtcgcctcgttccagctcctgttcatgctgctcgggaagcccttcgtcaagaagcgggtgcagctggtggagaccctgtcggtggccagcgaggtggccgtgttcgcggcgtgcctggcgctcatcgacaggacggcatcgagcggcgggtggctgcccgacggcgaggcgcgcggcgtggggctggcgatgctgggcgccttcgtgctggggttcgcggcgcaggtgtgcaacgagtggaacgcgctgtaccggcaggcgcggctgctgagcgccgaccggagctccttcctggacggcgccaagacagcgggcctgggcctgctcctgctggtgctgccgtcgtctgcgctcggcgaccaccgggatccgccacctcccgacggcggtggaggagccggggagagcgtgtcagcgtcgacggtggccgacgggggcaggggcgggagctccaacaacgagcggtggtggcttgggcagctgcgggagatggcgaaggctagcttcagcaaggagagtaatgcgtaagaatgtgtttggtactgtatctcggaacatgtaacatcagaaatcagcattaaacgattagaatgac

SEQ ID NO: 12615 - DNA, 733 bp, Zea mays
  Clone ID: 701185832_FLI
ttctgttctcctccccagccgccagaatagtatccagccgccaggaagcatggccgacggcgcccttctcatcctttctctgtttctgttcttgcactgccaggccgtgccctttcccactggtgatggcgagtagctcaactggcccttaccgccaacgagtgcgtccccatgtgagggtgcgcggtcgtcggtcggtggccggtgagagctcggctagcccaaaaaaaaacaaaaatatgtcggccatcgccttttgaaccttgcccgacgaccaaaaccggccgcctctcctctctgttcatgctctttctaatctctgtttctaagttccagaccgctcacccaagaaccggtcgccaggagcttgggccgaccgagctatccttttctccctgctccttttggccgttcgccccttctccttctttgtttctgttttttttatttctttctagcatctagccgctagttactctctctatttctgttttttttatttcttgttcttgaatctggcgctatttccctcgccttgcgcgggcaggtcttttccttcaccagagttggtcggccgattatggggcgccgtctttaacctttcgaaactcggatctagtccccgtttactcgaatcccttattgtgtgtgaatgaatgtatgagatggatctaatgtaatattcgggatcgagttttgagctgataaaacgtagatccgagcccctgcgttt

SEQ ID NO: 12616 - DNA, 860 bp, Zea mays
  Clone ID: 701185862_FLI
accagcacacctgcagatcaactggcttaatgctctgggaatctgctcaattcatgtgctgtcttttagcagagaacccttcgatcgttgcaagcaaaagggtcctggagttgggctgtggctcagctggcatctgctcgatggttgctgcaagtttcactccctttgttttagctacagatggggatgaagaatcactggacctccttagacaaaatatctcctcgaacatggagcctaatttgctgagcagaatcatggttaggaagttattctggggcaacgaagatgatatgaaggcagtccgagagcttcatggtaacggcgtgggttttgattgcataataggcaccgacgtgacatacaatcctgatgctatactccctctcttcaagactgctaggggagtgatttctgagaaagctaacgaggactcggtacctgctctcattctttgctacatccagcgacgagttgatgaggactccatcctttctaatgcaacgtcccagggtttcaggcttgtggacaaatggataaatggagttcacgagagtaacggtaccatcagttcttggttctctggtaatgatgtctgcagtgctttccggcatacagtactttcagtactgtacttcgagctgtgaatgctgctatgcatgtgcaaggttactgtataacctgaaggatttttgtagcagctgtatcaagcaacggcaaaccaactttgaatctttaggccttgtttaatgatttcaattttacgtgaatcggactgtactggaatggattgagatagattttgacttctatggatttaaattgacttagtgccatccaatccatatggattaacggtg

SEQ ID NO: 12617 - DNA, 726 bp, Zea mays
  Clone ID: 701185909_FLI
gcagaagaagcgaagtcgtcgccggagcaggaggaagagcgagcagcaagatgtcgtggcaggcgtacgtcgatgaccacctgctgtgcgacatcgaaggccagcacctcagcgccgccgccatcgtcggccacgacggcagcgtctgggcacagtccgagaacttccccgagttaaagcctgaggaggttgctgggatgataaaggactttgatgaacctggaactcttgcaccaactggtctttttgttggaggtacgaagtacatggtgatccaaggtgaacctggagttgtcatccgaggaaagaagggcactggaggcattactatcaagaaaactggcatgtccttgattatcggtatctatgatgagccaatgactccagggcaatgcaatatggtggtggagaggctcggcgattacctgatcgaacagggcttctaagtttgtcataatgctattttggtcattgggcacttaagtttgcacctcatttggttctgtaatatgtgggcttgtgcatgtgcttggcgtattgcatgcagtgaataatttatcttcgcgttgggttggtgacaatgttgggaacggatttgaattggggtttatgcttgccatctcctcatatctcgaactcagctgctgtttcactgagtaatgtacatttccctggtaatggtacttgtgcactctgctgctttatggaaaagagtgcattttactg

SEQ ID NO: 12618 - DNA, 554 bp, Zea mays
  Clone ID: 701185927_FLI
cgacgacgacccgttcccggagctgggctctctaccggcgttcgacgacatgggcgcagccccagcccctgccggcgtcgtcctgcccaaggaggaggtggaggacttcggcgacctcggcggcgacgactggctcgcgggcatcaacctcgacgacctgcagatgccgggggacgccgccgatttctacggctccatgctcgtctcgccgatggccgccaagatggagccggacggcggcttccccttcttctgagatccttcggcgactccggggacgaccggatgcagcgcaacgcaaactgtgtatagttcagattttcttcatggaaccaacaacaacaaaaaaagttcttgctaatatcttgttctagtggtgtagtgcagaagtagcagcaacatgattgaagttccattgtagtactgatgttcatcgccacttgagctgtgacaagtgacgacattctttcgtttcttggctgcaaattcttcgttgtccagaatataatttcagccaagaaacgaaagaatgtcgtcacttggttctagatcgc

SEQ ID NO: 12619 - DNA, 1153 bp, Zea mays
  Clone ID: 701185934_FLI
gtccgtttcctctgcttgtgcttgaggtatttctcctggttgcttgcagagcttgagtccgcccttgacgagtccgccaaggcgcttgctgaggcgcttgccggagctgccgagcagagggatgcggacctcgcggccatgtccgaggccgtctcggacttttatcgtgtcctgggctccggcgatgtcccttcaggaagctcccctcagagccgccttcgagccttgggtgatcacgcgcgcggcagagtccgcgaagcgctacaccacggcgtcaggcgggccttcgccgtgcttgcttcccactatgttgtggacctggagcgggttagtgaggggtactgtcttcctgacgaagacgatgctgccctagcggaggtccagcggctcgacgcggtcgccgcgggtccgagcgcggtgctggcgaccacctttgaggcggagatccttccccctgcgacgtcaccggaggccgagatggaccccaccgacggcagggatggagctgagggcgcggctccttcccaaggcggcgcctaattcttgtttgaacagtttcttgttggatgtgcgtctcaccgcggctgctgaggcctgaacactttgtctttcttgcatggagtcgtactctcctttctttccatctgcatgttcgtcctggcttgtcaataatagggtggcttctcgagttgggccattcttcgtggcaggtgatgagtgaggtgtccctaacccggaggcacaggagcccctcggctcagtcggccttgccatttacatgtacccgcgttcgctcctcgagaccccgcttctgacatagccgggagaacgcaagaggccccttttttgattgaaaatttttgacacgaagaagtatgcccgatcttgacgcagagatgttcccccttcttagcccccgagggagggtcgggctctgccaaggcgaggccgacccttccttgatgaccgaggcgcagaggctgcctgacggatcgggctccggcccggatatccagcgagtgtttggcgacatccctcggtatgccgggcatgtccgaaggactccgcgcaaagacgtcggcgtctgcgcgaagaaagtcgacgagcactgcttcctatttggggtcgagcccggaaccgatccggatctgct

SEQ ID NO: 12620 - DNA, 762 bp, Zea mays
  Clone ID: 701185950_FLI
gctcaggttcagcggaaactgagccgtgagcaccgccgccgccaccacctttgcgtttgcggtgacgacacgacaccaataatggcggcggcaaggacaaggagcctgctcgcggcggcgttcctggcgctggcggcggtgccggcggtgctctgccaggcgccaggccccgcggcggcggcgccgcccaacaagggcccgccgaacgttacggcgatcctggagaagggcgggcagtacacgacgttcatgcggctgatgaagtcgacgcagcaggacacgcagctgaacggccagctgaacaactcgttcggcagcgggtacacggtgttcgcgcccaccgacagcgccttctccagcctcaagcccggcacgctgaacaagctgtcgcagcaggagcaggtgtcgctggtgcagtaccacgtcctgccgcagttctactcgctcgactccttcgagaccgccagcaaccccgtgcgtacgcaggcgtcgggctccgacgggccctacacgctcaacatcaccgccgacagcagcggccaggccaacgtgtccacgggcctcgtcgccacccgcgtcggccaggccctgcgcgcgcagcagcccctcgccgtctactccgtcgaccaggtgctgctggccaacgacctgttcggcgtcaagcccccggcgtccgcgccgcccgccgccaggaagccggccaagggcgggtccgtcgccgaggcgcccgccgccggctcggctgacgcgccgccctccggc

SEQ ID NO: 12621 - DNA, 994 bp, Zea mays
  Clone ID: 701186021_FLI
cgcccgatcaatcttcctcgttccgccgctccctcgcctccggcagcgaggtgaggccaccgatcggaccttccctagcggcggcgcctaccaacctcaaggagcgatggctctgtctgcgacgctacggatttctcttagcgtcgcgttctttggggttctggcgttcgtgcttggtgtcatcgccgaaaacaaaaaggtctgccctttctcctgttacatgagcactggtcattatgccttttcgttttcctcgtcaaggatggtgaatccagcgcgagtttaggcggatttctcgatactgaactcctgcttccgggactcctatcctaggaaaggatgtcgtcatctgcacgtttccaagtgatccgactcttgcgatggggagcctgtccattgtggcacttgtggtagctgccatcgtaggccatgttgccatcttctttccatactcgggcaagtcagttcctcgtggagcgctgtttcaaagcacagcttgacagtgttctttgttgttgctgagcttgtctcagccctggctcttgcaatgtcgctgtgggcaactgtcaccgagggtcttcaccgcagcaagaacatccaccacgacatggactaccagtgccctactgccaagaccggcctgttcggcggcgccgctttcctcgcccttgacgctgctctcttctggcttgtttgccagatgctggccctcaatgcaagggctgactaccttgacgaggatgacggcaagggagaatatggccagatttatgctgctcaagtcgatgatggctcgaaggtctgagcctatgtggtcatgctcggcagggttctatgattagtgtcatttggctacattatgccatcaacaaagtcgctttagctctcagtaaatttgtatataagttgcaaagtcttacataaggctggtggttattgcactttcgtgtttcagtgtgatcgataaacagtatctcagtacaatcggtttgct

SEQ ID NO: 12622 - DNA, 1009 bp, Zea mays
  Clone ID: 701186070_FLI
ggcgcgcaagctggggcctgcagcctcgccaggtggccgtctggttccagaaccgccgcgcccggtggaagaccaagcagctcgagcgcgacttcgaccgcctcaaggcctccttcgacgctctccgagcggaccacgacgccctcctccaggacaacaaccgcctccgctcacaggttgtgtcgttgaccgagaagctgcaagagaaggaggatgcgacggagggcggcgccaccgctgacaccgccgcgccggcggtggacgtcgaggcttccttggccgacgacgtcgaggagccagcagagcctgcggcgacgttcgaggtgctgcaggaggtgaagtccgaggacaggctgagcaccggcagcggcgggagcgcggtggtggacgcggacgcgctgctgtacggcaggttcgccgcggcagttgatagcagcgtggagtcgtacttcccggcggcgaggaccactaccacgactgcgggacgatgggccccgtgaatcatggcgccggaggaggcatccagtcggacgacgacggcgccggcagcgacgaggggtgcagctactacgccgacgaagccgccgccgccgccgccgcgttcttcgccggacacgccacccaccaccacgcggacgaggacgaggacgccggccagatcagctggtggatgtggaactagacgttcgatcttcccacgccgatcgatcgaccgtcttcgaatcctgtgtcaacaagaagaaaaaagaatcgtgccgtgatttttctttgcgcaacgctgctgtaagcctgtaatggtgaatttctagctatggttatgccgttatgaaggaagaaagtgtatgcatgcatggtagggtaaagagtgggtaattaatatcgttgatcatcccagtcactcgtggtgttccagaagatcaatggagttgggggagaaataagtgcgcatagaggcaagtactactctttttatggcacagtgcctatgtcaaatcagggtgttattacc

SEQ ID NO: 12623 - DNA, 995 bp, Zea mays
  Clone ID: 701186075_FLI
ccgcccgatcaatcttcctcgttccgccgctccctcgcctccggcagcgaggtgaggccaccgatcggaccttccctagcggcggcgcctaccaacctcaaggagcgatggctctgtctgcgacgctacggatttctcttagcgtcgcgttctttggggttctggcgttcgtgcttggtgtcatcgccgaaaacaaaaaggtctgccctttctcctgttacatgagcactggtcattatgccttttcgttttcctcgtcaaggatggtgaatccagcgcgagtttaggcggatttctcgatactgaactcctgcttccgggactcctatcctaggaaaggatgtcgtcatctgcacgtttccaagtgatccgactcttgcgatggggagcctgtccattgtggcacttgtggtagctgccatcgtaggccatgttgccatcttctttccatactcgggcaagtcagttcctcgtggagcgctgtttcaaagcacagcttgacagtgttctttgttgttgctgagcttgtctcagccctggctcttgcaatgtcgctgtgggcaactgtcaccgagggtcttcaccgcagcaagaacatccaccacgacatggactaccagtgccctactgccaagaccggcctgttcggcggcgccgctttcctcgcccttgacgctgctctcttctggcttgtttgccagatgctggccctcaatgcaagggctgactaccttgacgaggatgacggcaagggagaatatggccagatttatgctgctcaagtcgatgatggctcgaaggtctgagcctatgtggtcatgctcggcagggttctatgattagtgtcatttggctacattatgccatcaacaaagtcgctttagctctcagtaaatttgtatataagttgcaaagtcttacataaggctggtggttattgcactttcgtgtttcagtgtgatcgataaacagtatctcagtacaatcggtttgct

SEQ ID NO: 12624 - DNA, 575 bp, Zea mays
  Clone ID: 701186148_FLI
gtcggtgatcttccctgggaagtagattaccttcggggttggaggagctcaccattagggcggttctttgcctaccgacagcgaggaacggcggtggcctcacagtctcacacaggggcagtgagttattttacctctatctgccggaagctcaaaatcatgaggggctctgatgctgttggaatagctccacgaaccgtcgagcagacaggtcagaacaaataagctttggcctttgcctgcatccaaggaagacatctgagctagctgggagactatgttgaaggctgaagcctgaaatagttgccgggaatcgtcaaaacccgtcaagtgtttagtgtagttttcacgtgtccttgagacatgtgcatttgtatgtctgtgacgtgatccgttagatcgtgcaatcgtaggttgctgttcttgtgccctttgaaggccagacagatcagggagctctctgcttccttagtgcacttgctttgcagcattccttgttattctactctgaaatcatacatcatgccacaagaaccgatggttcgtgatgtcaagagagctgccctaattgttcc

SEQ ID NO: 12625 - DNA, 984 bp, Zea mays
  Clone ID: 701186172_FLI
gtccaccgcaaccattcggcttctcccaaatcccggcacggcggcacgggacctctccctctctctcccgctggcgggcgatggcctcctcctcctcttcctcacctgcgcccgccttggccggggaggcgctacgccagaaacgcatcctctccagcaagctctacctcgaggtcccgtcctccaaggcgccggtggtttactcgccggcatacgacatctccttcctcgggcttgagaagctgcacccgtttgaatccgccaaatggggccgcatctgtaggtacctcaccagggaagggtacctcgacaagaaacggatggtggagccattggaagcctgcaaggaggatttgctagtggtgcacacggaggcgtatttgaacagtctcaaatgcagcttcagagtttcctccattgtagaggtccctcctgtgtcgcttgtccctaattggattgtgcacagaaagctactacaccccttccggaagcaggtgggtgggtccattttatcagccaaacttgcatttgagagaggttgggctattaatgttggtggaggatttcaccattgttcggcagatgaagggggtggattttgtgcatacgctgacatctccctctgcatccattttgcttttgtccgtctaaatatctcaagtgtattgatcatagacctggatgcccaccaaggaaatggacacgaaaaagattttgctaatgatgcatttagatgatgtaattgttcacagatcgaaattgaaaaacagcagtttttttctcgaacgaagctggagagatacgtgtctttgcatatagaagagaaaaaatagtacaaggagagatcaaaagacctctccaagagaaaaacagcagttccatccaactgttatactgcaatgaattccgacggtctcatgctatcagttttgtaacagtccacattaatatgatgtagacaccaaaataaaggacgggttttgt

SEQ ID NO: 12626 - DNA, 662 bp, Zea mays
  Clone ID: 701186219_FLI
ggaaactgaacgatgggcacactgcgggtgatcaggtggcagcgatgtgaggacggtcagcatggccatggagatgctgatgaagcctaggttggtcatcctagatgagcccaccattggtttggatagaaactctttcaggcatgaactaactgtactggagaaggttcgacactgtactatgttgttcagttcgtcggagctgtcactcaggacatacctatgatgattgtttctgaactccatgaagagacttatgagatgtatccagaagaaagcaaagttacgtgcgcaaaaggtgctaagaaatggccttgatatttccagtgcatggttcgaagagcttcacaagcagagttcagagagttgctgaattgaaaaggggaattggagaagtcagaaaattctatcgggaactctctacatgatggatatctcaatatgggcacctggaaggtaagggaaacacacgcccattctcacaattgagcagatgttcatgcttcctgcaactccccattttgcattcagaaggtcataatttggtaatacatggcaaacggatgtgagtttatagtataactgtctgtattgaaactataacatcttaggaaatagtcaaattaaatttgggcctggatataaaattgggattctgtttc

SEQ ID NO: 12627 - DNA, 732 bp, Zea mays
  Clone ID: 701186234_FLI
aaatttgacatcttttttttttggaatttatttgagatctttcaaacatctccaatatttgtttagaaattaatgcacttacaggtacgacttcctgaaaaaatcctagtgaaattcacaggtccaaatccatgctatggtgtcgctcagatcatatgccaatggctgcaggtacaaggtttacgtggaggggaacgcgtggtcggtgagcgagaagtacatcctggcgtgcgactcgccggtgctgttcgtgacgacgctcttccaggaaggacatcctgtgtccagggggctcgtcgccggcaatcactactggcccccatcaaccgggagcacatgtgcaagtccatcaacttcgccgttggctggggcaacgagcacccagtgcaggcgcaactcatcggcgagcagggcagccggtttgtgagggaggagctgagcatggactacgtctacgactacatgatgcacctgctcaccgagtacgccggactgctccggtacaagcccgccgtgccggagaaggccgtggagatatgcacggagtccgtggcctgccctgcccagagcctgcaccgggactgcatgatggattccatggagagtcacgttgcaggcttcgacctatgcacactgccaccgccgttcaccgacgaggaggccaaggcaatagccgacagggaagcggaggtcttgaggaaggtagagaagatggaggactaggcggcaagc

SEQ ID NO: 12628 - DNA, 612 bp, Zea mays
  Clone ID: 701186269_FLI
gccgccgcggcctccgccaggctcgtgaacgacttggacttgcccgcgtagaagctggacaggccccgcttggagggcagggcatcatccaaggattcgagcgtggccagccccatcatgccgagcccctgcgccttgctctcaacctcctcctcctcctccttgtcggacgcggagttctccccgatggaggaggagctgtcggacgacgccgccccgatcgacgaggcctccgacaccgcctcctcctcctcctcctctctcctcgccgccgcctcatcgccatgctcttcctcctcctcttcttggaccaagtacgcgttggcgctccgcatcatcctgtccgcctcgtccggatccggcttcccgctccccgaccgccggaatccgccgtgcgccggccgcgccaccgccgtggacatgcccgcgacccaaccaaccaaccaacctaaggacgaatccgacgacccggccggcagagcctccgccgcggcgtgcctcggaccggtcggcacgcaggaggagtcgaggagagcagcgaagcgagcgggcaggaaatctcggtgcgcgggcatgcgagagcggcggggaagggaaaggtgggagggagac

SEQ ID NO: 12629 - DNA, 655 bp, Zea mays
  Clone ID: 701186276_FLI
gaaaatcgccgcgtggtcggtccatccggggcgacttgacttccctctgcaacctcagaacccagccaatccgctgatctcaactgccaggcactccgatccggcgacgatggaggggagcgccgactccttcgggtccttgacggcgccgcttgcctggcacgacttcctcgagcgcatgcgccagccttccgccgccgagttcgtcaagtccattaaaagctttattgtgacattctcaaacagagctcctgatccagagaaggatagtactgctatccaggagttcctggaaaacatggaaggggctttcagagcccacaccccttgggctggcagttcagaggaagaactagagagtgctggtgagggacttgagaaatatgttatgacaaagctgtttaatcgggtattcgcatcagtcccagaagatgtgaagagtgatgaagaactttttgagaaaatgtctttgctacagcaatttgtaaggcctgaaaacttggatataaaaccagagtatcagaacgaaacatcctggctggtatgagaattaacttccctcgtttttggacattttttgcttgatgtattgcatctctggcaagctgcacacatgaataagtttctggtagaaactgaaccaggattgaattgt

SEQ ID NO: 12630 - DNA, 720 bp, Zea mays
  Clone ID: 701186296_FLI
gctcgactgctcagctctagcctccactccaagcaccggagtccgagagcccgcctgcagtgatggcggccaagcacctcaacctcttcgccgcggcgctgctcctcctcctcctcccctccggctccagcgccaccgccgtcgagtactgcaaaaaggggtgggactacccagtgaaggtgagcagcgtggaggtcgtccccgatcccgtcgtcaggggacagccggccaccttcaagatttccgcctccacaggcattggatgttggagaggaaactagcagatgcagatgtatctgaagaagagcaaaacaatatactgaaagatttagaaaaaaaggaggcggaatacatgcgcctacgaaggcataaaatgggcgttgatgactttgaattgctcaccattattgggagaggtgcatttggggaggtgagactttgtagagaaaaaactacatccaatgtgtatgcaatgaaaaagcttaagaagtctaaaatgttacgaacagggcaggtattccatgatgtttactcctgccaggagactatgtatccctccaaaaaaaaagttgtcaccgttttattgttttgcttccatgtactatttagcttccagagatgcatgtatatatatatctcaagaactgctactagagcactaaaatgttgaaaacaattattatggtggtggacataatacatctaaagacatgttcatcc

SEQ ID NO: 12631 - DNA, 1307 bp, Glycine max
  Clone ID: 701202303_FLI
atccttctaatggggccaaccggatcagggaagacattacttgccaaaactttggctcgatttgtaaatgttccctttgttattgcagatgcaacttcactcactcaggcaggttatgttggagaggatgtggaatccatattatacaagctcctcatggttgcagattataatgttgcagctgcacagcaaggcattgtttacattgatgaagttgacaagattactaaaaaggctgagagccttaatatcagtagagatgtttctggtgaaggtgttcagcaggcattactaaagatgcttgaggggacggttgtcaatgttcctgagaagggagcccgaaagcatcctagaggtgacaatattcagattgacacaaagaatatacttttcatttgtggaggagcctttgttgacttagagaaaacaatctcagaaaggcgtcatgattcttctattggatttggggctcctatacgtgcaaacatgaggactggtaaagtcacagaagctgctgtggcatcatcattattggaaactgttgaaagtagtgatcttattgcatatggtttaatacctgaatttgttgggaggtttcctatccttgtcagtttgtcagctttaactgaaaatcaactaattcaggtcctctcagaaccaaagaatgctctagggaagcaatacaagaagatgttccaaatgaatggggtaaagctacattttacagaaaatgctctaagatcaattgccagaaaggcaatatctaaaaatactggtgctcggggattacgatcgatactagaaaatgtgttggtagatgccatgtatgagattcctgatattagaacagacgatgatgttatagatgctgttgtcgttgatgaagaggccgttggaggtgaggggcgtgggagaggggctaaaatcctgtatggtaagggtgcattggatcaatatctttcagagcagaaaaatgattcagagaccatggaggcatcagctgcagataatgaagccgatacagaacttccttccattgttgccagcatgtaacatgttgcaaatatatattatagttatctttgtacatatagttgatacatttgttgaataatatacaagggttagaatcagatggttccatgtggcttgggctgaaatcaatgtaccatcaatgtagtttccacggtaaactccgtggatttgtttgcacaaatcatagtgaggtaaactaaatgccacatacttataagtgtactgtacctgattcgttatgtaaattttgagtggaattattgaaggaaccg

SEQ ID NO: 12632 - DNA, 3661 bp, Glycine max
  Clone ID: 701202428_FLI
cagagttgttcccaacttcacaccgctccgcgatctctcacaatccctctctccttggattccgcgcactccatttcagatcgataatcgcgatagcaccagcagaaatcagtctcgcgtttcctcaaaagcgcgaacaggatctgaatgcggtgaagttgttgtttaagaacgcgattcatggagtggacgacgctgcagcaccttgatctgcgccacgtggggcgcggcgtgagacctctgcagcctcacgctgcttccttccatcctcaccaagctctcgtcgccgtcgcaatcggaacctacatcgtcgaatttgatgcattaacaggaagcaagatttctgctcttgacattggagcacctgctgtgcgaatgtcttacagtcctacaagtgggcatactgtgattgcaatcctccaggattgtacaatacggtcttgtgattttgacttagagcaaacatgtgtattgcattcaccagagaagaagacagagcaaattttttctgatacagaagttcatatggctttgaccccactacaacctgttgtgttttttgggtttcataaacgaatgagtgtgacagttgttggaactgttgaaggcggtagaacacccacgaaaatcaagacagacttgaagaagcctattgttaaccttgcttgtcatcctcgcctccctgtactgtatgttgcttatgcagaaggtttgattcgagcatataatattcatacctatgctgttcattacacactacaacttgacaatactataaagcttcttggtgctggtgcatttgcatttcatccaactctggaatggatttttgttggggatcgacgaggtacactgctggtatgggatgtatcaactgagagacctagtatgattggaataaaacaagttggctcacaaccgataacatcagttgcttggctccccatgttgcgtttacttataactctatctaaggatggaaatcttcatgtttgggaaacgcgtgttacagtgaatcctaatggacctcccacacaggctaatttttttgagcctgcagcaattgaatcaattgatatccctcgcatcctttctcaacagggtggagaagcagtttatccattgccgcgaatcaaagctttagagtttcatccaaaatctaatttggcagcactagtgtttgcaaatgcgacaattgcggacaattcaaaaaataaggccagatacagtacagatgggagaaagcaactttttgcagttttacaaagtgcacgaggatcttcagcatctgttttaaaggaaaaactttctgccttgggttcgtctggagtgttggcggaccatcagcttcaagctcaactacaagagcatcatcttaaaggccatgggcatcttacaatatcagacattgcaaggaaagcttttctttatagtcattttatggaaggccatgcaaaaatttctcctatatcacgcttgcctctcatcactgttctagataacaagcatcatctgaaggactttccagtttgccagccatttcatttggagctaaatttctttaataaagcaaaccgagttcttcattatccagtcagggcatactatatggatggactgaaccttatggcacacaatctttcatctggatctgacagtatctacaggaagctatataattcgattcctggaaatgtggagtaccgtgcaaaatacttgatacacagtaaaaaacagcgcttatttcttgtagtgtatgaatttagtggtgctacaaatgaagttgtgctttactgggaaaatagtgatgcacaggtagcaaacagtaaaagcagcacagtaaaaggtcgagatgcagcatttattggccccaatgaaaatcagtttgctatacttgatgatgacaaaacaggattgggtgtgtatactctaccaggaggggcctctcaagaagctaaggacaatgataaagtttttgaagaaaatccaactgcaactgctgagactagtgctggttcaattcggggcccgacaccatttatgtttgaaactgaagttgatcgcatcttttctactccattagattcatctttgatgtttgcttctcatgggaaccaaattggaatagcaaagctcatacaagggtaccgcctatcaacttcaactgccaatggccattacatatcaaccaatagtgaggggaaaaagtcaattaagttgaaaagaaatgagatcgtacttcaggtgcactggcaagaaactcttaggggacatgttgctggaattttaacaacacagcgagtccttattgtttcggcagcccttgatatacttgctggcacttatgcaaattttgacaagggacttccttcatttagatctctattgtgggttgggccagccctcctttttttctactgctgctgcaatcagtatacttggttgggatggaaaagttaggtctatcctctcaatcagtatgccttatgcagtcttggttggttctttgaatgatcgattgttgcttgctaatccaacggaaataaatcccagacagaagaagagggttgagatcaaaagctgtcttgttggtcttcttgaaccaattcttattggatttgccacaatgcagctaagttttgaacagaagcttgacttgtcagaaatattataccaaataacatcgaggtttgacagcttgcgcataacaccaaggtctctggatattcttgctagaggatctcctgtttgtggagatttagctgtggctttatcacaatcaggtccacagttcactcaagtgatgcgaggtgtttatgctgtgaaagctcttcgtttttccactgctttaaatattttgaaagatgaatttctgcgttccagagattatccaaaatgtcctccaacatctcatttatttcatcgattcaggcagttgggttatgcctgtatcaggtttggtcaatttgatagtgcaaaggaaacatttgaagttatagcagattatgaaagtatgcttgatctgtttatatgccaccttaatcccagtgccatgcggcgtcttgctcaaaaattggaagaagaaggtcttgactcggaattgaggagatattgtgataggatattacgtgctcgatctacaggatggacacaaggtatatttgccaacttttctgctgagagtatggttccaaaaggacctgaatggggtggtggaaactgggaaattaaaacacctactgctgtgaaggatatacctcagtgggagcttgctgcagaggtgacaccatacatgaaaactgatgatggtacaattccatccattatagtagatcatattggtgtgtatttaggctcaatcaaaggaaggggcaatattgtagaggtgagggaagatagtttggttaaggttttcatgcctacgggtaatgagaataaagtaaatggtcttgaagcatcttcagttaaatccatatctaaacagtctaatgtggtcagtaataccaaaggtgattcattgatgggtctggaaagccataaccaacagcttgccagttcctctgctgatgaacaggccaaagcagaagaagaatttaagaaatccttgtacggagctgctgctgatggaagcagtagtgatgaagaaggagtatccaaaatg

SEQ ID NO: 12633 - DNA, 1273 bp, Glycine max
  Clone ID: 701202443_FLI
gtgagatgtgagtgacggtgatacctttcgtgcgtttacttttcttttcttttctctcttcacatcaaaatcacttatctctctctctagagaaaatggcagcttgcatattcacggtggcacaggacggaaccgcagatttccaaacggtgcaggaggcgatcgacgccgtgccgctcggcaacattcggcggacggtgattcgggtgtcgccgggaatctaccggcaaccggtgtatgtccccaagaccaagaatttcatcactctcgccgctctcagccccgaggacactgtgcttacctggaacaacactgccaccggaatcgatcaccaccaacctgcgagggtgatagggactgggacgtttggttgtggaagtaccattgtggaaggggaggactttattgctgagaatattacatttgagaattctgcgcctgagggttcagggcaagcagttgcaattagagtaacggcagatcgatgtgctttctacaattgcaggttccttggatggcaggacacactatacttacattatggtaaacaatatttgaaagattgctacattgaaggaagtgtggacttcatctttggcaacagcactgctcttttggagcactgtcatatccactgcaagtctgcaggcttcataaccgcacagagcagaaaatcatcacaggaaacaactggttatgtattcttaagatgtgttatcacaggcaatggaggaaattcatatgcatatcttggacgaccgtggggcccttttggaagggtggtctttgcatacacttacatggatcaatgtataaggcatgttggctgggataactgggggaaaatggagaatgaaagaagtgcttgcttttatgaatacaggtgttttggacctggttgctgtccatcaaaacgagtaacgtggtgtagagaattgttggatgaagaagctgagcagttcctcacgcatcctttcattgatccagaactggagaaaccttggcttgctcaaaggatggccctcaggattccatattctgcttgaaaatcacttagggcagggattgatgagaatgttccaaacagacaatcacagtgtttctacgcttaatatcttgtttgtttggcactttggcttaagaaaatatgccatgtttgcatccgtgtgaagtgctagatgatgtgttttgtatgaaatctcccaagaggctatatttccttcattgaagagttttgtgtgtgtgtaataaatagagtaagagcttcatatcc

SEQ ID NO: 12634 - DNA, 891 bp, Glycine max
  Clone ID: 701202518_FLI
tttaactagggtttttggaatttcgaataaagggaaagagggtgcaaagtgcatcttctttttgttgttctctcaaactttaacaatctcataaataaataatcagaacgaagaagaagaagaattgaattcgaaaaatcgtagcgtagcgttggttgcgattgaaacggtacgatgggaagaggaaaattcaagagcaagcccaccggtcgccgccagttctccaccccggaagatatgcttgctggaacctctaaccgtcctcgaacttttagacagaaagaagctgagcatgaagaggagcctgaggaagtatctggggatgaatctggagaagaatcagaagaggaaacttctaagaaaaaaggaacacaaggagttattgagattgaaaatcctaacttggtaaagccaaagagcttgaaagctagagatgttgatgttggaaaaacaacagaactttcaaggcgtgaaagagaggagatagagaaacagagagcccatgagcgctatatgaggctgcaagagcaaggaaaaacagaacaagcaaagaaggatttagaacgtttagctcttatacgtcagcaaagggaagatgctgctaaaaagcgagaagaagagaaagctgcgaaagagcagaagaaggctgaggcgcgcaagtgagtttcctggaaaatgtcatgccaccaaaaaatttgctccaattagtaaggtggaacggttgctcctactacacttaaaacattatgtccatttggctttatattatggtattaccacaccaagctggtaacatgtaatgcaattatattttcatattctgtggtttaaaatcgtgattatatataaacgtttttaaaaattacacattaggatatgctcttttttctg

SEQ ID NO: 12635 - DNA, 1388 bp, Glycine max
  Clone ID: 701202570_FLI
cagattattaagaacttgcagtgagcaagagaagtcaatagccggattacaagatgggtttagcgaggagcttcataagaaccatcccatggagagtgttgacaagcacattgcaaaccatcacatggagaatgttgacaagcacattgcaaaaatgcgaatggagcaaatgagattaacgggtgtagaactagccttgagaaaggagttagagtcttgcaggtttcaggcagattctcttcgccatgagaatataatactcttgaaccggttgaaaggtgatggaaaagaaagtgttgctgctacttatagactagataaagaactatgggcccgcatctactgccttcagaatcaaggactaacaatgctaaatgaaagcacatacttgtgttcaaagttactggaatttgttaaacgaaaaggaagccaccttcgtcaaaatgttcagctggatcgagaagtgattggaaatggtttagatgggcaatttattgttgaatctgaaactaaaattcagggactcaaaagtggcactgagggtttaacaaggagtttgcagttgatgtcttctttgttgaaagataagtcaaatccattgacttctaaatttcaatcagagattatagacgctggtaaattagctacactgaatgatcaatcatccgaggatattttaagaactgaacttaaagcagaatgtttggtgacaagtttattaagagagaagctgtactctaaagagctccaagttgagcagatggaagctgaacttgctacagcagtaagaggaaacgacatacttagatctgaggtgcaaaatgcgttagataacctttcaagtgtaacccacaagttgaaggaccatgaacttcagatgttgaagaaagatgagagtagaaactgccttcaaaatgatctgcaagagtctaacagggaattgacaatcatgaggggaaaactgcccaaagtgacagaggagagagattatatgtgggagcaagtgaagcaatatagcgagcagaatatgctgttgaatgcagaggtcaatgtattgaagaagaagatagagacacttgaagaaaacaacctcgagaaggaaggtcaaatatccatattgcaagactcccttgccaaaagatcctatgatgatctccttgggagtcctgcgcatgattttttcagtacaaaattgctttaatagcttgttttcttgtaggcctatttcattgttcatagtttacctacatctgtgaatgagttttctttttaattgttgctcttcttttataatctatttcactgcgtttttctttacatatgtgaagtgtaagatcggacaaacaagttaaagaatacaaagttgcattttcccccattgctcgagg

SEQ ID NO: 12636 - DNA, 953 bp, Glycine max
  Clone ID: 701202579_FLI
attccttcttctcccagaatcggtcactaaatccgcaatcatgaagctcgataccaccggtctcgaatcgtttcccacactgcttgcgcctcaaaacgacgtcgttggagaactctccgccgctccatccttcgatgggtttgtgaaagaagctattcagatggtgaagcccgcgaagggtactacgactcttgcttttatatttaaggagggtgttatggtagctgctgattctcgagctagcatgggaggatatatatcatcgcagtctgtgaagaagattattgaaattaatccgtatatgcttgggacaatggctggaggtgctgctgattgtcagttttggcacaggaatcttgggatcaagtgtcgtttgcacgagttggcaaataaaaggagaatttcagtgacaggagcctcaaagctacttgccaatattttatactcttatcgtggaatggggttatctgttggtaccatgattgctggatgggatgagacgggtcctggtctatattatgttgatagtgaaggaggaagacttaaaggcactagattctctgttggatctggttcaccatatgcttatggtgtattggacagcgggtaccgatatgacctgtcagttgaggaagctgctgaacttgctcgacgagcaatttatcacgcaacatttcgtgatggggccagtggtggagttgctagcgtttactatgtgggtccaaatggatggaagaaattgtccggtgatgatgttggggaacttcattaccattactacccagttaccccaagcaccgtggaacaagaaatggttgaggcaactggagcttgatgaagcaactcgtggatattttcagtttcctttgcttgctagcttattttgaaccgatgaaactgattactttataattgaaaattgacattagtttgataaatacaagtgctgtcct

SEQ ID NO: 12637 - DNA, 2381 bp, Glycine max
  Clone ID: 701202701_FLI
cttcactttcacctaggactctgcccccactttctgaaggcaataaagccagcataatgttcaactctctgtctctttttcctttctctctcctctctctttcttcccaccttctctgatgaaagtctcaacacaaagcaccttcttcttcttctcttattgacttatggccaccacagagactcatttctggatcttctggtgtaaagacctttaaaagtttagtatttgtcaacttgaactggtgtatagtgctagagagtaaagtttgaaacctatcttgttactttcatcgtcagaagcttacaggttgaatccatattttttctccttggaaaatgatgatgatgtttgatgagatggggctttgtaataatttggatatgatatctgctccccttggagaggaggatattaccacccggcaaactgatcctgaggtaattgttgaggatgattttactgatgaagaaattggggtagatgaactcgagcagaggatgtggaaggacaaaatgcgtctcaagcgactgaaagaacaaagtaaatctaaggaaggaattgatgcagtgaagcagaggcagtcccaagaacaggctaggagaaaaaagatgtcgagggctcaagatggaatcttgaagtacatgctgaagatgatggaggtttgtaaggcccaaggatttgtctatgggattattcctgagaagggaaaaccggtgactggggcatctgataatcttcgtgaatggtggaaggataaagtccggtttgatcgaaatggtcctgctgccatagccaagtatcaagctgataacactatcccagggaggaatgatggatgcaattccattggtccaactccacacaccttgcaagagctgcaggacacaaccttgggttctctcttgtcggcactcatgcagcactgtgatccccctcagaggcggtttccattggagaagggtgttcctccaccatggtggcccacagggaatgaagagtggtggccccaaatcggtttatcaaaagatcaaaattctcctccttacaagaagcctcatgacctgaagaaggcgtggaaagtcggtgttctgactgcagttattaagcacatgtctcctgatattgcaaagattcgcaagcttgtgaggcagtccaaatgtcttcaagataagatgacagcaaaggaaagtgcaacctggcttgcaatcatcaatcaagaggaggccttagcaagagagctataccctgattatatccccccattagcctcagctggaggtagtggatctttggtgatcaatgatagcaatgagtatgatgttgaagggggtgaggatgagcctaactttgacgtggaagactgcaaacatgagaatcttcacacatccaatcttgggatggaaagagtgagggtaactctgccagttcaacagccctctttttcaataaagggagagactgttacaaatttggatttcattcggaagaggaaggtttctaatgacttcaacatgatggatctgaaaatttacacatgtgaacaccctcagtgcccttacagtcaagttcgccttggtttccctgaccgaatttcaagggacaaccatcagttgatttgtgcttatagaggtacttcagattttgggggtccaagttttcctgttaatgagataaagccagtcgtacaccccccgtcctttgttcaacccaaatctactgctcagcctggtagtatggttccacctgttattgatctaactggacttgaagtttcagataatggccagaaaatgattactgaccttatgactaactatgacacaaatgttcgaggcaacaagaagacaagttcctgtaatcacttagctgcagaaaatttcgaccttcctcagcatgccatgcagcagcaacaggacaacttcattcgcggtcaaggaatcactgcagaaggcaacatctttgatgaagctaacatgcccaacaatcatcacatgtttgcaagagaagaaggtcaatttgaccgtttcaaagctttgaatgctccctttgagaccaatcacaacaacaacaacttccactcaatgtttggttccctttgtgatttggcatcatttgatttcaaggaggatatgcaaggagtagggatggatactcttcagaaacagccagatatttcaatatggtaccagtgaaaatgacaagttgaatctggaagctcgttatccacatcatgaattcttattttcatgtgatgttccttcagccaagtcttactggaattttcttcacatgtaattctgtaggcctagtagaactagatatttttgacttatcctttacaggtctagtagttgttacaataaaaaacttatatgttt

SEQ ID NO: 12638 - DNA, 1056 bp, Glycine max
  Clone ID: 701202720_FLI
gttggaaacaacaaaaccaccgcacagggatcgtgttgagtttgagaatggagaagacagcagttaaagttcgatgccagaggattgggtgcgacgccatgttctccgaggacgacaaccccgacggttgctgtcgataccatgattcgggacctatatttcatgacgggacaaaagaatggagttgttgcaagaaaagaagtcatgattttagcttgtttttggaaattccaggatgcaagacaggaaaacatacaacagttaagcaagtaattacaccagtgaagaagaacaccatgccttctccaaccgctgtttgttcaaccaatgcatcatcaaaggactcttgtcccagatgtcagcagggtttcttttgctcagatcatggctcacaaagcaaacctgcaaatattattggagacaaggccgcaaatctggctggagatgcatctgttgataacaattcaagtgttcatgctccgaaacctaagaagatagttgatataaatgagccacaagtatgtaaaaataaaggatgcggtcaaactttcaaggaaaaggataatcatgacactgcttgcagctaccaccctggccctgctgtttttcatgaccggatgagagggtggaagtgctgtgatattcatgtaaaagaatttgatgagtttatgagcattcctccgtgcgcaaagggatggcataatgcggatccagagtcctgatcactggagacacagaaggacgagttattttcttacagtctcagatactctaattgaaatggaaaaggtgtttgttgattcattgttgttgattaattagagcaaaacagtgtccactcttttttcatctccctcatcccctttggattggtcaacctctatggttaatatgcaataatgcaaagttacaagaggtcactccatcaggatcatttactgtggatagtgtagaatatgaatctgttgtcttgtgttctttgaatgtcgccatttgcttttgtttgactggtttggacggctaatcttgaaacatgttgaactctattgttttgcc

SEQ ID NO: 12639 - DNA, 1575 bp, Glycine max
  Clone ID: 701202869_FLI
cactcataaccctctctctctttctcctctcactcactagtgccactaatgagaactcttcacaactacactccaaccctcactagaccacagtgcacaaccctcgttcaatccaccaaacccctacaaaagatggagaaaatgatgaacatgccccagttgcgatcatcgtcgttgccgccattgtccaagaaagttgggaagagatggaaggagtaccaaggaatgaacaattgggacggtttattggacccattggacgagaaccttcgcgctgagattcttcgctatggccatttcgttgaggcagcgtataagtcctttgaattcgacccttcttccccaaactacgccacatgcaagttcccaaagaacacactctttgaaaagtctgggttacacaacacaggttacaaggtaacaaaacacctacgtgcaacctcggggatcaaactacctagctgggtagacaaagcaccaagttgggtcgcagcacaatcgagctacgttggatacgtagcagtgtgtaacgacaaagaagagatcaaacgacttggtcgaagagacatagttgtggcgtacagaggaacgacaacatgtttagaatggctcgaaaatcttcgagccactctgacacatgtttcagttccgtcgatcacaacggagaccacaacagaaccatgcagcatggaagaaaatggagcgatggtagaaagtgggttcttgagtttgtacacgtcaacagttagtaacaacaaatcatttatgagtttgcaagatatggttaggaaagagattggtcggattcgtaaaacttaccaaggagagaatttgagtttgaccataacggggcatagtttgggggcggcattggccactctcacggcgtatgacataaagaacagtttcctccagccgccgccgctggtgaccgtgatctccttcgggggtccacgcgttgggaaccgaagctttcggcggcggctggaggagcaagggaccaaggtgttgcgcatagtgaactccgatgatgttataaccaaggtgcccgggtttgtgttcgatgacgtggacaaaactgaggatgttgcggcatgcaatggcggtgtccaagtggcgaagtttcagaggtggattcgaaaacgagcggaagaagttcagtggctattgtactctgaggttggaaaggagttacgcctttgtagcagggattctccgtacctcaggggtgtcaacattgccacgtctcacgatttgaacacctacctgcaccttgttgacggctttgtcagttccacttgtccctttagagccactgctaagaggttccttcagcattgagtttgataaatattgatttaacagtcaaaaacagttagaaagtaaaatgtgtttatagttggtttaatttgttttaaatcaacgataaatatgtttttattctaccactttttatatactatttttttcatttttgaaagaatgagtttgtaaataccagcgcaaatcttaacatggaaagaatcatgagaaaaagagaaagagccccggaaattagttactagtaattatgtg

SEQ ID NO: 12640 - DNA, 1207 bp, Glycine max
  Clone ID: 701202968_FLI
agagaaagaaaatgaagggtcaaacacaggctacaaagttggttaatctatacagattttgcgtttcgtcttcttcttcttcaatctctcgcttcaaccacttcactctcactaccaccgattacaataaattcaaattcgcttgcgcgaaagcgaagaacctccaactctcactctcccaacgcgccttcgtttttctttcccctcttaacgttgccgctaattacctccgtagttatcgcgtttctggcagttacatatgcagcggaagcattttaggtgtgtcaattgcatctgcaccaattatagctcatgccatggatgctggggatgcattggtggatgatcatgaatcacaggacctttcagaggaggaaatagatgtgcatcacttgttgagattggctaggaaactttggctgcctgcttttttctttcttacagtgttgtcaaacttgggcgactcaattacaatattattcattaaacttactttgttcctcctcagtacaaagcccagccctttctctgtctatgtatttgttgataagttgtgccaacaacatatgcgccaagaaactcgattctttaaagcaaagtcactgtacgccagcaaagtcgaagtgcaggactataagcttctttgcttggctgatgttgaagtgagagatcaaaagttcacgttggttggagttcttggtagttggtggcctatacctcatttgccattttgggaagcattctcttttgtcagaaatagaattggaagcatcttggtgaaaacaacttaacaaggtagcctgctaatttaaaattagctctccttctaagttctatatagttgggcctctgttggttttgtcccttttggagcttcaacaaaatcaatgttgttcatcgaagaagaaaatgaggggtaggaagagttgatgaatgatgaatgagacaggactgatgattacttgcaattaaagtagcctgtcaaatactaactgcataggctataaggtcatccctctcgttgtttaatgggtcaaatatgcaaaaatttacatctttgtaaaagtgcgacatctcaacattctgtcacagcccctattcttcctctgccactttttgatattttaaagtaattgttagtattgaagttttagtttatctgaaaatgtgtaattttacaaaagtaaggatgtggtatttttttttt

SEQ ID NO: 12641 - DNA, 2003 bp, Glycine max
  Clone ID: 701203283_FLI
atcggtttcttcttctgggtgttgcttgaatccgtggaaagttcatttattttcgattttcatgcgaccagggacttttggggctaataaagtttctgaagagataagatgatcgttgtgctgagcatggttattgatgggtagcagaagtagaacagtaaacgttaacactaaggacactgacaaggttctgaacgggatgccaagctacgctcctccattgccttcttcttccaattccatggccatggaagcaactaatgctcatccttcccgtatttctgaatttggaaccctggagcaatctcttggatttcgtgttgaagataccattaatcttagcagaaatccgatgtttaatcaaatgaaatcaaatagccaagctctaggtgctgatattcaatttggtgctttaaataagtcaattgcaacatcggatataaacctctctgctgctattgctgcatctcaggcactggtattccaaaaagattcgcaaccaactctggcttcgacatctgctggtcgtgagaactggggagagaccaacatggctgatgctagccctaggactgatacttcaacagatgatacagaagacaaaaatcaaaggcctgaaagggatgaatccagtggatcaaaagataaatcagatcaaaagacattaagacggcttgctcaaaatcgtgaggctgccaggaaaagccgactgaggaaaaaggcatatgtgcaacaattagagagcagtaggttgaaactgacccaacttgagcaggagctccagcgatctcgccagcagggaatatttatttcaagtactggagatcaggcacagtcaatgagtggaaatggcgctatggcatttgatgtagagtacgcacgatggttagaagagcataatagacaaaccaatgagctaagggctgcaataaattctcatgctggagatattgaacttcgaaccattgttgacaatttcatgacgcagtttgatgatatcttcagactgaaaggtattgcagcaaaagctgatgttttccacattctgtcaggaatgtggaagactccagctgagaggtgtttcatgtggattggaggctttcggtcatccgaactcctcaagcttcttctaagtcagttggagcctttagccgagcaacaattgatgggcatctacaacttgcagcaatcatcccagcagactgaagatgctctttcccaagggatggatgcattgcagcaatcactatctgagacattggctaatggttcgcccagctcatcaggctcctcgggaaatgtggcaaattacatggggcaaatggctatggccatgggaaagcttggtacacttgaggggtttcttcaccaggctgacaatctgcggcagcagatattacaacaaatgcttcgaatattaacgaccaggcaatcggctcgtgctcttcttgccatcagtgattatttctcacggctgagagcgctgagttctttgtggcttgccaggccaagggagtgaagcatttcacagccccattagtggacttctttcatgcctgactcccttaaacaccgatgatcattgaatcttgtgctctgaatgagttcaatggaagctggtgtcttttgacaatgaattcctcttgaagcctagttgtgatgctataaacattaaatgctatgatttttctactctgccaactgctggtgtggtgcaacatttttctttaagcttttgtggttttaaaatagtctcaataatttgattatataggtgtatgatagatagaagctgttgaagggaaaaatgtagaaatagtgtatctgtatttttaggttatagctgttcattgtatttcagaaatcagcttttatttgagggggtatttacctctctttagtttcatttcctgcttaatggtttgtggttggttgcacataaggctccatggtgtatgtatttatacgttctcttttggtatattagaaagacattactaact

SEQ ID NO: 12642 - DNA, 781 bp, Glycine max
  Clone ID: 701203364_FLI
ggggatccatctggaaagactggaagggctttcaaggatgagattcacaaaaaaattgagaagtggcaggagccccctcctgctaagcaaccaaaaccgcttccagttccagattctgagcctaaaaagaagagaggtggtcgtcgtcttaggaagatgaaggaaaggtatgcaataacagacatgaggaagttagccaataggatgcaatttggagtcccagaagagagttcattaggagatggtctgggtgagggctatggaatgcttggtcaggctggcagtggcaagcttcgtgtgtctgttggtcaaagcaaacttgcagcaaaagttgctaaaaaattcaaggaaaagaattatggtagcagtggtgctacctctggtttgacatcaagtcttgcattcacaccagtgcaggggattgagctgtcaaatccacaggctcatgcacaccaacttggtagtggaactcaaagcacgtatttctctgaaactggaacattttcaaagatcaagaggacatgaaaccatacatgaatgcaaattcttgttcagtcccctggattattcttggtggacatgcctagaaattgttgatgctgatggatattacttgatagttttatggtagatttttgaagagtagccatgtttgttgttgattatgatgttgataccttccattgtatatgacttctgcagtgccttattccagtttcctttccgtagtaacaaagaaatgttgatcaatatagtggcaattttcatggcctagcttgag

SEQ ID NO: 12643 - DNA, 1560 bp, Glycine max
  Clone ID: 701203380_FLI
ttgggtttctcttcctcccttggagaaaaagaagagccaccgctgcgacgccgttcgtgcatttttgaggtgccgctgtcatgtttgggcgtggtggaccaaggaggagtgataactccaaatattatgatattctcgggatttccaaaaatgccagtgaagatgaaatcaagaaggcctatagaaaggcggctatgaagaaccatccagataagggaggagatcctgaaaagtttaaggagttaggtcaagcatatgaagttttaagtgatcctgagaagaaagaactgtatgaccagtatggtgaagatgcccttaaagaagggatggggggaggaggctcgtttcataatccatttgatatatttgaatcattttttggaggagcaagctttggtggtggtggtagttcccgaggtagaagacagaagcatggtgaagatgtggtgcattctttaaaggtttccttggaggacgtttataatggcacaacaaagaaactatctctttctagaaacatattatgcccaaaatgtaaagggaaaggttcaaaaagtggaactgctggtaggtgttttggatgcaaaggcactggtatgaaaattacaagaaggcagattggactaggcatgattcaacaaatgcaacatgtctgtcctgactgcagaggatctggtgaggtcattaacgagagagataaatgtcctctgtgcaaaggaaacaaggtttcccaggaaaagaaggtgctggaagtgcatgttgagaagggcatgcagcagggtcagaagattgtttttgaaggacaagctgatgaagctcctgacacaatcacaggagacattgtttttgtattgcaagtaaaggatcacccaaagttcagaagggagcaggatgacctctatattgatcacaatctcagcttaaccgaggcactctgtggcttccagtttgctgtcaaacatcttgatggtaggcaactattgatcaaatcaaaccctggggaagtcatcaaaccaggtcaatataaagcaataaatgatgagggaatgccacaacacaataggccattcatgaagggtcgcctttacatccagtttaatgttgatttcccagactcagggtttctttcccctgaccaatgccagttactggaaaaggtgttacctcaaaagagcagcaagcatgtgtcagacatggagctggatgattgtgaggagaccactttgcatgatgtcaactttaaggaggagatgagacgaaagcagcaacagcaatatcgcgaggcatatgatgaagatgatgatgagccatctggtcaacgagtgcaatgtgctcaacagtagtgcaatttatggtagtagaggttctataatttctgcatggtttttatcttttgtttgcataatgcagttataactgcgtgataaatttaccctttaggttttggctggtaacgttatttagtcttggcagatttctaaagtctgttttttgttgtaatatatgaaaattaaatgttttggtacaaggcgcgcaataacgattgcatatcccagtttc

SEQ ID NO: 12644 - DNA, 832 bp, Glycine max
  Clone ID: 701203384_FLI
cttcctccgctcaacaactataagattatcttcttcttcttcttctcttcaattcttctccaatcccaaccgcaccctcttccgtccctttcttcacacttccttcaaaccacttccttcgtctttctctttccgaacagatcacactatggccacctcaaacgccaaatcagtccatgatttcaccgttaaagatgccaagggaaatgatattaaccttggtgactacaaaggaaaggtccttatcattgtcaatgttgcctcacaatgtggcttgactaattcaaattacactgagctcagtcagttgtatgagaaatacaaacagaaaggtctggaaattctggcgttcccatgcaatcagtttggggcacaggagcctggatctaatgaacagatacaagagtttgtttgtactcgcttcaaggctgagtttcccgtttttgacaaggttgatgtgaatggtgacaaggctgctccactgtacaaatatctaaaatcaagcaaaggtggactccttggggatggcatcaaatggaacttcgccaagttccttgttgataaagaggggaatgttgttgatcgctatgcacccacaacttctcctctgagcattgagaaggacttgctgaagttgttggatgcatgaagttatgaatgtttggagttgccaataaataaactatgaataagaaatgtactgcagatgctgctgcaatttcctgtgtgccttatatgtaccgaaacagttgctcttgtagctttgacattagattcataaccatgagattgtgtacttattattgtgtgaatgtaaagttaagcttccttt

SEQ ID NO: 12645 - DNA, 1437 bp, Glycine max
  Clone ID: 701203522_FLI
caacttgttggcttttttagttctataaattccccgcttgaatcacacagagtcctctcttccactctctccctttttcctatcacactttctagatagctagcctgtaagatatatatatagatatttcatatatatcctatggtccgtgagtgcccttgttctgtaccaaccctttcttccacatgttgagtttcagcatcgtcctctcttgagtccccatatcaaatacccaccgaattcaaccccccatataacaaatctcctcccatcccatttttcagcaccaaagtttgaaacttttctcaattgggttgaggagagtttgactcaaatttttatttttctaacgaagcagtagctattagaagtgcaaaaattaaatgtcaacatcttcttgttgatgtttgagattcatgtatccgattctcagtgaaatcttcttttccgggtgtatgatcaattccactgttaggcgcaggaccatttagtcaatcttctcagttgctttcctctattggttgtactacgtttcatgatttctaaaccttccttagtctaataatcatctactactagctattattattattattattattatcatcatcatcatatataataaaatctatctgcaatattatttttctgagtttgtgtctagttagtgtctgggtcctggtcctgccaattgtgtcaattaattgtattgaatcataaaagatggcttcctcaagtggaacatcttcagggtcatctctgcttcagaactctggttctgaggaggatttgcaggcggtgatggatcagagaaagaggaagagaatgatatcaaaccgcgaatctgcacggcgatctcgcatgaggaagcagaagcacttggacgatcttgtttcccaagtggctcagctcagaaaagagaaccaacaaatactcacaagcgtcaacatcaccacgcaacagtacctgagcgttgaggctgagaactcggtgcttagggctcaggtgggtgagcttagtcacaggttagagtctctgaatgagatcgttgacgtgttgaatgccaccactgtggcgggttttggagcagcagcaacatcgagcaccttcgttgagccaattaataataatagcttcttcaacccgttgaatatggggtatctgaaccaccctattatggcttctgcggatatattgcagtattgagatccatggtctctgagtctgagatttgatgaggatttcttcttcttcttctaggtttgagtctgttgagaaattgtaatcactaccatatggtgataaggaataataataatgaatgtgtatcgtaaaacggatgggattgttgggtgctggttctgtaaatgtggcatgggccattactgtaatttgtcaccctcctttcctatattattataataataatattgacct

SEQ ID NO: 12646 - DNA, 1411 bp, Glycine max
  Clone ID: 701203534_FLI
tcgcagaactatccttctctctctctctcatccacgccccaaatcttagggttttcaccaaataaaacaaccccaattcctcgaactcttcgattcgattacccaaccccacacgctgattccacatcctccatgagatttggttgattggatcgtacgatggcggcgccgaggaatgtgacggcgacgagggacgaagagaagggcgaggacgatgattcgccctccgcgaagaagcccaaatcggagaggttcccgctgaacacgtgggaattcgccgtcgccgtcgccgtcttcttggtgttctccaccggcctcttctgcatttacctcaccatgccctcggccgcttacaccaacctcaaactcccccgcaccctctccgatcttcgcctcctcaaggaacatctttcgacgtatgcgagtaaccaccctgcgcagttcattcttgggtactgctccacctacatcttcatgcaaactttcatgattcctgggacaatcttcatgtccctcttggctggggcgctttttggagttgtacgaggaatcctattggttgttttcaacgccactgcgggtgcatcttcctgtttctttttgtctaagttaattgggaggcctttggtttcttggttgtggcctgaaaagctaaggttcttccaagctgagattgcgaagcgtagggataggctgctgaattacatgctttttctgaggataaccccgacattgccgaatctgttcatcaatttggcgtctcccatcgttgatgttcccttccatatattcttttcggcgacattgattgggctcgttccagcctcttatattactgtcagagctggccttgctcttggggatctaaagtcaattaaggatctatatgattttaagaccttatcagtacttttcctcattggttttgtttccatagctccaacacttttgaagcggaagcgagtatatgaatgaaggtttcctggctcagcttgcacaatcaagtttgtcaaaaggcaagttacgtgatctaattagatgatgaagacagtggatcagagaagataatatttaagaaagatatccatgaaaaaggaatgtattgttattaacttaaacagtggcatatgctccattttattttctgtggtggagcctaagtttttttgtttcccttttcattttttgatcgtgtggagagagtaaggttagacttagctgattggtgtacaatcaattcagctaaggttacgaggctttgttggagcattaaattatgtattggccttgatgtcatcaggaagattgtggtgattgtttagcggtgctgtatgtatgtgcttcgcaccaaataggatctgactttttaccctgtagtattgctttattcaattataagatattatcgtag

SEQ ID NO: 12647 - DNA, 1408 bp, Glycine max
  Clone ID: 701203547_FLI
gccaaattggtattatcgcacttattgattcccttggtctctccttttgtcaagaacaaagtattttctttgatggagggagatcaacatggctctaattactcttttccacctggctttagattccacccttccgatgaagaactcatagttcattacttggaaaacaaagtcagttcacgtccacttccagcttgcattattgctgaaattgatctctataagtataacccgtgggagctaccgaataagtccttgtttggagaggaagaatggtatttctttagcccgagagacaggaagtacccgaatggattgaggccaaacagggctgcagcctcaggatactggaaggcaactggaactgacaagccaattctttcttcttgcggatcgaggcgcataggtgtgaagaaagctctggtgttttattcaggtcgacctcctaagggtgctaagacagattggatcatgaatgagtataggttggttgacacaaccatcaaatcctcaaggctaaaaggctccatgagattggatgactgggtactatgccgggttcgatataaaggctactctcagaagaattcatgtgaaaatcaagagagtcctagtgaactaaacttgtcagcaaaactactgaggagtgaagaaaacccaacaaaaatgaactgtcgggctgacatgatccctgattatcaatataaagactatcaaatcatagcctctattcttgttggtggacctattcctcccattgaaagcatgccaaatctgagctttaagggttgcaaaggcaacaatgtagtttcagattatgaagatggtttcactaaagggaattctcaaacgacaattccttcattggaaagttacttcaacccactgacaagaaaatccaatgaagatgaacagtatggaaatctcatttctttcaacaggaagttcaacactgataacagaatggacggatctactagcaaagtgttgaacagtagagaattgaattgctacaaccaaaaccattctcaagatgacattttcaatgggaacccaccagatcctaccatcaattttcaagagctaaacgaattagacttttcaggaaggtaccatcagtgatgaaggtatttattataagacagtcaacgtccctttacttcacaggtagattttcatggattatacaacttaagacgtaggagaaacctgaaggataatgggccctattccggcgaattattgctgtatttctttatgcatagtcaacatggggcaatagctacatatagaagtttccatgcattcatgaaattccttgtaaacaatgccccggccaactagcttcttgagcgtgccctgtgtcagttcaactagaactttatcctacctagtaattataacgtgt

SEQ ID NO: 12648 - DNA, 1383 bp, Glycine max
  Clone ID: 701203618_FLI
ctttcttccaacctctcaagtccaacctacccctttttcttctcccaccaacttcaccgtcttcttcctcgatcatgtctcacttcaagggcaagtaccatgatgagcttattgtcaatgctgcttacattggcactcctggaaagggtattcttgctgctgatgagtcaacagggacaattggcaagcgtttggccagcatcagtgtagagaatgttgaatccaacaggcgtgctcttagggagctgcttttcaccgctcccggtgctcttaaatatctcagtggtgtcatcctctttgaggaaactctctaccagagcacagctgcaggcaagccctttgtggaagtcttgaaggaggctggtgttcttcctggcatcaaggttgacaagggcacagttgagcttgctggcactaatggagaaaccaccactcagggtctagatggccttggtcagcgttgcgccaagtactatgaagccggtgcacgttttgccaagtggcgtgctgtgctgaagattggtcccaacgagccatctgagctggctatccatgagaatgcctatggcttggccagatacgctgtcatatgccaggagaatggcctggttcccattgttgagcctgagatccttgttgatggatctcatgacattcacaagtgtgctgccgtcaccgagcgtgtccttgcagcatgctacaaggctttgaatgatcaccacgtccttcttgagggtaccctattgaagccaaacatggtcacccccggatccaattctgctaaggtttcccctcaggtggttgcggagcacactgttagagcccttcagagaaccgtgcctgctgcagttcctgctatcgttttcttgtctggtgggcagagtgaggaggaggcatccgttaacctcaatgccattaaccaggtcaatggaaagaagccatggtcactctctttctcctttggaagggcacttcaacagagcacccttaaggcatggagtggaaaagaggagaatgtgaagaaggctcaggaagcccttttggtaagagccaaggctaactcagaggcaactctgggaacctacaagggtaactcaaagcttgctgatggtgcctcagagagcctccatgttgaggactacaagtactgatcaatctaagtgcgggtaggaatcggtattttatgggtacaaccgaattttcttgttaatgagtattgtgcttcgactcttcccagaataataatcgtttggaattttgctttttgtttttcctagtgttccttcatatcaattttagtaattcggtgtattggtcaaacctgtgcaaacaggggaggggatgtaactttgttttcttgatagacaccaccaccttgctgtt

SEQ ID NO: 12649 - DNA, 1264 bp, Glycine max
  Clone ID: 701203632_FLI
gagagaattaagattttataatttaacttttttggggtgtgattaaaagagaagctagctaaaaaaaatgggttcagcatccgaaagtgtttgcgttacaggagcttctggtttcatcgggtcatggcttgtcatgagactcatcgagcgtggctacaccgttcgagccaccgtacgcgacccagtaaacatgaagaaggtgaagcatttggtggaactaccaggcgcaaagagcaaactgtctctgtggaaggctgatcttgctgaagagggaagctttgatgaagccattaaaggctgcaccggagttttccacgtggccacccccatggactttgaatccaaagaccctgagaatgaagtgataaagcctacaataaatggggtactagacatcatgaaagcatgcttgaaggcaaaaactgtgcgaaggctaatattcacgtcctcagccggaaccctcaacgttattgagcgccaaaagcccgttttcgacgacacatgctggagtgacgttgagttttgccgtagagttaagatgactggttggatgtattttgtttctaaaacactggcggagaaagaagcatggaaatttgccaaagagcagggcctggacttcatcactatcattccacctcttgttgtcggtccctttctgatgccaaccatgccacctagcctaatcacggctctatcgccaatcacaggaaatgaggaccattactcgatcataaagcaaggtcaattcgtccacttagatgatctctgtcttgctcacatatttctgtttgaggaaccagaagtggaagggaggtacatatgcagtgcatgtgacgctaccattcatgacattgccaaattaattaaccaaaaataccctgagtacaaggtccccaccaagttcaagaatattccagatcaattggagcttgtgagattttcttccaagaagatcacagacttgggattcaaatttaaatacagcttagaggacatgtacactggagcaattgacacatgcagagacaaagggcttcttccgaaacctgcagaaaaagggctttttactaaacctgcagaaactccagtgaatgccatcatgcataaataggcattcatatctttgtatctgtgtgatggctgtgcaacttgcttttcttattccgtttcttgattaacgtttctgttttatgaaaaattagaaatgtgagtggcttgtaaggccaggttatcttcaataagttaataaaaaccatcttct

SEQ ID NO: 12650 - DNA, 1272 bp, Glycine max
  Clone ID: 701203808_FLI
cggagaaagacacgatgcaggaagcgacgaaggtgataataatcggtgccggaacttctggtatcgccaccgccggttgcttaacgaagcaatcaataccttacataatgctcgagagagaagactgtttcgcttcgctgtggcagaaatacacctacgatcgtctccaccttcatttgaggaagcaagtttgcgagttaccgcacttaccgtttcccaagtcttaccctcactacgtgcctcggaagcagttcatagactacttgggaaactacgttaaccactttgagatcaagcctctgtaccagcgtgcagtggagttggtggagtatgatggatggaaagggatttggagagtgaaggctcagaatagaagatctggtgagcttgaggaatacgctggaaagtacctggtcgtggccagtggcgaaaccgccgagcctcgtctgcctcagattcaaggcttggagagtttcaatggaaaagtgattcactcaactgcctacaaaaacgggaacgagtttaagaataaacatgttctggttgtcggatctggcaattccggcatggagattgcgctagacttgtccaattttggtgccaaaccttccatcattgttcgcagcccggttcattttctttcgagggatatgatgtattatgcgtcgcttatgctgaattacttgtcgctgagtacggtggagaaggtgttggtgatggttagcaaggttgtgtatggagatctgagtgagtatgggataccgtatccgagtgaggggcctttcaccatgaagatgaagtatgccaagttcccaatcatcgatgtaggaactgtcaagaaaattaaatctcgagagatacaggtgttgccagctgaaataaagagtataagaggtaatgaagttttgttccaggatggcaaatcgtacacattcgactcaattgttttctgtacaggcttcaagagatcaactcaaaagtggcttaaggggggtgatgatcttctaaatgaggatggctttccaaaaaacagtttcccaaatcattggaaaggtcgaaatggtttgtattgtgttgggctgtcaagaaggggtttctttggagctaacatggatgcccaattagtagcaaatgatattgcctcgttaattcctcaagaagaaagagaaggaatttgtgtcatgtaatgatctattatctattattggttgcagaaacagtatgtacatgacactttcttcttttggggatatgaattaggtatgttgtttt

SEQ ID NO: 12651 - DNA, 1911 bp, Glycine max
  Clone ID: 701203849_FLI
ccacgatgacgcaacaagaatcaaccatgtcactaatattcttacaactacttttactcttgtcatgcctaacactgaacaatagtattgcagaatcaaccaccatcatcaatgtgtggcccaaaccaaggaaccttacatggtccccaccataccaaaccaccctcctctcctccacattcaccatcaccaccaccaccaaccaccacaacaagcatctctccatcgccatccgccgctaccagaacctcatcaaatccgagcaccaccacccacttgtcccacaagcagtcaacatctccaacaaatacctcccaccactgcagactctcaaggtcacagtggtggacactgctgcagaactcgtccacgccgtggacgagtcctacactctctccatcctcccttcctcatgtgctaccctcactgcaaagactgtatggggtgccatgcgaggcttggaaacattctcccagctcgcatggggccaccccacgcaggttccagtgggcgtgcacgtgtgtgactccccactctatgcccaccgcggtgtcatggtggacaccgcgaggaactattatcccgtgaaggacttgatgaggacagtgaaagccttgagcatgaacaagctcaacgtgcttcacttgcacctcacggatgcagaatctttccctttggtgcttccttcggaacctgccttggctgaaaagggggcttatgcccctcacatggtctactcacccaaggatgtcaaaaaacttgtagaatttggtcttgatcatggggttcggataatacctgagattgacacacctggacacacagcatcttgggcattagcccaccctgacattgtaacatgtgccaacatgttctggtggccagccggaagggattggccacataggtttgcttcacaaccaggaacaggacatttgaaccccttaaaccccaagacttaccaagtcctaaagaatgtcatacacgacataaccacattgttcccagaaccatttttccactctggtactgatgaaatagtaccaggctgctggaaaactgaccctgcaattcagaaatacctatcaaatggtggaaccctcaaccaacttctcgagaagtatatcaacaacaccctccctttcattgtgtccctcaaccacaccgttgtcttctgggaagatgttttactggacaacatagtccatgtgccatctgcaatccttcccaaggagcatgtgattctgcagacatggcacaatggacataaccacactaagaagatagtttctgccggataccgaaccatcgtgtcatcggcggaattctattatctggattgtggacatggctcctatgttggcaacaacagtgcatatgacaatcaagatggtgacatgggcaatggcggctcttggtgtgcacctttcaagacatggcagaccatatacaactatgacatagcatatgggttgagtgagggggaagcaaagttggttttgggaggagaggtggcactttggtcagaacaatctgatccaactgttttggatgcaagaatttggccaagagcttctgcactggctgagtcaatgtggtcaggaaatagagatgaaaagggtgtgaagagatatgcagaggccacagatagattgaatgaatggagaagcagaatggtaagcagaggaataggtgccgagcccattcagccattttattgtgttaagaatcctggcatgtgtaacacagtgcatccagtctagttgcattcttcctttgtcacaataaaaaataaggttgaattaaaagtttagtaaccaaaataaggttaagtttttttttaaaaaaaaaaaactaatatcgtcttttgttttaatttctacatgaaaaaaagtctaaattttggttctt

SEQ ID NO: 12652 - DNA, 713 bp, Glycine max
  Clone ID: 701203871_FLI
tcaaattcctgtcctgaagatgacagcaaagtggtatctcattgtgtgtgttgtagcgatctgggccgttgatctgggttcatcatcacaccatgcccgtgccccagcaccagcaccgtcagtggagtgttcaaacctggtattgaccttatcggattgcctcaccttcgttagcaacggcagcaccgtcaccaagccacagggaacatgctgctcttccttgaaaactgtgctcaacacagcccctaagtgcctttgcgaggctttcaacagcagcgctcagttaggtttagccatcaatgtcaccaaggctgtcacgcttcccgctgcttgcaaactctctactccttctgccgctaattgtggactgtctgcaacgcctgctgctgctcctggcccctctcctacatctgctactgcaactattgggactccaggaggagctccatcatcaactcccgggaacgcagcatcagcattaatccccatatcagctggatcctctattgtttgccttttagtagctctatctctcatttcactttcagagtagggacatgacattagagactattttcatgtcttctgacttttccatcttctatgtgagacttaatgaagtagataaagtcattcagtgactcgaatttattttgtggttgtatatttataacttataatatatatgtatatgagtgagtgattttagcgtt

SEQ ID NO: 12653 - DNA, 2003 bp, Glycine max
  Clone ID: 701203902_FLI
attttcctgatttcagtaatgagactgagaaggcgaatgggactaatgcataaaagaaaaccagaaaagctgccgaaaaatacagttggcaaatgttatgttacgttcctttcctctagaaaaatcccaggataggaagctggtccatagtgactactatctcgttttccaatggagcagaagcgtcctgttgggcctcttgtggttgtaggtgtcagggatggagttctttggctaattgacaggtacatggttgctcatgccgtatccttgagtcatcctggtattcgttgccgatgtcttgctgcttatggtgatgctgttagtgcagtaaaatgggcaagtagacttggaagagaacaccatgatgatttagcacaatttatgctaggaatgggctatgctactgaagcacttcatttgcctggaatatctaagaggttggagtttgatttggcaattaagagcaatgatttgagaagagctcttcattgtcttcttaccatgagtaatagcagagatattggacatgatggtactcaaggacttggtttgaatgacattcttaatttatcagataaaaaaccaaataaagtatctgataaaaaacaagatatagttgaaggtgttcagggtatagtgaaattcgcaaaagagtttttggatcttattgatgctgcagatgctacagcacagagtgaaattgcccgtgaggctctcaagaggttagctgctgctggttcggtgaaaggtgctttagaaggtcatgaattgagaggattagcattacgcctagcaaatcatggagagttgactcggctaagtagtttggttaacaacttagtcacgcttggcttgggacgggaagctgcatttgctggtgctgttttgggtgacaatgctctgatggagaaagcatggcaggatactggaatgctggcagaggctgtgcttcatgctcatgcacatggacgtccaactttgaagaacttagttcagatttggaaccaagcgctacagagagaggttgaacctactccatcacagaagacagatgctgcagctgcatttttagcttctcttgaggagcccaagctcacaagtttggcagatgcagggaagaaaccacctattgaaatcctgcctccggggatgccacctcttaatggtcctatttccatccagaaaaaaccagcttctgctgcacagaattcccaacaacccccaggcaagcctttggcactggaagcacctcctacaaccacagctgcacaagagagtgctacaacacagcagcctgaatccacacctgcatcaggtaatgatccacctccatcggagtctacctcagacaccaggccagctcctgcgactgctccacctcaaccagaatcaggtgaaagcactgtagataatggcattcctacctctacaccagcaagtgatggagatccaaatgttaatggtgaaaatgttcaagcagcatctacgggcaatccagcaccagcaccaacaccaacaccacctgatttccccgtatcaccagcagcagaggtttcagagactactgctccaagtccacctacagttccaactccacctgcagttccaactccacctgcagttcctacgagtgatccccttatatgattggtatacccaccacattgttgacataagcacttggaaaatgaattcatttataattcatgttttatttactgtttgtaaagaaatcattttagagatgaagcaaatctagtgtattagtttgtaacaagtttaaattccaaaggtacaattgtaccgagcagctgtgtttcccttttttacctcaatttttgtagaaaattgtaccgagctgcgggttgtctcatattgtgattgtgacatatcctgacacacgagagtgttcttttcttcctgttttgaattttttgttgactgaatttaaagttttgctgttttaaaatgtacaagttgaatgcgggtctctctagttc

SEQ ID NO: 12654 - DNA, 539 bp, Glycine max
  Clone ID: 701203907_FLI
atgatcttgtgtccattctaaatgaagttaaaagtactaaaacaactggtcctgtgctgctccatgttgtcactgaaaaaggccatggatatccatatgcagaaagagcagcagacaagtaccatggagttactaagtttgatccagcaactggaaaacaattcaaatccaatgctgccacccagtcatacacaacatactttgcagaggctttaattgctgaagcggaagctgacaaagacattgtcggaatccatgctgcaatgggaggtggaactggcatgaatctcttccttcgccgtttcccaacaagatgctttgatgtggggatagcagaacagcatgctgttacatttgcggctggtctggcttgtgaaggccttaagcctttttgtgcaatttactcatcatttatgcagagagcttatgaccaggtggtgcatgatgtcgattgggcaaggctgcgaataagggaacggtccaatggcttgcagaaacgtgcatccgccactgttgcgcgcaagccatgatgttccaac

SEQ ID NO: 12655 - DNA, 460 bp, Glycine max
  Clone ID: 701204128_FLI
gaaagaacccctgaggattttctatgagtcattgtcaaaacatgatcctccagaacagaaagaacccctgaggattttctatgagtcattgtcaaaacagataccaacaagtgaaatggcagaattttggttaatggaacatgggttgctatctcctgaaaaagctaagaaagcatttgagaaaaggcagaggaagcaaaaagagcttcgaacaggaactcctgttaagttatcaaagccgccaactaagactgcaacatcacagaaacaacaacaggtatcaaagaacggtgacataaaaaccaagaaaagaattgtcaatgagagtgatgatgatgacgacgatttcattttaagtcataaaagaagaaaatggtaagaagaaggaaagcctctcataatgtttatttaataaaaataaaaaagaagaaatgttgtactctcggaaaaattgttggat

SEQ ID NO: 12656 - DNA, 1397 bp, Glycine max
  Clone ID: 701204172_FLI
aacaacttctgctacttcctactccaaccgcacttctgctccgcaattatcatgggcaaggtcaagatcggaatcaacggatttggaagaattggccgtttggtagccagagtggctctgcagagagacgatgttgaactcgttgccgttaacgaccctttcatcaccaccgattacatgacatacatgtttaaatacgacagtgttcatggacactggaagcatcacgatgtcaccgttaaggacgagaagacccttctcttcggtgacaagccagtcactatttttggacacagaaaccctgaagagatcccatgggggtcaactggagctgacatcattgttgagtccaccggagttttcaccgataaggacaaggccgccgcacatttgaagggtggtgcaaagaaggttattatttctgcccccagtaaggatgcccccatgtttgttgttggtgtcaacgagcacgagtacaagccagagcttgatattatttccaatgctagctgcacaaccaactgccttgccccacttgccaaggttatcaatgacaggtttggcattgttgagggtttgatgaccactgttcattccatcaccgctacccagaagactgttgatggaccatcagccaaggactggagaggtggaagagctgcttcatttaacatcattcctagcagcactggagctgccaaggctgttgggaaagtcctccctgctttgaatggaaaattgactggtatggcattccgtgttcccaccgtggatgtctctgttgttgacctcacagtgaggctggagaaagaagcttcctacgatgaaattaaaaatgctatcaaggaggaatcagagggcaagttgaagggaattcttggttacactgaagatgatgtggtctccactgactttatcggcgatagcagatcaagtatttttgatgcaaaggctggaattgcattgaataagaactttgtgaagcttgtttcttggtacgacaacgagtggggatacagctcacgtgtcattgatcttcttgtattcgttgccaagaagtctctttaaggtgttacttcaaagtagcttgtcttcacattattaccgtatgtttatgtttagctgcgatttagtgtcttgctcgagcaaaaaatgagaggtctgaataaatcggtttctgaaaccagtggtgttacttgttggaggagcattagctcttttttggacttttgatgttttctcttgtggagggggatcgagtttttggatttttatatactcgctgatgtacttggcttgaatacttgctaatgtacttgttattgattgttatagtagatatttgtccgtcctttttttcatttgtggttctcgtatatttgatcctgtttgctttg

SEQ ID NO: 12657 - DNA, 528 bp, Glycine max
  Clone ID: 701204214_FLI
gccagggaaagacatctacatgtacaaaggggacagggcattttgtagcgtggattgcaggtgcaagcagattttcacggacgaggaagaagctattcagaaagagaagtgttctttggctgccatgaggcccacatcgtctagtgcttccacctcaacggcaagtcatcaccaccggaaaggaacaagaaaccgaggtggtgcttgtttttagaggaagaaagaagaagagagcatcagaaatgggaggagaattgtaatttttggcgaccacattccagttttacccatggtttattttgttaatgacatcacagccccttgtcctttttgcttcctagtatgaagccaaaatgtccttttcggctttcttttgggggggaggtccaacttattactataacagtgcgaaagctgacacctgagagcattttccctatggtggttattgcaatgctttcgctttaaaattgctcaggacccacagagaaatacttgtttttttaatttgtagtagttgttgttgac

SEQ ID NO: 12658 - DNA, 916 bp, Glycine max
  Clone ID: 701204309_FLI
cttcttccttcctccttctctctctcaccctttctcccccactccctagtcagctagctcctgcaacaacaaccactcctcttctttttctcacccaaatccacgcttcccttacaccgcgtttggatctccgttatacaaactcattaaaatgttgcgagagaaaaacaaaacagaaaaaaaattcagttaattattaaattttgttatggctttccacgaccatctccagcacgagatagcgttccagcgtttcacggaggagcaagagttgaacgagaatagagacatgcaacagaggctcccacctccgacatggctcaacaacgttaacgtcaacgcgcgtcaacagaatttcctcgacagcgagaagagcgtggatcggaaccgaagcgagagcaattgcgaatccgaggatttgagggaatacaaagcggacattctaggacaccctctctacgatcaactgctatcggcgcacgtgtcgtgcctcagaatcgctacgcccgtggaccagcttcctaggatcgacgcccagcttcagcagtcgcagcgcgtggttgaaaagtactctgcacttgcacacaacggggtcgtcgatgagaaggagcttgatcagttcatgacccattatgttctgttgctctgtgcctttaaagaacaactgcagcagcatgtccgtgttcatgccatggaggcagtgatggcttgttgggatctggagcagtctctgcaaagcttgacaggtaaatttccagcgttatagaagtcttttttccctccctagataccgtgtcttttgtactcattatttggtctgcaaacaaaacaaggagagagaaaaataattgatggaaaagaaaaaggaaataaaaaagaatgaaatggagaccacacactccaccgttcctcatct

SEQ ID NO: 12659 - DNA, 939 bp, Glycine max
  Clone ID: 701204348_FLI
gttcaagagaattctatattatcaggttgctcttgtttatgttcttacaagattggttctcaacgtttcacaggcataccttgctttctttgtcatcaatgacctacaaatggcccaatcagccaaagctttggttcctgctctcatatacatctgcagctttgttgtgtctatagcattacaggagattgcatggactggccgaatgcttaaggcctactactctgctggatgcattctttggattttttgtggtgcagtgatccttcttttaaccacaaatatgagttatgtcatgtacatagtatcggtattcattggcatagcaaatgctctcatgatggtaactggagtaagcatgcagaattttctcattggagagaaccttaatggttgtgcatttgttgttggatcattgagttttttggacaaaatttcatgtgggcttgctttatatgttcttcagtcaaaccaaaatctctctccgcagctccaggcaacaacccaattccccttttcagttacaaggattggtttgggtcttgttcctgcattttgtgcactagttggggtggtagtgacttgcaccatggatttccacaatccttcaaagtctttgacggcaccactattagcctagctgtgtcattgatcataattattctcctttctctaacatacaaaggtaaatggttatatcatacttggagaaatttcagctgctcggacccattggaaaattcaagcagcaagtagtactgagaatattcactttatagtttatatatatgtataatcttgtatatttattgaattattaattgttacaaatattatatgtcaaatgtatataacgtgtccacattttattaaaatgtaacattcacagtttcgtgaacttctcgttgacgatctgagaaatggaaaatagttactatg

SEQ ID NO: 12660 - DNA, 1662 bp, Glycine max
  Clone ID: 701204367_FLI
gccagcgcagggtgtagcatataccattccttgagctccttcaaatggcagagacaccaaagaagaagaagaaggggcacgtggttatggtacccttcatggcccaaggccacatcatcccattcctggcactagcaaggcaaatccaacaaagcacaagcttcaccatcaccatagccaacacacccttcaacattcaatacctccgatctgcactttcttcttcaacttctcccaatcatcaaatccgtcttgctgagttacccttcaactccactctacacgatttgccacccaacatagacaacacagagaagcttcctctcactcaactaatgaaactctgtcatgcatcactcacccttgagcctccccttcgctccttgatatcacagatcacagaagaagagggtcaccctccactttgcacaatatctgacgtgtttcttggctgggttaacaacgttgcaaagagtttatgtattaggaacctaagcttcaccacttgcggtgcttatggaaccttggcctatgtttctatctggttcaatctccctcacaggaaaactgactctgatgagttttgcgttccggggttccctcaaaactacaaattccaccgtactcaattgcataagtttcttctagcagctgatggcactgatgactggtcaagattcattgttccacagattgcactttctatgaagtctgatgggtggatctgcaacacggttcaggagattgagcctttggggttgcaacttctcaggaactatcttcaacttcccgtttggcctgtggggcctctccttccacctgcttcactcatggattcaaaacatcgtgcaggaaaagaatctggcatagcccttgatgcatgcatgcagtggctggattcgaaggatgagagttctgttctctacatttcatttgggtcacagaacactataactgcatctcaaatgatggctttggctgaaggattggaagagagtggtagatcgtttatttggatcataaggccaccttttggttttgacatcaatggagagttcattgcagaatggttgccaaaagggtttgaagagagaatgagagacaccaaacgtggccttttggtgcacaaatggggaccccagttggagattctgtcacacagttccacaggagcgtttctaagccattgtggatggaactctgtgttggagagtctcagctatggggttcctatgattgggtggccactagctgcagaacaaacattcaatctaaagatgttggtggaggaaatgggtgtggctgttgagctcactcaaactgtggaaactgtgatctctgggaagcaggttaagaaggttatagagatagttatggagcaagaaggaaagggaaaggcgatgaaggagaaggcgactgagattgcagctcgcatgagagaggccataacagaggaaggtaaagaaaaaggatcttctgtgagagcaatggatgatcttgttagaaccattttatcaccctaggctttgtgatttgttgcatttagaatttgaatgataataaagttgcttgtaaagcatacttgttatgtactgctcagcaatctttagcaatagactatggtaatattgtcactatgaagataataatttaactcatttt

SEQ ID NO: 12661 - DNA, 1955 bp, Glycine max
  Clone ID: 701204495_FLI
ggttggttctgttgcggttaatcttggtcagattactctctctaacaaccagctttctggggctctgtctccctccattggtaacttctccagcgtgcagaagctccttcttgatggcaacatgttcaccggtcggatacctacacagattgggaggttgcaacagctttctaagattgattttagtggcaacaagttctcgggtcctattgcgcctgagatcagtcagtgtaagctgttaactttcctggaccttagccgcaatgagctatctggagacatccctaatgagataactggcatgaggatattgaattacttgaatctttctaagaatcatttagtgggtagcattccctcttcgatatcatctatgcaaagcttgacttctgttgatttttcatacaacaacctgtctggtttggtgcctggtaccggtcaattcagctacttcaactacacgtctttcttgggaaaccctgacctgtgtggcccctatttgggtgcttgcaagggtggggttgccaatggtgcacaccaacctcatgttaaaggactctcctcttctttgaagctgctacttgttgttgggttgctattatgttccattgcttttgctgtggctgcaatattcaaggcccggtcattaaagaaggccagtgaggctcgtgcatggaagttgactgcgttccagcgtttggacttcactgttgatgatgttttgcattgcttgaaagaggataatattattgggaaaggaggtgctggaattgtctacaaaggggctatgcctaatggggatcatgttgctgtgaaaaggcttccagctatgagtagaggctcttcccatgatcacggattcaatgctgagattcagacattggggcgaatccgacacaggcacattgttaggttgttgggtttctgttcaaatcatgagacaaaccttttggtctatgagtacatgcccaatggaagtttaggtgaggttcttcatggaaaaaaggggggtcatttgcattgggacaccaggtataaaattgcggtggaggctgccaaggggctttgctatctgcaccatgattgttcgccactcattgtccatcgtgatgtgaagtcaaacaacatccttcttgattcaaatcatgaagcccatgttgctgattttgggcttgctaagttcctgcaagattctgggacatctgaatgcatgtctgctattgctggttcatatggatacatagctccagagtatgcctacacattgaaagttgatgagaaaagcgatgtgtacagttttggtgtggttcttttagaacttataacaggcaggaaaccagttggtgaatttggtgatggcgtggacatcgtgcaatgggtgaggaaaatgacggactctaacaaggaaggagttcttaaagttcttgatcctaggcttccctcagttccccttcacgaagtgatgcatgttttctatgtggccatgctgtgtgttgaagaacaggctgtagagagaccaacaatgcgtgaagttgttcaaatactgaccgagcttccaaagccacctggctctaaagagggagacttaacaataacagaatcctctttgtcatcatcaaacgctttagaatctccatcctcagcctccaaggaagatcaaaatcctcctcaatccccaccacccgaccttcttagtatttaaagtgctctgttgggtgtttcatcttattagttcccttggttgtgatagcttatccatttactttctttttctgtctctcttctggggttggggcttttcttcttcttctaactgaaggtattaatgctctgattttttaatggttttgtacagtaggattggtggggggggttattttcttatgaagtcactttcttcatcatgtagtactgctttttaatttttatgttacggccgttgttgtgcttcgcct

SEQ ID NO: 12662 - DNA, 1467 bp, Glycine max
  Clone ID: 701204508_FLI
gagtgagtgagtgagcaagagtgaagagcgaagagaatggctcccaagggtttaatctttttggctgtgttatgcttctcagcactgtcactgagtcgttgtcttgcggaggataatggacttgttatgaacttctacaaggaatcatgccctcaggctgaagacatcatcaaagaacaagtcaagcttctctacaagcgccacaagaacactgctttctcctggctcagaaacatcttccatgactgtgctgttcagagttgtgatgcttcactgttgctggactccacaagaaggagcttgtctgagaaggaaacagatagaagctttgggttgagaaatttcaggtacattgagaccatcaaagaagctttggaaagggaatgcccaggagttgtttcctgtgctgatatcctcgttctctctgccagagatggcattgtttcgctaggaggtccccatatccctcttaaaacaggaagaagggatggtagaaggagcagagccgatgtggtagagcagttcctcccagaccacaatgaatccatttctgcagttcttgacaagtttggtgccatgggaattgacacccccggcgtagttgcattgcttggagcacacagtgttggtcgaacccattgtgtgaagttggtgcaccgtttgtacccagagattgatccagctctgaaccctgaccacgtccctcacattctgaagaagtgccctgatgccattccagaccctaaggccgtgcagtacgtgagaaacgaccgtggcacccccatgattctagacaacaattactacagaaatatattggacaacaagggcttgttgatagtggatcaccaactagccaatgacaagaggaccaagccttatgtgaagaaaatggccaagagccaggactatttcttcaaggagttttctagagccattactttgctctctgagaacaaccctctcactggcacaaagggtgagatcagaaagcagtgcaatgctgccaacaagcaccatgaggagccttaattgcttcccgcttaatttgggccttgaattttcttccccttctctatgtggaagaaatctgtaagatattatgcaaaaaataattaaggtgtttttctttaaatgggttggttgattggttcaatgaaccgatcaagaccacagcaggttcatggggatgcgaggattaagacgctttgttttttaatcttccgatgtcactcttgtttgttagtttgtttttttattttttatttcaataagtactgtgcaagtaggttagagttgggtagaagggcatgttcatggtgttaattactatgttatgtatgcatgtgagtgctgctatcgatggcaagatgtcaatgtatgcgtgtagtgctgttatcgatgagagtgaaaatgtttatgatatccacactaataaagctagcttgttcttgctacataataaat

SEQ ID NO: 12663 - DNA, 1463 bp, Glycine max
  Clone ID: 701204524_FLI
ctctctctttttcccaattttcgaatctctctcctccatggacccaacttcgatccctccccctccggccaccaccgtccccttcactgtcgaacccagcaatcacgtgacccccgccgacaacaccaacaccaaccaccctccttacgatgagatgatatacacagcaatcggggctctgaaggagaaagatggttcgagcaagcgagccataggaaagtacatggaacaagtgtacaaggaccttccacccacccactctgctttgttgactcaccatctcaaccgattgaaatccgctggtcttctcatcctcgtcaaaaaatcctacaagctccccggatctgatcctcttcccgtgctccaggcccaaaagccccgcggtcgccccccaaagctcaaatcccagcccaacactgagctcacatggcctgcgctagccctcaacgacaaccctgctcttcaatccgcaaaaagaggcccgggtcgtcccaaaaagattgcaggacccgtaggtgtgagcccgggcccgatggtgccgggcagaaggggtcgtccacctgggaccgggagatctaagctgcccaagaggcctggccgtcctcccaagcccaaatccgtgtcggcgatctccagtgggctcaaacgacgtccgggccgcccacccaaagccgaatccaacgtaaacgtcatccccttcgcagcccctgttgctcccggcctgcccacagtgcagcccatcgttcctactgcttccgtgcccaatggatctcccaggcccagaggaaggcccaaaaagattgttgccggtgcgggggctccggcgctctcttccgttggtggtgcaccacgtggccgcggacggccccgtggggtcttgccgttggtgaggccgggccgccctcagaagctcgccgttggaaggcccaagaatcctgcaagaaggcccgtgggccgccccaagggatcgacagctgctgcaatcacagcacataaggctgctaatgatgatctaagaaggaagcttgaacacttccaatcaaaagtgaaggagtctcttggcacgcttaagccttattttaaccatgaaagtccagtcactgcaattgcggcaattcaagagttggaagtactgtcaactttggaccttaaagcaccattgagggatgagacccatcaacagccacagccacagccacaggtgtatgaacagcaatatccccagccacagccactgctgcagcaattttttcaaccacatacatcagccctgaacttgatgaaggacaacttgtacaagtgtttttaacaagacacaagagataaaagatctgtaaagcggttaggaagtagtggtactgatttttctgagggtgaagtgactctgtctattttagtttgttgttgtgcaacatttagtttgacccctgaagtaattagcgggtactgttgattctgttgtt

SEQ ID NO: 12664 - DNA, 1529 bp, Glycine max; identical to SEQ ID NO: 10266
  Clone ID: 701204592_FLI

SEQ ID NO: 12665 - DNA, 242 bp, Glycine max
  Clone ID: 701204602_FLI
tttcaatcaaagtccatcttgactctccatcgtgcattgtacatgatcaaggcaaaagcaaaactagtttttaattatagttttagtcaacaggtaaggttcaacctattagggtcacttgtatctcaaagcgtgattggcttgctttcctctgtggttcgttacctttgtctgtataaatggaaatttgtatattgtaactatattctgcatgaatgaaaatgactacacatatacgagcg

SEQ ID NO: 12666 - DNA, 1720 bp, Glycine max
  Clone ID: 701204606_FLI
ggctgaatctctgaaagattacgaggaggattttgaaaatcctgaaaagaagcccagaaggaacaagtacgctttcgcatgtgctattttggcttcaatgacttccatcctactaggttacgatattggagtgatgagtggagcagcactgtacatacaaagagatctcaaggtatcggacgtgcaaatcgaaatcctgaacggtatcataaacctctactctcccgtcggttctttcatcgccggcagaacctccgactggataggtcgccgttacaccatcgtcctcgcgggcgccatcttcttcgtcggagccatcctcatgggattctcccccaactatgcctttctcatgtttggccgcttcttcgccggcgtcggcatcggcttcgccttcctcatcgcccccgtctacacctccgaaatctcccccagctcctctcgcggcttcctcacttccttgcctgaggtatttctgaacggagggattttaataggatacatttcaaactacggattttcgaagctggcactgcggttgggttggcggctgatgctgggagtgggagccattccttcaattttgattggcgtggcagtgttagccatgccggagtcgccaaggtggctggtggcaaaaggtcgattaggcgaagccaaaagagttctctacaaaatctccgagtcggaggaagaggctcggctcagactagccgatatcaaagacacggctgggatccctcaagactgcgacgacgacgtcgttttggtgtcgaagcaaacccacggccacggcgtctggagagagcttttccttcaccccactcccgcggttcgccacatcttcatcgcgtcgcttgggattcacttcttcgcgcaagccacgggcatagacgccgtcgttttgtacagcccaagaatcttcgagaaggccgggatcaaatccgataactaccgtctcctcgccacggttgcggttgggttcgtcaagaccgtttccattttggtcgccacttttttcttggaccgggccgggcggcgcgtgttgctgctttgcagcgttagtgggctcatactctcgcttttgactctgggcctgagtctcactgtggtggaccattcgcagaccacgctgaattgggccgttgggctcagcatcgctgcggtgctgtcctacgtggcaactttctctatcgggtctgggcccatcacgtgggtttatagctccgagatattcccgttgaggctgcgggctcagggcgtggcaattggggcagcggttaatagggtcaccagtggggtcattgcgatgacttttttgtccctccagaaagctattaccattgggggtgctttctttcttttcgctggtgtcgctgctgttgcgtggatttttcactacacgctgctccctgaaacacgtgggaagactctcgaggaaattgaaaagtctttcggtaatttctgcaggaaacccaaagcggaagaaggacttgacgataacgttgaaatccaattaaagacccgtgaccaaactttgacaagcgtcgattagaataagggtgattatattgaataaaggtatccattttttttctcctaggtaaagttgtcagataatcgtagtttccactctaaactgtatttacctctctgaatgacgttgtgggatttgggattatacggtagtaataatatttacaacttttactcgcgttgc

SEQ ID NO: 12667 - DNA, 1108 bp, Glycine max
  Clone ID: 701204661_FLI
aaagacttctccactttcttcttcactgaaatagtatataagggccaacatagccacccaaaaccgcagtctactagaagaacaaactctcaatcaattcatcaaccttcttcgtcttgcacaaactcagggataactgatcattcagtggtgactctaggaaatccacaaatggatcatttctccatacaagaagattcttcagcttctgttggagaggaagagtttgagcaaacaccgcaaaccagttattccggaggagacggagataatcttggacctgatgccaaaagatggaagggagataacgaaaacgatggctattcagtctcagcaagcagatctgttagagagcctagagttgttgttgaaaccacaagcgaaattgatatacttgatgatggctttaggtggaggaaatatggacagaaagtagtcaaaggaaactcaaatgcaaggagctattacaaatgcaccgcccctggttgttcagtgagaaaacacgttgagcgagccgcacatgacatcaaagctgtgatcacaacttatgaagggaagcacaaccatgatgtgcctgctgcacgtggtagcggaaaatataactcgaacagaaattctcagaacagcaacatatcagcgcctataagaccctcggcagtgaattgttattctaactcatcaagtttcacaaattctctctataataatactaggcttccagcaactggaaatcaagaatcattttcactggacaagttcaagaatcctggaagttttggctattcagatcttaacagaccaatgggttcacataccaatcatgcacaatacacagatgctgcatactcaagggccaaggatgagaggaaggatgattcattccttcagtcatttctctcaaaggacttctaaatttggagtggaccacaactttacatattatcctggatatgtttttgtatagcatgtaggattttagttattcacagcagaatatagacaaaaaaattgcaaatgtttacttatttacctcttttagattagtgactggcactacagccatagtgacagaaaattgctgctatacctgtctgccaagttcttgtcc

SEQ ID NO: 12668 - DNA, 1393 bp, Glycine max
  Clone ID: 701204858_FLI
aggttttctttctttctgccgctcaaatacggagagagagaaattgttgaagaagcttttctacttcgagcatttttattatttaattttgtttggttttagggtttgagaatcagcactgtgtcacgatgtccaatcatcaccgttcttcctctaagaacggccttccacctcaagaactccttgacgatctctgcagccgatttgtgctaaatgtgccaaaggaagatcttcagtcatttgaaaggatcttgtttcttgtggagaatgcacattggttttatgaagataattccgtagaaaataatccatctctgaagtcattaaatctgaaggagttcacttctttattgttcaatagctgtgatgtttttcagccttatgtggcccatatagatgatattttcaaggacttcacttcctataaggttcgagttcctgtaactggggcaataattcttgatgaaacatatgaaaggtgcttgctagtgaagggatggaaaggtacaagttggagtttccctcgtggaaaaaagagcaaagacgaagaagatcatgcatgttccattagagaagtcatggaagaaacaggttttgatgtttcaaaacttctgaacaaggatgaataccttgaagttatttttggacaacagagagtgaggctttacattattgctggagtgaaagatgatacggcatttgctcctcttaccaaaaaggaaatcagtgaaattgcatggcaccggcttgatgatcttcaaccagcaagtgatgaagtgatatctcgtagcatcaccggccttaagctttatatggtggccccatttctggcatcattgaaatcgtggatttcaatacaccaccctgcaatggctccaaggcccgatttgcctcttaaaggaatttgcgtctggaaagcaaaacccggttctattggaagtagctccacagtaatggatatccagccaacaaaacctgaacctgattctcacacccttgacatggggcctggcaagagctttcggaatttcagatttgatactgccttgattttacaagcaatggaagcttccttttcttcttgaaagtccagcaacctttatgtaaagtttcacgtaactgaattgatttcccctctttcattggtagtattcactatccatgctaattagtttgttgctgtacatcatgttcctcaagttgtctggttgattgaataatatgtatattgtgtacaggaagtatttgtacctaaatagttttctcagttagtgtggtattatctgtaaaactagagtaaaggttcaatgtaaaagttagactactccctacatttgaactcattcagactccgggtctcgggcagaattaaaccgatttatttggtaatgcc

SEQ ID NO: 12669 - DNA, 1523 bp, Glycine max
  Clone ID: 701204934_FLI
gttatcttctgtaacttcttcacctcttcagttcttttccatgatgtctctttcagtttcacctagcttaggatctccctaccaaatgaaatgcgagcaaaggggtttggtattaatccatttgttgctcgctggtgctaattttgtagccaccggtgatttacaaaatgcaaacctcacacttgagcagatttcccagcatgcctctcttgatggggatactatgcagcgaattgcttcttatttttctgaagcactcgctgatcggatacttaaaacatggcctggcatccacagggccctcaattccagcagaataactatggtttctgatgaaattcttgttcaaaagctcttctttgagcttttacccttcctcaagttctcatatatcctcactaatcaggctattgttgaagccatggaaggggagaaaatggtgcatatagttgatctctatggggccggaccggcacagtggatttctctcctccaagttttgagtgcacgtcctgaaggtcctccccatttgagaatcaccggggtccatcacaagaaagaggttctggatcagatggctcataaactcactgaagaggcggaaaagttggatatcccattccaattcaaccctgtgctaagcaagttggaaaatcttgatttcaacaaacttcgcgttaaaactggggaggcactggcaataagttctattatgcagttgcactcccttttggccttggatgaagatgcctcgcggagaaaatcgcctcttttgtcaaaaaactcaaatgcaattcacctgcagaaaggcctcctcatgaaccataacacactgggagatttgcttgacggctatagcccgagtcctgattcggcctcatcctcaccagcagcgtcttcatctgctttgatgaattcggagagctttcttaatgccttgtgggggttatccccaaaagtcatggttgtaactgaacaagactttaaccacaactgtttgaccatgatggagagactggcagaagctctattttcttatgctgcatattttgattgcttggagtccacggtctcaagagcatccatggacagattaaaacttgagaagatgctttttggcgaggagataaagaacatcatagcttgtgaaggatgtgaaagaaaagaaaggcacgaaaagatggataggtggatccagagacttgacttatctggatttgcaaacgtgcctataagctattatgggatgctgcagggaaggaggttcttgcagacctatggttgtgaggggtacaagatgagggaggaatgtggtcgggtgatgatatgctggcaggagcgatccttgttttccataacagcttggagaccaaggaagtaagataaagaagaaaattagtcatgtagtaatggatagagtctctttttttaagtttttcttttcttttctttgtttctaattgtatgacagagttttaccaatgtggtaatgactagtaatgaagagatacttctatttcctt

SEQ ID NO: 12670 - DNA, 1066 bp, Glycine max
  Clone ID: 701205017_FLI
aataaaaagatttaaaattaattgcagtaaggtcttaaagagggaagtgttggtggttgataatacacaaacaccagtactagtatgttttatatgaccatatcaggttaaaaaagaaagaagatgctaagatattgtgcttctcaggtaagaaacctagtcgtagcgaatccattgagcagtgaagacgtgcagtaatcgatgacgtgtcgtcaaaagaaagtgataggatagcatgggaaaacaacccactggcctcaacttcaccaacgacgccgacgtggagcagagcagccaccacaatactcgtaagtgagtgcgcgtaaaaggagaaaataaaaaacacagaagcacacaaccacagtcaacctttgtatctttctttgcattacccaattgcacagtcttctctctctctctctgctctgtttttgtttgtagaactactctaaaactaaaaccctattcctctgtttttgttattcccacgatgatgcctccttctcagccacctcattgggccccatctcccacaccaatcctcagcaagtctttcctacccccgacgtcaaactcgccggcggttgacttcactccgcccttaatagcaatggtcgtcgtcgtcgccgccgcgtttcttgtcgtcacctactcccgcctcatcgcgcgccacctcagaccacccgtccaccgcctcctccgccgcttccgacgccgccgcttcctcccctcctccgtcggcgacctcgagtccctcccctacgattctcccttcgacggaccgcacgtgttctccccctacggtttggacgaaacggttattaaaacaatcccgttctcgctttatacagcgaaatacgacgcgcgttttgatgagtctcgctacgactgcgccgtttgcttgctcgaattcgaagacgaggattacgtaagaacgcttcccgtttgttcacacacgttccacgtggactgcatcgacgcgtggcttcgctcgcacgctaactgtcctctctgccgcgctggagttctctgcaccgattcacctttcactccgatgatggccgct

SEQ ID NO: 12671 - DNA, 1171 bp, Glycine max
  Clone ID: 701205068_FLI
agcagatggacaaaacaagaataggagttctggtgggatcaggaatgggaggtataacggctttctcgaatggtgtggaagctcttgtacaaaagggatataagaaaattactccatttttcattccctactccatcaccaacatgggttctgccttgttggctatagacacaggcctaatgggtcccaattattcaatttccactgcttgtgcaacggcaaattactgcttttgtgcggctgctaatcacattagaaaaggcgaagcagatatcatggtggttggtggaactgaggctgcaatcatgcctagtggtcttggaggcttcattgcttgcagggctttgtctcacagaaacgaagaccccaagaaggcttcaagaccatgggacaaagatcgtgatggttttgtgatgggtgaaggctctggtgtgctggtaatggagagcttggagagtgcaacaaaaaggggagccaaaataatagcagaatatttggggggtgccataacgtgtgatgctcatcacatgactgatccaagagctgatggtcttggagtttcatcttgcataagcaagagtttagaagatgctggagtttctcctgaagaggtgaactatgtgaatgctcatgccacgtcaacactggctggtgacttggctgaggttaatgcaattaaaaaggtttttaaggacacatcagaattgaaaatgaatgcaactaagtcaatgattggtcatggtcttggggctgctggtggtttggaagccatagcaactatcaaagccataacaactggctggttgcatccaagcattaacctagataacttggaggctagtgttacaattgacactgtccctaacgttaagaagaagcatgaagttaatgttggtatatccaactcatttggattcggtggacacaattcagtagttgtctttgccccattcaggccataagtaggattcaaactcaatctgagtatttcttttactttgtcttttttttttctttacacattttgagaaccagtgatttttggacacaaattcataggactatgagttatggactgaaaatagttgtttcattatgtattgaaatcatatacccagatcgtgtggtctaatgtaatgagccctgaagtcaataaaatgtaattttcagc

SEQ ID NO: 12672 - DNA, 1735 bp, Glycine max
  Clone ID: 701205124_FLI
ggaaactcaaaatatttcaaatttcactctttctttctgcacaatattttcccatctatttttttcttcttctcaaaactcacatattagtattttctcccacaaaatttcagctcataatttttatttttcgatttcatccaatcctgctaatttatttttaatgacgaaatttacgcaaatggtgcaaaggtgaagattttccacatcttgtttcatgcccagctcctcaagctagcttttaattttgatttttctcatttcctggcttaaatttttcatcttttctaaaagaaaaaaaatcatttcccagcagcatagcatagtagtagaagttttgggtgattgagtttgaagaagaagaaaaaatatgagatattgatgtgtggttttactttatgttacgtgtgagtggtactacttctcaagtgtttgaacatggagaccagtggcggtgttagcggcggcgttacgctggtgggatcggatgctccgtcggactaccatgtagctccgaggaccgacaacccggctccggcaagcggatccacgacgcagattccggcgacggcgggaagtgttccgccgtcgccacatccgccacacacggcggcgatggaggcgtatccggcgaagatgccggcgaaaaagaagaggggccggccgagaaagtacgcaccggatgggtcggtgaccatggcgctgtctccgaagccgatatcttcctccgctccgttgccgccggtgatcgatttctcgtcggagaagcgcggaaaaataaaaccaactagctccgtgagcaaagccaaattcgagttggagaatttaggtgaatgggttgcatgctcagttggtgctaattttactccccatatcatcactgttaattctggggaggatgttactatgaaggtaatatcattttctcagcaagggccgcgagctatatgcattctttcagctaatggggtcatatcaagtgtcacacttcgtcagcccgattcttctgggggcacactgacatatgagggacggtttgaaattctgtctttatccggctcattcatgccaagtgaaagcggaggaacacgaagcagatccggtggcatgagtgtatctttggcaagccctgatggacgtgttgtaggtggtggagtagctggtctgttggtggctgcaagtcctgtgcaggtagtggtaggaagttttctggcaggaaaccagcatgagcagaagccaagaaaacagagacatgaggttataacaagtgtgataccagctgcagttgttccaatctctacccttgatccagtgccaattctatcagcagcgtcttccatccgaaacgataattggtctgctatgccagcagaggccaagaataagccagctgacattaacgtgtcgcttcctgcagggtaattaacttatagatcttcattccatctgaatttacatttactgctgacaacattgtaatgtgatggattcctagttgttggctttgctttccgttgtttgttgtgtctgtaattgttgactttctaccgggaccagcattgttttcagaggtttaccagcttcctgttcttgtagaatttgagttggctgattaggtatgcttttaatgctgatgttgtgacatgaacaacactttgatgtgatagttattcatgagaatccatcttccctttggagtgatagattgcgcaatccacgttatttctattaagac

SEQ ID NO: 12673 - DNA, 1022 bp, Glycine max
  Clone ID: 701205203_FLI
gttgaagaaagcataaaacaaatatatgagttggtttctattgaaacgaggttaatttctttgtttgtgatgaaaatgttgagagcagattcaagatgccagagaaatcaataccaaaggatgcagcttttcagataataaacgatgagttgatgttggatggtgcaccaaggctcaacttggcttcgtttgtgaccacttggatggagcctgagtgtgacaagctcataatggcttcacttaacaaaaactatgttgatatggatgagtatcctgtcaccactgagctccagaaccgttgtgttaatataatagcaaatctattccatgctcctataagtgaagaggagactgcagtaggtgtgggaactgtggggtcatcagaggcaataatgttggcaggtcttgcttttaaaaggaaatggcagacaaagagaaaagcagaaggcaaaccatatgataagcccaatatagttactggggctaatgtgcaggtttgttgggaaaaatttgcaaggtactttgaggtagagctcaaggaagtgaaactcaaagagggatactatgtgatggaccctgcgaaagctgttgaaatggtagatgagaacaccatctgtgttgcagccattttgggatcaactatgactggagagtttgaggatgtgaagcttctcaatgaacttctcactgaaaagaacaaggagacaggttgggataccccaattcatgtagatgctgccagtggggggtttattgccccatttctatatcctgatttagagtgggacttccgtttgccgttggtgaaaagcatcaatgttagtggccacaagtatggtcttgtctaccctggtgttggttgggttgtctggaggagcaaagatgacttgccagatgaacttgtttttcacataaattatcttggatctgatcagcccactttcacattgaatttctccaaaggatctagtcaaattatagctcaatattatcaattgattcggcttggctttgagggttac

SEQ ID NO: 12674 - DNA, 1285 bp, Glycine max
  Clone ID: 701205228_FLI
caaacccctaagcaactgctttatgattgtgctaggatactttcagaaggaaatgaacaggaagccacatctatgataaacaagctccggcaaatggtctcaattcagggtgatccttctcagagaattgcagcttacatggtggaaggacttgcagctcgtgtcgctacatccggaaaatgcatctatcaagcattgagatgcaaggaacctccttctaacgatcgcttagcagcaatgcaaatactatttgaggtctgcccgtgttttaaatttggatacatcgcggcaaatggtgcaatagctgaggctgttagagatgaaaagaaggttcacataatagactttgacatcagccaaggaactcaatacataactctaatacaaacacttgcttcaatgccaggtaggccacctcatgtgagattaaccggggtggatgatcctgagtctgtgcagcgttccattggtggcataaacatcataggacaaagacttgaaaagctggcagaggaacttggattgccatttgagtttcgagcagtggcgtcagggacctcaaatgtcacacaatcaatgcttgactgtcgtccgggggaagcacttgtggtgaactttgcattccagcttcaccacatgcgcgatgaaactgtatcgacagtgaacgagcgagaccaacttcttcgcatggttaagagcttgaatccaaaacttgtgacagttgtggagcaggacatgaacaccaacacctccccttttctcccaagatttgttgaagcctacaattactactctgctgtgtttaacacacttgatgcaactctccctagggagagccaggacaggatgaatgtcgaaaggcaatgcctggcaaaggacatagtcaacattgttgcttgcgagggtgaggaaagaatagaacggtatgaagtcgccggaaaatggagggcaaggttgtcaatggctggcttcactccatccccaatgagcacaaatgtgagagaagcaattaggaaactcattattaagcaatactgtgacaaattcaagataaaggaggaaatggggggtcttcattttgggtgggaagacaaaaacttaattgttgcttcagcatggaagtgaccaatacaaattcttttgttgcatgagactcattgtagtgttgatgtagtatttgtttgcttgtttagtttgtatctgttatgtttatgcttggttcagactcagatgtatactaacgtgcaacttatgctaatacatactttcatgtgtatggcaacac

SEQ ID NO: 12675 - DNA, 1213 bp, Glycine max
  Clone ID: 701205278_FLI
ctgcagcatccatggcttcttcattgggtcgaagaagaacccacgctcccaaagcatcctccacccttaacgacgacgtttcctgcgaggaatgcggcggtggccactccccttccaagcttattctctgcgacaaatgcgaccgtggctaccacctcttctgcctccgtccaattcttccctctgttcccaaaggctcttggttctgcccctcttgctccaatcacaaacccaagtctttcccccttgtccagaccaaaatcatcgacttctttcgaatccaacgctcccctgaggcattatcaaatcaagacacgcggaggaagcgaaagcggggtgggggcttggtggtatcgaagaagaagaggaagctgttggcgttcgtgccgagtgaggatcccaatagaagattggaacagatggcgtcgctggcgacggcgttgaccacaactaaaacggagttcagcaatcagcttacttacatgcttgggatggcaccaaggtccgctaatcgtcctgctcttggacgcggtggaatgcaggttttgtcaaaagaagacaccgagaccttaaacctgtgcaagcgtatgatggaaagaggagaatggccaccactcatggttgtttttgatcctctagaaggcttcactgtagaagcagatagatccatcaaagatttaaccataataacagaatatgttggagatgtagactttttaaaaaatagggaaaatgacgatggagatagcataatgacacttctctcagcttctgatccttcgcggacgcttgtcatctgtccagacaaacgaagcaacatagctcgattcattaatggcatcaataatcacacgccggaagggaaaaagaagcagaacttaaaatgcgtgaggtttgatgttggaggtgaatgccgggttcttttaattgccaatagagatattacaaagggggaaaggttatactacgactacaacggagatgaacatgaatatcctactgaacattttgtctgattgcgttcaaatatcaattataagcaaatcaccctaacagggagggcttgtaagctcattgtaagctcgtgattttttcatttctaagttgatttggtcacccaccttaaaatggttgccttgtcactaccccacatgttggatacacaatatatttcacagtagacttgtggtttatattgttcaattattttttt

SEQ ID NO: 12676 - DNA, 1517 bp, Glycine max
  Clone ID: 701205280_FLI
ctcaaggtttggcttgtgcctttgtgtgctcatttttcactaaacaccaacccaaaccttatacacaaacattcttaattttgatatttttgtttatatattctaggtttttgttaattaattatattaagcatcatgggaaccccacaatccaataacttgccaccagggtttaggttccaccctacagatgaagagctcattcttcactacctaaggaagaaggttgcctccattcctttgccagttgccatcattgctgaggttgatatctacaagtttgatccatgggagctaccagctaaggccgcgtttggggagaaagagtggtacttcttcagtcctagagaccggaagtacccaaatggagcgaggccaaacagggcagcagcttcagggtattggaaggccacaggcactgataagaacatagtggcatcactggcaggaggagtgagggagcactttggtgtgaagaaggctttggtgttctacaaaggaaaacccccaaagggtgtcaaaaccaattggatcatgcatgaatatcgccttgttgacaccaatagacccattaggatcaaagacacctccatgaggttggatgactgggttctatgccggatatacaagaagttcaagcatgctgtatctccaaccacagaggcagcatcaacactgcaagtgatcaatgagcaattagatcaagcagtggtagaagaagaggagcaaatcaaagacacccttttaccaattttgaagaataacaacacttttgtccctcctccacaagccacaatactcatgtctcagaaatccttatccttctcaaatctcttggatgccacagactactccatgcttagcaccatcttatctgagaaccactccaataattaccctactccaagtgaaaccagcttattcaataattgtgagaatctggatcaggaaattaccccccaaaactactacatcaacgatactaatagtattaataataatagctacttgtttcagaagaacccttccaacatggaaaacattgctaggccaaaacgccaccttccaaacatggatcatgaggacaacatgttattataccctttaaagaaatatcatagttcctcttgcaatttccccaacaccaacctccaaaaccagaatccacaatggaacttcatgttcaagcagccactcatgagtcctcaatatcttcaatttcagtgataaatagcaaacaattatacgagtcacataaagaaaagaagaaaaaaaggttagggagaaaataaaaatgaaaaaaaaaggtgaaatatctacaagatgaatgtgctacatggtatccacatcaaccttttcactacgtaaggattagcacacagaaagatagcattttttttctttttcttttatgttgaaaaatgatgaaaagagacttcattggatcatgaactattacggaatcacagaaaaatcgtgtacaaataaaaatgttaatttgtacgtgttgggttggg

SEQ ID NO: 12677 - DNA, 2090 bp, Glycine max
  Clone ID: 701205373_FLI
cactcttcaatcaaactcgtgcagaagccaaaggccagtgttatctacgtagagacttgtagtccaaagcttggccacaattgaagcacgagagcattatccctttggattaatatagccatctcaaatctcaatttcgataatccgttagcacttttttcagtggctctggtgctgccattacgttccaccaaccgccactgccacacaaatacacttcactacagacaaataaaattcacactcttttgtcagacacgtataagtgtatgacattctctactacaactacttggtgtttcccataccgaacactcttcttcaatcaagcgaaggtggtctcgattgcaagtgatccacgatacactctacgcttcacaaaaccttcaaacccaattccacagaattcttctgcttcaccatgccaccaaagcctttagactatgggtcaataaatgaaaacgtgaagaagagtcaatatgctgtcagaggtgaattataccttcgagcttctgaacttcagaaagagggcaaaaagattatctttactaatgttggcaacccgcatgcattgggacagaaaccactgagcttccctcgccaggttgttgctttgtgccaagctccattcctacttgatgatcctaatgttggactgctattccctgctgatgcaattgcaagagctaaacactatctttcattgacctcgggtggtttaggtgcttatagtgactcccgtggccttccaggagtgaggaaggaagttgctgagttcatactcaggcgtgatggttatccaactgatccagagctcatatatctcactgatggtgcaagcaaaggagtgatgcagatattaaatactatcatcaggggtcaagacgatgggattttggttccagtcccacaatacccactctactcagcaacaattgctctgcttggtggtacccttgttccatactaccttgaagagacagcaaattggggtcttgatgttaatgaacttcgtcaatcagttgaacaggctcgctttaaaggaataactgttaaagcaatggtgatcataaatcctggaaaccctactggtcaatgccttagtgaagctaatctaagagaggttttgcaattctgctatcaagaaaatttagccttgcttggagatgaggtttaccagacgaatatatatcaggatgaacgacccttcatcagttctagaaaggttttgatggaattggggccacctataagcaaggaagttcagcttatttcttttcactctgtgtcaaaaggttattatggtgaatgtggacagcgaggtggatattttgaaatgaccaacattcctccagagacagttgatgagatctacaaggttgcatcaatatcacttagtccaaatgttccagcacaaatatttatgggagttatgctcaatccacctcaacctggagatatttcttatgacaaatttgttagggagagcaccggaatacttgaatcactgagaagaagagcaaggataatgactgatggattcaacagttgcagaaatgtggtttgtaattttactgaaggtgccatgtattcattccctcaaatacgcttgccgccaagagctttagaggctgctaaacaggctggaaaggttccagatgtttactactgcctcaagcttttggaagccactggcatatccactgttcctggttcaggatttggtcagaaagaaggggtgttccatttgaggacaactattttaccagctgaggaagacatgcctgatattatggatagtttcaaaaagttcaatgatgaattcatggagcaatacgaagacgatagaggttattcaaggttgtaagaaaatcattgtaaaagctgcattatactcttgcgcttttggaagttcttcatccatccatccctcggagagaaaaaaaacataacctccgtttctactatttgtccttcattggagattattcttaaaccttacactttcttctatatcatctctgaacttacaatatttcggctgtatatttaatctctcttgaacttttatcattttatgcttggcaatc

SEQ ID NO: 12678 - DNA, 559 bp, Glycine max
  Clone ID: 701205427_FLI
ctcagcccctcggagggtttcattgaagagttcagaagcaggacaccaacacttaggtttggcagcatgtgtggcagtaaacaacctcaacatgaatgttgttgtgtgtgtctcacaaagtttgaaccagaatctgagataaactgtttatcatgtggccatatttttcacaaagtgtgcatggagaagtggttggactattggaacattacatgcccactttgcaggacttccttgatgcctgaagatgatgcatcttgcttttggtaaaaaaacatgtacatataaaagaaaagagatatattcatgtacagtatatattgtatgtacatagttgtggcagtgttgatgttcccttggtcttggctctaacttttttaaccctttacttttttatgattgttaaagtgtgtggagggtcttgttttcctttgtttctctgtatctggtgttgccacatatgagtcgagggatctacttttttgggataattgtgtttgtccataatatcctcttgatatgtaaacagacatcatatacagacccttttgcttttgcc

SEQ ID NO: 12679 - DNA, 1515 bp, Glycine max
  Clone ID: 701205474_FLI
atagaactcgtttcatatgtctctcattcttctctggtttttggcaaaatttttcggatttattcaatttctctctgtgtaaatacttcaacttttccaattctcaccttcgcatgttgattcgtagtcagattttttcttgttcaaagatgcactagtagaagagggaattaccctgtttccaagctttcctctagagtagaagcaattagtagagtgtcataaaaagctgtaggctttccttcaatgggtgctcctaagcagaaatggactgcggaagaagaagcggcgctgaaagctggagtactcaaacatggggcaggaaaatggcgcaccatacttacagatcctgagttcagtgccatcttgcgtatgcgttcgaatgtggatctcaaggataaatggaggaatataaatgtgacagcgatatggggatccggcagaaggcaaagcttgctcttaaaaggaacctaccagccccaaaattgataataccatatggcttgagtacatagttcgaaatgatgagttcttgatactaagcccatagcagtttctggtggaccattgcaatcccccaatttgaaagaacaaatatcaaggttggtggataatcatatattagaggccattgtcaatatgaaggagcagaagggttctgacaaggttgccattgcttctttcatagaggaaaaatatcgctcaccacctaatctcagtaaattgctgtcaaccaaactgaagcatatggtggcaagtggcaaaatagtcaaggaaaagcataagtacagaattgcgccaagttcaactgtctctgagaaaagaagatgctcttcattggtacttttggaagagaagcccaaagatccttcagaagtacataagaatgatgatgtcaacatcctttcaaaatcccaaattgatgcagagatttcgaaagtgaagggcttgacagctcaagaggcagctgctgcagctgcaaaagcagttgcagaggcagaggctgcaattgcacaggctgaggcagcagctagggaggctgaggctgcagaagctgaggctgaggctgctcaagtgtttgcaaaagcagcaatgaaggcgctaaaatgcaaaatgcttcatatttgatggtgtggacttacacatgctcatcatcagcagagttggcttgagatgatagttctgctgctgtgcttcctgccagtttttttcgtaactgtacataattttcggcttgtaaatctggaatatgcaggatgattcatgaaatattctgtcaggaatcaataacagcttttttttttcaattcatttttattttaaccttttcttataaaggaagacaatgaggggaaagctacaaagcagtaacggaagagtggaaatagcgatgtttttttgtaatggaataattgacatccgcgtagagtaaatgaaggaaacaatttttagtgttcaaatagcaatatggattgtcattgacatgcagatcatatattcaaggatgcttgttct

SEQ ID NO: 12680 - DNA, 644 bp, Glycine max
  Clone ID: 701205476_FLI
gagcggcaactggattcatctctcaagcaagtgaggtccacaaagactcagttcatgctggaccagttagctgatcttcagaataaggagcatatgctggtagaagcaaacagatctttgaccatgaagctggaagaaatcaattcaagaaaccagtataggcaaacatgggaagctggtgagcaaagtatgtcatatggtacacaaaatgctcactcccaaggctttttccagcctttggagtgcaaccccacattgcagataggttctgactacaggtacaaccctgaagcctcagagcagcagctagctgccacaactcaagctcaacaagtcaatggatttattcctggatggatgctttgacctaagctctcagtattttggatggctacataaataaaattagcaaacacctaagaccaaagtcaaaatgcctcttgctgttggaaatgtgtaaatgctgcttgttctttagttatttatttgttttggcataaaaacagcagtgactgacttaaaactattaaaactttagccatagtcataggatgtggcatgaaggttatagtattttgaatatctttggaggacaagttttatctgactgaatgacctgttaatgtcatttttcttttgcaatc

SEQ ID NO: 12681 - DNA, 851 bp, Glycine max
  Clone ID: 701205560_FLI
gaaaaagaggcgcaagatgagtggtagggtttctgggaaggtgaagtggttcaatgatcagaaggggtttggattcataagccctgacgatggcagcgacgatctcttcgttcaccaatctcagatcaaatctgacggtttccgaagcctcgccgaaggagagtccgttgagttcgccattgaatctgaatctgacggacgcgcgaaggctgttgatgtcactggccccgacggcgccagcgtccagggaaccagacgaggcggtgatggtggccgaagctatggcgggggacgaggaggtggtggaggtggctacggtggaggcggtggctacggtggtggtggtggctacggtggaggcggtggttacggtggtggtggaagaggcggtggaggcggtgcttgctacaactgtggtgaatcgggacatctggctagggattgcagtggaggcggtggtggggacaggtacggaggaggttggtggtggtggcagaatatggaggccggcggtggcgggaggtacgttggtggtggaggcggcggcggcggcggaggaagctgctacagctgtggagagtctgggcattttgccagagattgcccatcaagtgctcgttgaatttactgttagggttgtttatgttttgcggattgttttaagtttttactttaatatgtcttagggattttaatggtttctgtccaaactatgggttcttatgagtagatgtgtgggatttttcttttttggttatttaaatgaagggtttctgtgttatcgttacaatctgcaaactaaaatctgtttgaacttacattttgctataatgaatcgtatgattgctatc

SEQ ID NO: 12682 - DNA, 704 bp, Glycine max
  Clone ID: 701205621_FLI
ttgcagccaatacaagttgccatatggtttcagaatagaaggggccagatggaaaaccaagcatttggagaaggaatatgaagtcctcaagaaacagtttgaagcagtcaaggccgataatgatgttcttaaggttgagaaccagaaactacaggcagagttacaagctgtaaaaagtagggattggtgtgaagctggaatgatgagccataagaaagaaactgagggttcatggagcaatggaagtgataacagtttagagattaatctagatcactcaagaacactaggtttgaatagtcccatatcttctcagaacggtaaaaacctactactacccaattcgttaaaccccaccagcataacacaactccttcaagatgatggcttgtgcaacatgtttcacaacattgatgcacaacagaacttttggccctggcctgatcagcagcaccagcgtttccattgaccctatataaatgattttgggtattaatgatatgatatgagcagaaattatacaatacaatcttttttcttcagttttttttttctttcaatttatttaggtgcagtagattgctgtataaagtttgaacaaattaaatctatttgagtcatgaggagtcggtggactttgagcagtgcaatttctttccttgtattgcagaatatataaaataatatttacgttaggctgaagt

SEQ ID NO: 12683 - DNA, 1818 bp, Glycine max
  Clone ID: 701205658_FLI
gaaattagcaaaaatggcggaagtgagagggagggacacgtggacggaggagctggcgagtctgatagaggattcgggagtgcgctacggtggagattctcctccgacgtcgtttgaggtgcacgcgccgcagagcgagtcgggggagagcttgaaggagcaggccttggggttcgtgatggcgtggtgcgagatactcatggagcttgggagagggttcagggacattctgcgacagaacttgatcaacgaggattcgtatgtggtgaggaagttcggtggaccttgttccaaggtttcgaagaggttgaggtttctcaacgactttctccccgaggatcgcgatcccttccacgcttggtctgttgtgttcttcgttttcattctcgcgctcgcagctataagtgtagatcccaatcgtgaagcagtggcccctgtggtgaaggtgcgtcaacatcctcctagtgctagtcgtgtgctacttccagatggtagatacatggcttatcatgagcaaggtgttttggccgacacagctagattttcacttgttgctccgcactcttttctttcatccagactagcaggtttacctggagtcaaagcatcattgcttgaagagtacggcattcgtttggtcacatatgatcttcctggttttggggagagtgatcctcatcccaacagaaatctcaactcatcagctatggatgtgctgcatctagtcaatgccgtcaatgttactgataagttctggatactgtgccactctagtggatgcatccatgcttgggcttctctcagatatattcctgagaaaattgcaggtgcagcaatgttggctcctatgattaatccatatgacccacacatgactaaggaggagatgaaaagaacttgggagaagtggctgccaaggaggaaaatgatgtattctttggctcgtagatttccaaaacttctctctttttttctatcggaaaagcttcttgcctgaacagcatgatgagattgataagctgctatctgtctcgccaggaaagaaggataaacttgtgactgaagaaccagaatttgaggaattttggcagagggatgtggaggagtcagttcgtcagggaaacatacgcccatttatagaagaagctgttctgcaggtatcaaattggggttttgacattaaggaacttcatgtgcaaaagaagtgtcaaacaagaggcatacttctttggttgaaatccatgtacagtcaggcgggctgtgaattagcaggatttcttggccttaaacacatatggcagggtctggatgatagggtggtcccaccatcaatgatggaatatatagagcgggttttgccagaggctgttatccataagcttccaaatgagggccacttctcctatttctatttatgtgatcaatgccataggcagattttcaccactctctttggaactcctcaaggtccggttgaacgacaagaggaaactgcaactgcattcgaggaagaagataaggaagaggttttacaagtacctgtttaacagcttctaatgttgacatgacacgttactgctcataggcacgacggtcttaggttggatgtaaataccacaggcggctccactgctcggtggagcttgaaagaagagagaatggtcgttaaagttggctgaattttgaaccgttaagagcttttggagatataggtaaagcacgaatgttacacattgtttttcctttcctctccctagcaaattgtaccttaaaccctgtctaatttgttctagacagttccacgtgcaatcatttttg

SEQ ID NO: 12684 - DNA, 1546 bp, Glycine max
  Clone ID: 701205720_FLI
gccgtccctggcgggatcccccagtcgtcaaggaagccgtccgctcctccgcatcaaagggcaagccgccgctctcggctggcaacaacaacaacggcggatgggataattgggacccggacgacggattcggatcggccaggggcggggcggatctcaggaggaaccagtccaccggcgatgtgaggggattcggaggcggcgggaacgtgtcgaggtcgaaatcgactcaggatatgtacacgcgggctgaattggaagcctctgctgccaacaaagaagacttcttcgcgcggaagagggcggagaatgagtcaaggccggaggggcttccgccgtcgcagggtggcaagtatgttggattcggatctggccccgccccgaaccagacgggggttaatcagcaaaacgattatctttctgtcgtttctcagggatttggtaaattatcattggctgctgctaatgttgttcaggccgggacaaaagaattctctgctaaggtaaaagagggtggttatgattacaaggtcaatgaaactgtcaatgttgcctctcagaagacatcagagattggacaaaggacttggggtataatgaaaggggtcatggcattggcttcacagaaggttgaggaattcgctagagataacccgaattggatgtctgataactggcaacgaaatgaaagtgatagaaatggtttctaccaggagttcaatcgagagaataatggccgaaattcttctaccagagaaggacaacattcttcaggtgggcaaactaatacttttcactcaagctcttgggatgattggggccacaatgattctaggaaggaagaaacagctaaaggatcagctcctcagtcatcaggtgggaagtttgataataattataactcaagctcttgggatgattgggaccaggaagatacaaggaagaaagaaccagctaaagggtcagctgcccatagcagtgatggttggactggatgggataatgccaaagatgatggatttgatgatatctatgggagtgcatctaataataaaggtggcgctcataatgacaagtcaggtgctgcctggacaggaggaggctttctctaaggttttgacctgatctctatcagcatgatcaaagttttgttggaagtgacgcaatacagtacctcttggactggtggcatgcaaaccgagtaggggtgttgtttaatatgatggatgtgacctgattgtcaactataagtttgttggtcactattaaattcatgccccgtatgtgctggatgaatgatatattttgaggttagagtaatgtctgcaagtctttatttttcaacattcccccatcctcccttgtgtaatcttttcatgtgattttttggggacttctgtatggttggaaacttattttaaatgtacgtacaagtgtctaaagaaagggcaaattgcccaaatttatgattatttttactggaagtgtgatgaaacatttattgtgacacgaaaatttcataatggttttgaatttatagcaactt

SEQ ID NO: 12685 - DNA, 1908 bp, Glycine max
  Clone ID: 701205731_FLI
ctgggttggtgttagatttgatttttttttttttttgtagatttattaatttattggttgttgttgttgtttattcattgttcagagatagaaagagaaggaaaaaagggctattatggcaggaggaggagctccagctaaagcagatgagccacagccacatccaccaaaggatcagttaccaaatatttcttactgcattactagtcctcctccatggcctgaggccatacttcttggttttcaacattttcttgtgatgcttggcacaactgtgttgattcccactgctcttgttccccagatgggaggtggcaataatgagaaggcaagagttatcgaaaccctgctttttgtagccggtattaacacattgttgcaaacaatgtttggaactcgactgcctgcagtaattggagggtcttacacctttgttccaaccacaatctcaattatccttgctggccgattcagtgatgaaccagatcctatagagaaattcaagaggataatgagatcaatccaaggtgctcttattgttgcttcaactcttcaaatagtactgggcttcagtggtctctggcgtaatgttgcaaggttcttaagtccactttcgtcagttcctttggtatctcttgttggttttgggctgtatgagttagggttccctggggttgctaaatgtgtagagatcggcctgcctcagcttatattgctagtatttgtttcacagtatgtgccccatgtgctacattcggggaaacatatcttcgaccgttttgccgtgttatttacaattgtaattgtgtggatatatgctcatctacttactgttggaggggcctataatgatgctccacataaaactcagatatcatgccgcactgatcgtgctggacttattgatgctgctccttggataagaattccatatccctttcaatggggagcaccttcatttgatgcaggtgaagcctttgccatgatgatggcatcttttgtttctcttgtagagtccagtggagctttcattgctgtatataggtatgcaagtgcaacaccattgccaccatctattctcagtcggggtattggttggcagggagttggcattctgttatcaggattatttggaacagtcaatggatcctctgtatctgtagaaaatgcaggtcttttggctttgacacgtgttggaagtagaagggtggtgcaaatctctgccggatttatgattttcttttcaattcttggaaaatttggagcagtttttgcctctatcccacctcccattattgctgccttgtactgcttgttctttgcttatgttggtgctggtggtcttagttttcttcagttctgcaacctcaacagttttagaacaaagttcattttaggcttctcaatcttcataggcttgtctgtgccacagtacttcaacgagtacacagcaattaatggctatggtccagttcacacaggcgcaagatggttcaatgatataatcaacgtcccattccaatcaaaaccatttgttgcgggtgttgtggcatattttctagacaacactttgtttaagagagcagctgatattaggaaggacagaggtaaacattggtgggacaagtacaagtccttcaagggtgacacaagaagtgaggagttctattcacttcctttcaatctaaacaagtactttccctctgtttaattgtgcacaagagctcaatcaaatatataaggtggtctcatcatgttcaccacggtctagttctaatatttaattgaattttcttacacgccatagctctatgaatagtccaccctattatattttatagcattttgtaatacatttattttattgcccttgtttctgtaaatctgatcaagaaagtggattgacgt

SEQ ID NO: 12686 - DNA, 1370 bp, Glycine max
  Clone ID: 701205758_FLI
ctctaggaaagatcacgtataattttgcgctttgctgatttattggagaaacacaatgatgaagttgcagccatagaaacatgggatagtggcaagacttatgaacaggctgcaaatgttgaaatacccatggtagtacgattgttccgatattatgcaggttgggcggataaaattcacggtctaacagttccagctgatggaccataccatgtccaaactttgcatgaaccaattggtgtagcagggcagattgttccttggaatttcccacttcttattttttcatggaaggttgcacctgcattagcttgtggtaatacagttgtaatgaaaactgcagagcagacacccctttcagccctttatgtgtcaaagctatttcttgaggcaggacttcctcctggagttctgaatgttatctctggctttggtcctactgctggtgcagcactgtgtagtcatatggacgttgacaagcttgctttcacaggatccactagcactggtaaacgtgtacttgaactgtctgcacacagcaacctgaagccagtaactctggagctgggtggaaaatctccattcattgtgtgcaaggatgctgatgttgatgcagccgttgaggcttcacattttgctttattttttaatcaggggcaatgttgctgtgctggttctcgcacatttgtccatgaaagcatatatggtgaatttgttgaaaaggctaaagcccgtgctcttaaacgagtagttggagaccctttcaaaaatggggttgagcaaggtcctcagattgattctgtgcaattcgagaagatcatgaaatacataagatcaggcgttgaaagtggtgctcaactggaatctggtggtcaaagaattggctccaaaggctactacatccaacccactgttttctcaaatgttcaggacaacatgttgatagcaaaagatgagatatttggtccagtacaatctatcttgaaattcaaggatctagaggaagtgataagaagagccaatgcaacttcctatggcctggctgctggagtttttactaaaaatatggacactgccaacaccttgatgcgagcattgcaagctggaacggtatggatcaactgctatgatgtctttgatgcagcaataccttttggtggatataagatgagtggtcaagggagagtaaggggaatctacagccttagaagctaccttcaagttaaagctgttgtcactgctttgaagaatcccgcatggctgtagttttcccactacctgagtgttcatgttcataatgtcttatctagaaaaaaaactacatctttcatggaacattcctaaggcattgaattagccaaagttattac

SEQ ID NO: 12687 - DNA, 1603 bp, Glycine max
  Clone ID: 701205807_FLI
caagaacggctctgatagctctttggtgcagcaagcggcgtaggaatatcaaagacaaagccattcgtgcctcatacctcatttcatcacacccattcatctccatcacaacacaacatacatacgaaccagttttgtgattgaagctgcgatggaggaggagacctccgatgcaatgaaccttgatttgaatctgggcccaggcccagagcccgaaactgggcccatgagcaatgaagctgtgaacttggacgattggataggggagcctcttcagagaattagcgaagctgtgaggagggcacggcaaaggtggagatggcgccaccttccgctaccgcatcctgaatttcatgctcactttccaactgaagctacccggcattttcaaataccacctgaggctcgtaatatctccgtggaattgaaccactttttggtcaattctggcaatggaagcgccttgcaggccggcgaagggagcgtggcggccgaggagagaatggaggaggtgccaaaggcgtgtgacaatgtcaatggtgtggcagaggatgagacttcacagaagaaggaggatgtagaaaagggtagtggcaatgatggggacttttttgattgtaacatctgtttggacctggctagggatcctgttgtaacttgttgtggtcatttgttttgttggccatgtttgtataggtggttgcatctgcattcggatgcgaaggaatgtccagtttgtaagggagaggtgacacttaaaagtgttaccccagtatatggccgtgggaacaatgtccgtggtcctgaggaggattctgctcttaagatccctcccaggccccaagcaaagagggttgagagtctgagacaaaccattcagagaaatgcatttgcactccctgttgaagagatgattcggcgtcttggaagcaggattgatcttacacgtgatttggttcagccgcctgaaccggatgctgcccgtgaaacggctgagagaactacttccttgctaagtaggttcttgactgcgcgagggatgcgtagagagcatcagaatctagtggcaccccccgaggatgtaatgggtttggcacagaacaatgttaatacttctgaggcaggggatccccggagtagggtgcagtcccatttgcttcgaagaacacaatcacatagagcaacactttctactctttcatcagcactaacttctgccgaaaggttagttgaggcatatttccgtagcaatccattaggtaggaaccaagaacaacctcctcctccagttgatgacagagattctttttcaagcattggtgctgttataaattcagagagtcagctggacactgctgtagagattgattccatggtatccttgtcaacatcctcgtctaggaggaggaatgatgcttcaagagtgtctgatgtggatagtggagattctcgtgctcctaggcgtagacgtttgaactgataaaagtcttttagatgttcaagttttactattctatcatgtatcgcatatgataataattttccaacacctatgtaagtgcttcttgctttcttgttaccttatatttatgaagttttcagc

SEQ ID NO: 12688 - DNA, 1185 bp, Glycine max
  Clone ID: 701205845_FLI
gatggatgctggacagatgccttttggttctgggattgatcttcgtgataatccggtgggagattttctgtcgtctagggatgagccccagatgatttctggttcatcactttttgggaatggtcacaagagagacaaccttggcctggataatcatcattctctgaatggcagtaacaagcggctgagaggtgatagtccgtggaactccaagccaatggactttgaagcatgcatcgaacagatggagcattggatggggaaagctagaatgatgtatgcaacaaaagatcaggcttgcgaagaatctacaatgaatcagcaactcttgattaatgagctccagaaacgagataacatgattgagcatttgcataaggcaaagttagaagagactcagaaaagacagattgaggtatataggtttgagaaggaactttatatgatgcaaagccttgttgatggctacagaaaagccttgaaagaaacacggaaggcttttgctgactatagagcaagttgtcctcaaggtgatgatgaaccactttacaaggatcttcctgggtctgggggccttgttttgactgcggtggaggtggaaagggaacagctgaagaaggaagctgaagaaagggcaaagatgagagattttatgatagattttgaaaagaagactacagattttgaatccacttggtttggtaaatttgaagctcatatgagtacagttgaatccctaagtcagaggttgctggttttggaggaccaagtaaaacatttgaatgaagtgagtgctactcgcaaggtttctgatcccattgaatctgatcccgttgaattcaaggtttctgatcctattgagtccgatcccattgaaagtaaggtttctgatcccattgaatgcaacgtttctgatcccattgaatgtaaggtttctgatcctattgaatgtgctccaacacctgaaggagaaactgcttagtaaggtttagctttttcagtagctcagtagcacttgattaaaatctgttcacaccaagttcaaagctgcaggttgtttatatttataaattataatgtacagagctttatcttgaaaccgagacctttaactagggtaattcttaccttgaattgtctgagatcaagtcacaaattatggaaacttattttctgtgtttcacc

SEQ ID NO: 12689 - DNA, 2911 bp, Glycine max
  Clone ID: 701205910_FLI
ctctgctactctcctatctggcgcattaaatgttccaatgctttttactggccactcacttggccgagacaagttggaacaacttttaaagcaaggtcgactatcaaaggatgaaatcaacacaacttacaagattatgcgcaggattgaagctgaggaattggcccttgatggttctgaaatagtcatcacaagcactaaacaggaaatagaagaacaatggcgcttgtatgatggttttgatcctgtattggagcgtaaactacgagcaaggatcaggcgtaatgtgagctgctatgggagattcatgcctcgcatggcgacaattcctcctggtatggagttccatcatattgttccacacgatggcgatatagaaggtgaaccagaaggaaatttggatcatcctgccccccaagatccacctatttggtctgagataatgcgcttctttaccaaccctcgcaagcctatgatacttgctcttgctaggccggaccctaaaaagaacatcacaactttggtaaaagcatttggagaatgtcgtcctcttcgagagcttgccaaccttacattaattatgggcaacagagatggaattgatgagatgtcaagcacaaatgcttccgttcttctctcggtacttaagctgattgacaagtatgatctgtatgggcaagtggcctatcctaaacatcacaaacaatatgatgttcctgacatatatcgcctagcagcaaagacaaagggtgttttcattaatccagctttcattgagccatttggtcttaccttaattgaggcagctgctcatggtttgccaattgttgctactaaaaatggaggtcctgttgatattcatagggtacttgacaatggtctgctcatagatccccatgatcagcagtctattgctgatgctcttttgaagcttgttagcaacaagcaactttgggcaaaatgtagacagaatgggttaaagaatattcatttattttcatggcccgagcactgtaagacttacctttctaaaatagccacttgtaaaccaaggcatccacaatggcagcgaagtgaggatggaggtgaaagttcagaatcagattcaccaggtgattccttgagagatttacaggacttgtctctaaatctgaagttttcattagatggagagaagagtgagggtagtggaaatgacaattctttgaattctgatggaaatgctgctgatagaggggcaaaactagagaatgctgttttgtcatggtcaaagggcatctctaaggacatacgcaagggtggggctatcgaaaaaacagatcaaaatccaaacgctggtaaatttcctccattaaggagaagaaaacatctatttgtcattgctgtggattgtgataccacttcaggccttcttgaaactattaaagccatctttgagtctgctggaaaggataaggctgagggcactgtaggtttcatattgtcaacatcattaacaatatcagagatacagtcctttctaatctcaggtggcttgagtcccattgattttgatgcttatatttgcaatagtggcagtgatctatactatccatccctcaatcctggagagcgcccatttgtggttgacttgtattaccactcacacattgaataccgttggggtggagaagggttgaggaagactttagtgcgatgggctgattcaaccactgataagaagggtgataatgacgaacaaattgtgagtcctgctgaacagctttctaccgactattgttatgctttcaaagtgcgaaagccaggaatggctccccctgtgaaggagcttcggaagttattaaggatccaagctctacgttgccatcctatatattgtcaaaatgggacaagactgaatgtaattcctgtgctggcatctcgttcccaagctctcagatacctgtatgttcgatggggttttgaactgtcaaagatggtggtgttcgtcggagaatgtggtgacacagattacgaaggacttcttggtggtctacacagaagtgtcatactgaagggagtgggaagcagtgcaatcagtcaactccataataacagaagctaccctctttcagatgtcatgccattagacagccccaacatcatcgaagcaactgaggggactaggggtgctgatatccaggctttgatcgaaaaagtgggatatctcactggatgatagaaattgaaaatcattttagtaatatgcctcttcgtgtttgcctgctatgaaaccctacttctgagcaagcatataatctgaaatttatccacaatgttcgtaaagcttttttcctcctctctcctctgtaacttctatatcattctcttcgtcacaaacttccacatgaaacatatttcctctggtttccccccttatctccttgttggttctgtatcttacatattacatttttaataaaggccacttctcatttcccgtgccttgtttcttttgtcgattttataccggcttatctcgtgactggagatcacaatctcgctggatggcgaatatccaattcctcttgtactcaacatcctctttcttcttttccttttcctcgttatgctatagtaggagcgtacacaaatatataaaaaagagattacgaagaaaaaaaatcaatattcaagaaccaagaatataggagattcaattcaggtcagtaaagacattgtgcagagcttttgtgaatcataaagaaaccaccagatggtttcttctcgaatagggcattaggctttgagtgtcaagtacatcgttgttttgtcttgtggcacacttgattagtggcccgtgatatttcatttaatgcgagaaatcttgttatagttttatttatctcttagctccattcatttgcaattc

SEQ ID NO: 12690 - DNA, 1290 bp, Glycine max
  Clone ID: 701205937_FLI
gcttaaggcttttctttacactgtccaaattgtgaattatttcaagaattccttccacaccttcaaagttagaagccatggaaacttctcatcctctttctattgaaagcttctcttatagttggttagtgaacctgaagccatcactagaaagcctagatggctccctcagaacttcccttgatgcttctgatgaaacttcttccttcattgaaatggatccaagaatgacaccttctaaaagattcttcagaaactcccaagatttcaaatttgacttcccaatctcgcagtcccctcgcactcttgttgatgctgatgagctcttctccaatggctacctcatgcccctttttgttgaatcattgaagatggaagcatttgaggcctctgatgtcattccaagcctaccttcctcttcacatgtgccaaagagtgtggttcctaatagtcattctagatgcccttcgttgaaaaggtgcaaaacattatcaaggagaatatttctcaagtatctcaacttcttaaggcccttgtatagaagattgaggggtggcaaatcaggctcaaaacctgaatctgttgttaagagaaccgtgtcagcaaagaataggggatactattctgaaacttccccacggattagtgtagcttattctgctgatgactggcgcaagtcctgtgattctgaaagctcaatttatgaagcagttctccattgcaaaagatccattggtatgttcaaattcattgtgtatatcaattaagcatatgttgtgttcaaggttttaaattgcagtcacggtcacaatttcatcgtgatcttggatattgctggcaattatggctgcaattgcgatcgcaagagtccgaaaactttgacatagagaacgaaattgtggtcacagaacattttttaaaaccttgatgttgtgttcccttgatgacattttgtacattttgtgtggaactaacttggacatttgacacttcgtgtattgcagaaagaatgaattaaggatgctgcaaaagggttgcgtttggagatcaaaaatgcaagagaaaagagaagataaagtgaaaagagagagatgatcaaggctaaaccaccaagagcaactcctctgctccattatcctctgcttgaatgataaaggaattataataggaaataaagatgtggttggtcaggcatattcaatctttatgatcaaattctgaagagaaaaaaaatatgtagtacaattttgtttgatcatctaatttaatatgggaaggaacacttttact

SEQ ID NO: 12691 - DNA, 973 bp, Glycine max
  Clone ID: 701206149_FLI
aacggaatcccacttaaaagtcgttctccttcctcttcgcagctgttatatagtactattttcatttcatatgtttatgcacctctatatatacatagacacatgtaaatggttgcaaaggaagataagataggtaccagctatcacatagtttatttaatccgttatatgccacctgatatataggcatattagctagttaggtaggtatagtagtttaagttaattcaaccatggaagacagggatcactgttgttccaacaattcaacgatgatcacaacaacaaagaaaagaacgggtagaagaagtccaacatcggataagctcaagaatcaacaccgcgagaagcagtcgatgaaaccttaccgtggaataaggatgcggaagtgggggaagtgggtggcggagatcagagaacccaacaaaaggtcgaggatatggttgggttcttacacgacacccgtggccgccgcacgtgcctacgacaccgctgtcttttacctccggggtcccaccgcgcgccttaacttccccgaactcttgttccaggacgacgaccaggagggcagtgattcggtgcagcacggcgcagcagggaacatgtccgctgattccattcgccgaaaagccacgcaagtcggcgccagagtcgacgctctccaaaccgcgcttcaccaccacgcgccaagtaccaactctctcaatctcaagcccgacttgaacgagtttccaaaactcgaagagcttcaagattgatataaatcaaatatcaatatcaatcaatatatttaatttcctaagttctttattaatatatagttttatgtgtgtatatatagatgatgatgcctcggagttggggcttgaaactaattaaccccttcccttccccttaatttagatatatcccttttcttgtttttccgtatcttcaatcataatatcaaatcaaagaagtattattattttct

SEQ ID NO: 12692 - DNA, 735 bp, Glycine max
  Clone ID: 701206157_FLI
ccgatgcggagcatgtaactgtggtcaataagaatgagaagaagagggccttctcgcaaattgatgatgaaaatagctcctccggcggcgaccggaaaatcaagaccaataagagtcaagtggtggggtggcctccggtgtgctcttaccggaagaagaacagcatgaacgaaggttcaaagatgtacgtgaaggttagcatggacggtgctcctttcttgcgcaaaattgatttgggtctccataaggggtactcagatttagccttggctttggacaagctctttggttcctatggaatggtggaggccttgaagaatgcggacaattctgaacacgttcccatttatgaggacaaagatggtgactggatgcttgttggagatgtcccttgggaaatgtttatggagtcatgcaagaggctgaggattatgaagaggtcagatgccaagggcttcggtttgcaaccaaaaggatctctgaagggattcatagaaagcgcggcaaagtgaaacattatgttaggcttctaattaatgtcgtgcacattttgacgatcatcaatccaagtttatgttgtcgttttattatatttgagaaatcatgcatttttagtttgatatatgaatcatacttttgtttatgtcaagtattaatgaatgacatataggaccctatataactaatagggaaaactcattgttttagattaattaatgctttgccatgcttgtt

SEQ ID NO: 12693 - DNA, 714 bp, Glycine max
  Clone ID: 701206209_FLI
aaaacatgaggaatatggcttccttaagctcctcattagtgctgctccttgcagctctaattctatcccctcaagttcttgctgactatgagaagccccaatttacaagccacctgtttacacaccgccagtttataagcccccagttgaaaaaccaccagtgtacaaacctccagtttacaagcctccagttgaaaaaccacctgtttataagcctccagtttataagccacccatttacaagcctccagtgtataaacctccagttgaaaaaccaccggtttacaagcctcctatagagaagccaccagtgtacaagccaccagtgtacaaaccaccagtgtacaaaccaccggtgtacaagccccctgttaagaaacctcctatttacaaaccaccttacccaaagtaccctccaggctccaactgaagacacccacctgattttgaattaagttaagggatgtattaagtatatgctaaataagaggtgtatctacaaccattgactttgtcatgctcaaaaatttagtttaatttacaaattatggcaagggttacacctggctagcttccgcgtttagatcatttgtttatagtgctatggccacgacaagagtgttatgggtgcatgaatgtaaaacgaaaaaaaaaaaaaattgtgtttattttgtacttcaagttatgaataaaagaatttccctgtttgtttgt

SEQ ID NO: 12694 - DNA, 852 bp, Glycine max
  Clone ID: 701206635_FLI
ataggatgggaaggtccccttgctgtgagaaagcacacacaaacaaaggtgcatggaccaaagaagaagatcatcgcctcatttcttacattagagctcacggtgaaggctgctggcgctctctccccaaagccgccggccttctccgttgcggcaagagctgtcgtctccgctggatcaactatctccgccctgacctcaagcgcggcaatttctccctcgaagaagaccaactcatcatcaaactccacagcctccttggcaacaagtggtctctaattgctggtagattgcccggtagaactgacaatgagatcaagaattactggaatactcacatacgcaggaagcttctgagcagaggtattgaccctgccactcacaggcctctcaacgattcttctcatcaagaacctgctgctgtctctgcccctcctaaacatcaagagtcctttcaccatgaacgctgccctgacttgaaccttgagctaaccattagtcctccccatcatcctcaacctgatcatccgcacttgaagacccttgtgacaaactcaaacctttgctttccctgcagtctgggtttgcataatagcaaagattgtagctgtgccctccacactagtactgccaacgctactgctactggctatgatttcttggccttgaaaaccaccgtcgttttggattacagaaccttgcacatgaaatgaaatcatattactgaaatctctctctttctttctttctttcttttcttctctaatataatttcttacttacttacttacttacttacttacttgttaatggttgcaaatgataaaaaagttccagccagtacagttgaac

SEQ ID NO: 12695 - DNA, 939 bp, Glycine max
  Clone ID: 701206644_FLI
caaaaataatattccttagcaactcattgacatttatgatggtaagtcacatttttatatatttgtatttttcactcctcgttaggtctaactcaacatcaaaagctagctcatgatgtgagaattgtcttccaattatatattctatcttgatcatatttctaaccgacgtgagacttgagtttttcctaatacacctcctcaagtacaacacttttggacttggtgtgtgaatgatatggtggatgactcatttaatgaatcaagataggttttaataccatcttatgatgtgtttgagcttaactcaacttcaaaaactagcttatgaagtgagggttgtcccccacttatatattttattttggccttaattttaatcgatgtgagatttggattttttccaataattcacgaacattaaagcttaatttttcatttttcaggtttacgtgtggagcaaacaaaatcccttcattcacatgagcttcctgggtctctttactttcactgctgcctaccttccatgggttctcttggggttctctgtactcgttggtgctagtgcttgggtggatctactggggatgattgctggtcatgcatattattttcttgaagatgtttatcctcggatgacgggtcgtaggccgctaaaaacaccatcattcatcaaagcactatttgcagatgacccagttgttgtggcacggcctgctaatgtcagatttgctcccccacctgctgaagaacttcaccaagattgaatgaatggcaatcaaaatgtttagaggattagcaacagaacagcaaagcggttgaccgtgtaatatatagattttaaacatcttttttcgcgtgcatttgttaattattaggatttaaggggcaactatgtcgaatgttcagagttttaactgaatgagatcctcttttctc

SEQ ID NO: 12696 - DNA, 443 bp, Glycine max
  Clone ID: 701206689_FLI
attcggctcggttctttcatggttttcttctcatccaccatgtcagccttgcaatacctattattgggcatggatcacatagagactgccctcatcttggccctaatatgttttgttgcatcacttattgggttattagtggtgcagagagcaattcaaagctatggaagaccatccttaatagtattttcggttagcatagtgatgactttaagtattgttctaatgactagcttcggagtcattcgaacttggaaagactatacatcaggtagatacatgggattcaaactaccctgctgaaaaacaattttgctgaattattatctgatagtattctagtcctttatctcgctaaattcgcgtgtcaacatcagagtatagttatcaatggagtaaaatttttggaccttttggatttcatgcaaaacttgttactaagg

SEQ ID NO: 12697 - DNA, 869 bp, Glycine max
  Clone ID: 701206950_FLI
attatttttatgccctttgaggaccattaaagtgattgtacagtttatcttaagttaattatttatttctctaatgtatataatttccagatcaactattgaagcttttgcatctgtagtagcccccctggcagaaaacttaatgcaaattctagctcagaaactgaacatcaaattcaactatttccaagagaattgttcagcaaacactagctttcttcggctgaacagatatccaccatgtccaatattctattcaagggtgtttggcctcttatctcacactgactctagtttcctcactatagtgaaccaagaccagattgggggtttgcaaataatgaaagatggaaattgggttggtgtcaaacctaacccccaagctctggttgttaatattggtgatttattccaggcactaagcaatgacatttacataagtgctaagcaccgggtggtggcagctgagaaggtagagaggttctctgtggcatatttctataacccttccaaagatgcattgatagagagccacatcatgccaccaatgtacaggaagtttacttttggagagtacagagggcagatagagaaagatgttaaggaaacaggtgataaagtggggctctctaggtttctcttgtagaaacatagcaactatgacacccccaaaaaaaaaatattgagcaaaagtattaattattataattcaaacgttgctgtgtgagtcagtcacatctccggaatcaggaccacatagcagcctagaaagttgtccactcccgatcacaattcgacagaataagttgatgtttcttcccaggtttaataatcacattttgagtttataattctgtactttttgttcc

SEQ ID NO: 12698 - DNA, 1028 bp, Arabidopsis thaliana
  Clone ID: ARABL1-06-F3_FLI
atttctttttttcttccagaaatttcctccgatttcaaaattttccggtgaaatcgaaaaaaaaagcgagatcttcttctctaatggcgacgaccttaagcagagatcaatatgtctacatggcgaagctcgccgagcaagccgagcgttacgaagagatggttcaattcatggaacagctcgtaagtggagctacaccggccggtgagctgaccgtagaagagaggaatcttctctcggtcgcgtataagaacgtgattggatctcttcgtgcggcatggagaatcgtgtcttcgattgagcaaaaggaagagagcaggaagaacgaagaacacgtgtcgcttgttaaggattacagatctaaagttgagactgagctttcttcgatctgttctgggattctcaggttacttgattcgcatctaattccttcagctactgccagtgagtctaaggttttttacctgaagatgaaaggagattatcatcgttatttggctgagtttaaatctggtgatgagaggaaaactgctgctgaagatactatgatcgcttacaaagctgctcaggacgttgcagttgctgatctagcacctacacatccgatcaggcttggtttggctcttaacttctcagtgttttactacgagattctcaactcttcagagaaagcttgtagcatggcgaaacaggcttttgaagaagccattgctgagctggacacattgggagaggagtcatacaaggacagtactctcatcatgcagttgctaagggacaatctaaccctttggacctccgatatgcaggagcagatggatgaggcctgaaggtctaatggaagaaaagacggttatgtaatgtacctgcaaccgtaaccgaaaatctgagttcaacctcctttgctgtaaaacttgtcgaaaagaaaagtttgtttttttatgacagattatgtgcacagctttggtgttatctgctgctctgtatcaactctgtttttgtttggtaatttatcctcatctttgctt

SEQ ID NO: 12699 - DNA, 1288 bp, Lycopersicon esculentum
  Clone ID: CC-ESFLCLEL10D05_FLI
gcgccggagagcagattcaccggcgaatcaagttccccgttgctgttaaaggaatctattaaggaaagagaggaacggagatcaattatggttttctccatggtgatgagcttttcacctagtttatgtcttccaaggagccgcatggttatgcagaaagcaatccaatgctcttcttctgtttcgacagcatctgagtccgtcaagtttgatcttaagacttattggacaactctaattagtgatatcaaccagaaacttgatgaggcagttccagtcaagtacccaaatcagatttatgaggccatgcgctactctgtcctggccaagggtgccaaaaggtccccacccatcatgtgtgtcgcagcttgtgagcttttcggaggaaatcgccttgctgcctttcccactgcctgtgccttagagatggttcatgctgcttcattgattcatgatgatttgccctgcatggatgatgacacaactcgacgaggtctacctgcaaatcacacagtttttggtgtagatatggcaattttagccggggatgccttgttccctcttggtttccagcatattgtgtcccacactccaagtgatctcgttcccgaggatcgagtcctccgggttattacagagattgctcgagctgtggggtccactggcatggctgctggtcagttccttgaccttgagggtggaccaaatgctgttgattttgttcaagaaaagaaatatggtgaaatgggtgagtgctctgccgtttgtggagctctcttggctggtgcttcagatgaggagatccaacacatgagaaaatacggtcgagctgttggtgtcttatatcgtgttgttgacgatatattggaagcaaagaagacggagaacaaaactgaggggaagaaaaagaaaggcaaaagctatgtcagcgtttatggcattgagaaggctgtgaaagttgctgaggatctaagagcgcaggctaagagagagttagatggtctcgagaaatacggcgataaagtcatgccactttacagttttcttgattatgctgcagatagaggttttagcattgatggccaagtctagatcatgtttagcattgctgtcttgtgttttatcatgattcttgacctaaactttgttgtatggatatatccttagctaaatacagtcgaacccctctataacaccacgttcgtctggatatattttggatgctgagagaacatgttatatagcttaatatgaaagccggtccaaagaaaacttggccgttattgtg

SEQ ID NO: 12700 - DNA, 929 bp, Zea mays
  Clone ID: CC-ZMLE189104B01_FLI
ggcggcgcgggcggacaaggagcaggcggaggaggagttgtgccaagccacaatgggtatctcgcgtgactcgatgcacaagcgccgagccaccggtggaaagcagaaggcctggaggaagaagcgaaagtatgagcttggtcgccagccagccaacaccaagttgtcaagcaataagacagtgaggagggtccgtgttcgtggaggtaatgtgaaatggagggctcttcgccttgatactggtaactactcatggggaagtgaagctgttacccgcaagacccgtatcctcgacgtggtctacaatgcatcaaacaatgagcttgtgaggacacaaacccttgtgaagagtgccattgtgcaagttgatgctgccccattcaagcagtggtacctcactcactatggagttgacattggtaggaagaagaaaacccctgctgcaaagaaggataatgctgagggacaagaggttgaggcagcagctgaggaaacgaaaaagagcaaccatgtcacgaggaagcttgagaagcgcaaggagggacgtacccttgacgcacacattgaggagcaatttggcagtggacggttgctggcatgcatttcttcccgccctggacagtgtggccgagctgatgggtacatccttgagggtaaagagcttgagttctacatgaagaagctacagaggaagaagggcaagagcgctgtagcttagagcattctcatggattgtcttgcaccgaaatgtgtgtcctgatgagtacactttttttggttagtcgtctcaagttcagagcgttatgccatgttttcagtcctgattagtacactgttttctaaaagcgattgagctctagtccaatgtattgataatttctgctgttgtcctattgcggtgatgtttatttgccctgttcgctagctgc

SEQ ID NO: 12701 - DNA, 1096 bp, Zea mays
  Clone ID: CC-ZMLE189105F11_FLI
cacgatcgcgagcgcacgcacgtaagcacgttgtcggaagctcaagttagaagaagcaccagtgactgatcgatggcggcccaggctctcctctccggccggcagctgctgggccgccccgtgcagtcggccgtctctaggtcgtcggcgaggaaggcgcccttcgtcgtcagggccagctccagccctccagccaagcaaggtgccgacaggcagctgtggttcgcgtccaagcagtccctctcctacctcgatggcacgctgcccggcgactatggcttcgacccgctgggcctctcggacccggagggcaccgggggcttcatcgagcccaagtggctggcctacggcgaggtgatcaacggccgctacgccatgctaggcgcggtgggcgccatcgccccggagatcttcggcaagatgggcatcatccccccggagaccgcgctgccgtggttcaagacgggcgtcatcccgcccgcgggcacctacaactactgggccgactcctacacgctcttcgtcttcaacatggcgctcatgggcttcgccgagcaccgccgcctccaggactggtacaacccgggctccatgggcaagcagtacttcctcggcctcgagaagttcctcgccggctccggcgacccgtcctaccccggcgggcccctcttcaacccgctcggcttcggcaagaccgagaaggagatgaatgagctcaagctcaaggagatcaagaacggcaggctcgccatgctcgccatcctcggttacttcatccaggggctcgtcaccggcgttggcccgttccagaacctgctcgaccacctcgccgaccccgtcaacaacaacgtgctcaccagcctcaagttccactagaacgttggtgcatcagcatacctgctgccgccgccgccagttgtttgctgtggaaagctagatgcatgcgtgttgtaaaggaacctgaagcgttgcatcggtcatgattcatgcatggccagcctgctgcctgtaacaacaaactagtattgatcttattgagaccggaaactgtattgcacatggtaaatcaatgtacaattcctccctagatgcggac

SEQ ID NO: 12702 - DNA, 2079 bp, Zea mays
  Clone ID: CC-ZMPO148045E09_FLI
gttcccggttaccccttcggcctccacctatcaccacccgggacgtcttccatggcctcctcgtagtagaatagttctatctcaccgcaacaactcctcattacatcctttatgagaggctgatcgattggtagatacgtactcgggtggagcagagcaacgagagacatggcgacgacgacgcgtgttgccgccgccgccaccggcgtgctgctggtcctgtcggcgttggcgaccctggcgcgggccgaggacccgtacctgttcttcgagtggaaggtgacgtacgggaccaagtccctgctgggcgtgccccagaaggtcatcctcatcaacggcgagttccccggccccaggatcaactgctcctccaacaacaacatcgtcgtcaacgtcttcaaccagctcgaccatccgctccttttcacctggaacgggatgcagcacaggaagaactcgtggatggacgggatgccaggcacgcagtgtccgatcctgcctaacaccaacttcacgtacaagtggcagcccaaggaccagatcggcagcttcttctacttcccgtccatcggcatgcagcgggcggcgggcggctacggggccatcagcgtggtcagccgcctcctcatcccggtcccgttcgaccagcccccgccggagaacgaccacgtggtgctcatcggagactggtacaccaaggaccacgaggtgctagcccgccagatcgacgccggcaagggcgtgggccgccccgcgggcgtgctcatcaacggcaagggcggcaaggacctggaggccgcgcctgccttcaccttcgaggccggcaagacgtaccgcctccgcgtctgcaacaccggtatcaaggcgtcgctcaacttccgcatccagggccactacatgaagctggtcgagctggagggctcccacaccctgcagaacacgtacgactcgctcgacgtccacgtcggccactgcctctccgtgctcgtcgacgccgaccagaagcccggcgactactacatggtggcctccacgcggttcatccacgacgccaagtccgcgtccgccgtcatccgctacgccggctccagcgccccgccggcgccgaacatgaccgagccaccggccggctgggcctggtccatcaaccaggccaggtcgttccgctggaacctgacggccagcgccgcgcggcccaacccgcagggctcctaccactacggccagatcaacatcacccgcaccatcaaggtcatggtctcccgcggccacatcgacggcaagctccgctacggcttcaacggcatctcccacagggaccccgagacccccgtgaagctcgctgaatacttcaacgtcaccgacggggtgttcagctacaaccagatgggcgacgtgccccccgccgtgaacggtcccctccatgtcatccccaatgtcatcaccgccgagttccgcaccttcatcgagatcgtcttcgagaaccccgagaagagcatagactccctccacgtcgatggctacgccttcttcggcgtcgggatgggccccgggaagtggtcgccggaggtgaggaagacgtacaacctgctggacacggtgagccggcacacgatccaggtgtacccgcggtcatggacggcaatcatgctgacgttcgacaacgcgggcatgtggagcgtgcattccaacatctgggagcggtactacctcggggagcagttctacatcagcgtcgtctcgccggcgcgatcactgcgcgacgagtacaacatgcccgacaacgccctccgctgcggcaaggtcgtggggctgccgctgccgccgtcctacgcccccgcgcgctaagacgacgaaggcctcgttttctcctcgtggtctgaccatccaatccaaactcaaaagaacaaatacgaaagaagcgtagtgaaggggaacaaatgaatggatatatgtaatcttgagatgcatgccctctcaaatcactgtactggggttctcaaaaaaatcattgtaatgggagttatatatataactttatctcaccatttatttacaccaacaagtcattgggtatgc

SEQ ID NO: 12703 - DNA, 1883 bp, Zea mays
  Clone ID: CC-ZMPO148046A03_FLI
cccaagatggcaaatgctctcctaggtggcctgtgggcgatcgtcgtcgtcgcggtggtcgtcggcgtggtcgccaccgtcacccactccggcaagaaggccggcgacgacttcaccgtcccgggggaagcctccattgccacgtccggcaagtcggtcgagtccctgtgcgcgcccacgttgtacaaggagtcgtgtgagaagacgctctcccaggccaccaatggcaccgagaaccccaaggaggtgttccacagcgttgccaaggtggcgctggagtcggtgaaaacagcggtcgagcagtccaagacgatcggcgaggctaatgccagcgactccatgaccgagagcgcgcgggaggactgcaagaagctcctcgaggacgccgttgacgacctcaggggcatgctcgagatggccggcggcgacatcaaggtgcttatcagccggtccgacgacctcgagacatggctcacgggcgtcatgacgttcatggacacctgcatcgacggcttcgtcgacgagaagctcaaggccgacatgcacaccgtgctgcgcaacgccaccgagctcagcagcaacgcgctcgccatcaccaacagcctcggcgggatcctgaagaagctggacctcggcatgttcaagaaggactcgcgtcgccggctcctgtcggagcaggacgaaaaaggctggccagtgtggatgaggtcgccggagagaaagctcctggcggcgggcaaccagcctaaagcgaacgcggtggtggccaaggacggcagcggccagttcaagaccatccagcaggccgtggacgccatgcccaagggccagcaggggaggtacgtcatctacgtgaaggccggcctctacgacgagatcgtcatggtccccaaggacaaggtcaacatcttcatgtacggcgacgggcccaagcaaagccgcgtgaccggccgcaagagcttcgctgacggcatcaccaccatgaagaccgccacattctccgtcgaggcgtccgggttcatctgcaagaacatgggcttccacaacacggccggcgcggagaggcaccaggcggtggcgctccgcgttcagggagacctcgcggcgttctacaactgccggttcgacgcgttccaggacacgttgtacgtgcacgcccggcgccagttcttccgcaactgcgtcatctccggcaccattgacttcatcttcggcaactcggcggcggtgttccagaactgcctcatcgtcacgcggcggcccatggacaaccagcagaactcggtgaccgcgcacggccgcacggaccccaacatgaagtcggggcttgtcatccagaactgccgcctggtgcccgaccagaagctcttccccgaccgcttcaagatcccctcgtacctgggccgaccctggaaggagttctcgcgcctcgtcatcatggagagcaccatcgccgacttcatcaagcccgagggctacatgccctggaacggcgacttcggcatcaagacgctctactacgccgagtacaacaaccgcggccccggcgccggtaccagcaagagggtcacctggcctgggttccacgtcatcggccggaaggacgccgagcagttcaccgccgggccgttcatcgacggcgcgttgtggctcaagttcaccggcacgccgcacatcctcgggttcaagttctaaagaccgcacgcatggcatgttatatacagcacacgatagggaggtggcacatacatgtttgtacctgaggtgtcgcaggacaggagggctaacgtttgtacctttaccactttttcttttctttttgattcatttggttgtttctcttggtgaaaattttcaggaaacgagaaatattttggacagtg

SEQ ID NO: 12704 - DNA, 1602 bp, Zea mays
  Clone ID: CC-ZMPO148065C01_FLI
gcgcctatctccgcgactcaaagcttcttccatttcctaccgccgccgctgcagctccaccccattccgtcgacaccatgagggagtgcatctcgatccacatcggccaagccggtatccaggtcggaaacgcgtgctgggagctctactgcctcgagcatggcattcaggctgatggtcagatgcccggtgacaagaccattgggggtggtgatgatgctttcaacaccttcttcagtgagactggtgctgggaagcacgtccctcgtgctgtttttgttgaccttgaaccaactgtcatcgatgaggtgaggactggcacctaccgccagctcttccaccctgagcagcttatcagtggcaaggaggatgcagccaacaacttcgcccgtggtcactacaccattggcaaggagattgttgacctgtgccttgatcgcatcaggaagcttgccgacaactgcactggtctccagggcttcctcgtcttcaacgctgttggtggaggaacaggctctggccttggttccctcctcctggagcgtctgtctgttgactacggcaagaagtccaagcttggtttcactgtgtacccatccccccaagtttcgacctcagtggttgagccatacaacagcgtcctgtccacccactccctcctcgagcacactgatgtggctatcctgctggacaacgaggccatctatgacatctgccgccgttcccttgacattgagcgcccaacctacaccaacctcaacaggcttgtgtcccaggtcatatcatccctgactgcctccttgaggttcgatggtgctcttaacgtggatgtgaatgagttccagaccaacttggtgccctacccgaggatccacttcatgctttcctcctatgctccagtcatctctgctgagaaggcctaccacgagcagctgtctgtggccgagatcaccaacagcgccttcgagccatcctccatgatggccaagtgcgatccccgccatggtaagtacatggcctgctgcctcatgtaccgtggtgatgtggtccccaaggatgtgaatgctgctgtggccaccatcaagaccaagcgcaccatccagtttgtggactggtgcccaactggctttaagtgcggcattaactaccagcctccaagtgtggtgcctggtggtgacctggccaaggtgcagcgcgctgtgtgcatgatctccaactccaccagtgttgtggaggtgttctcccgcatcgaccacaagttcgacctcatgtacgccaagcgtgccttcgtgcactggtatgtcggtgagggtatggaggagggcgagttctctgaggcccgtgaggatctggcagcgctcgagaaggactacgaggaggttggtgctgagtttgatgagggcgaggaaggtgatgatggtgatgagtactagaagtatcctgatgcggtcatcgtcaggcttgtgtgctgctcttgtccccggtgtggtttgcaacacctgatgttgtaagactttctggttatgtccgccccgctttgccactgggttattaagaacgtcgttatggatggttgtctacattattgcttatcgatattgg

SEQ ID NO: 12705 - DNA, 1149 bp, Zea mays
  Clone ID: CC-ZMPO148065D09_FLI
acggcacctggaagttcccaggcatcggcgccttccagtgcaacgacaggtacatgcgtagccgcctgaaggcggcagcggaggcggccggcaagcctgagtggggccacggtgggccgaccgacgctggcggctacaacaactggccggaggacaccgtcttcttccgcggcgacaacggtgggtggagcaccgagtacggcgacttcttcctgtcgtggtactcgcagatgctgctggagcacggcgaccgcatcctgtcgggcgccacgtccgtgttcggcgcggcgcccgtggaggtctccgtgaaggtggccggcatccactggcactacggcagccggtcccacgcccccgagctcaccgcgggctactacaacacgcggcgccacgacgggtacctcaccatcgcgcgcctcctggcgcgccacggcgccgtgctcaacttcacctgcgtggagatgcgggaccacgagcagccgcaggaggcgcggtgcatgccggaggcgctggtccggcaggtgggcgccgcggcgcgcgccgccggggtgggcctcgcgggcgagaacgcgctgccgcggtacgacggcacggcgcacgaccaggtggtcaccacggccgccgagcgcgccgccgaggaccggatggtggccttcacgtacctgcgcatgggccccgacctcttccacccggacaactggcggcgcttcgccgccttcgtgcgccgcatgaacggcgccgggtcgtgccgggaggccgcggagcgggaggcgcacggcgtcgcgcaggccaccgggtcgctggtgcacgaggccgccgtcgcgctgcggagctgaccggccgggacgggacgggacggaacggaagcctacgatcgactgtacatacaggggttgggacttgggagggagctcgggttcttgttgggttttcctttgggtggagagcgagggagcgcagtcgagagccagcgagcagtctctcgtgcagtgcagtgcagtgcagtgcagtgcagctccggcgtagatgagattgtattgtgaccaagccgggagggaaagcagggaggggaggacaaagatgttttgtcacgtttcaggctccggccatcgccggagtttgtccggggaatatatcgatttcctacag

SEQ ID NO: 12706 - DNA, 590 bp, Zea mays
  Clone ID: CC-ZMPO14820005C01_FLI
tatcatgctctggaacgccgtcatattcgggccggatgacacgccgtgggatggaggcacgttcaagctgactctgcaatttacagaagattaccccaacaaacctccaactgttcggtttgtttcgaggatgtttcatccaaacatctatgcggatggaagcatctgtttggacatcctacaaaaccagtggagccctatatatgatgttgcggcaatattgacctctattcagtccctgctgtgtgacccaaacccaaattctcctgctaactctgaagcagccagaatgttcagcgagaacaagcgtgagtacaaccgcaaagttcgtgaggttgtggagcagagctggacagccgactaaaactttatccgcttcgccaggcggtgtaaataaagcatctgtctttcctacttggccggtctgttttaccgttagaaatcctcagctatcgttgtgttcttgtggttcagtcccttgttgtagtgatgcctgcgggttttcctaatgtagtgctgaacggtttcataaactcggatattggtgcatatgtaacagatatagctaagtcaagttgttgcttggtttg

SEQ ID NO: 12707 - DNA, 769 bp, Zea mays
  Clone ID: CC-ZMPO14820005E03_FLI
gtggccaatccttctcctatctcgtcccggagtcccgggggaaattttgccccagaaacactagcgcgtcggatcacaagcaagggcgaaaattttctgtggctccggcggctgaaggacgctgcggcacccatgtcggacgacactggtggccgcgctctacccaagttcggcgagtgggacgtgaacaacccggcgtccgcggacgggttcacggtcatcttcagcaaggccagggacgagaagaaagctcccccgacccaaggccacatcaggaacaacaggtcggtgtcggctgacagcaaggactccagggccgagaagatgacctcctacaacgccaggaccaacgcgtcgaagaaatggttctgctgtgtctcgcccagccccacacaatcttgaggaagctaacgacagagaaatggtccattgcatagctgcggttctgtgaagctctgtcgctggcagaccggccgcgagtgaactctccggatacttgccagtgacagtgtatagccgccgttgcaaatgacagtgtatagcgttcttagccgcctgtgcataccgtcagttcaggttgatgtctgcttgtaatttttcttttctcgcctcttctctacggtgtgtaacccttcctcagcgttaatcctcctgctgcattttgctgtaacttttgggcgagggtggatttgtttcggctctgaccaaacctaaccaggtcacagcgaattctcagattgctgcagtgaccgccaccaacctgacaaac

SEQ ID NO: 12708 - DNA, 777 bp, Zea mays
  Clone ID: CC-ZMPO14820006D12_FLI
gtgggatcgagttgtttcactgcacgagcacatcctccggcgaccaccggcctccctctccgtcctctagcgaccgaccaacgcgtcgagcgaagatgtcgtggcagacgtacgtggacgagcacctgatgtgcgagatcgagggccaccacctcacgtcggcggccatcgtcggccacgacggcgccacctgggctcagagcaccgcattccccgagttcaagcccgaggagatggctgccatcatgaaggatttcgacgagccggggcacctcgccccgaccggcctgatactgggaggcaccaagtacatggtcatccaaggcgaacctggagctgtcatccgtggcaagaagggatccgggggcatcactgtgaagaaaacagggcagtcactcatcattggcatctacgacgagccgatgactcccgggcagtgcaacctggtggtggaaaggctgggcgactacctgctcgaacaggggatgtaatgacaaccccttcccctggaatgcatgttgatgatgttgctggttccaacttcgttttcagtaataataacaacaaagcgaagaccctcctacctaccctatttgcttgagcggctcttgtccgcgccacaagataccaattgttgcgctgggaatattcagttacgatgacccgctttagttcagtttctttttttttgggggttggttcgatcatttggctgtagcgtgaatcgcttggacaacagactccaattactaagcaaatattttttcttctgcatat

SEQ ID NO: 12709 - DNA, 1351 bp, Glycine max
  Clone ID: JC-GMFL02220088F02_FLI
ggaccaaccaataatatatattctcgattataactccttgccaataattagagcgaaggttcccacgacgttaaagacaacaacaggctaatagaggagtccttcctatccaaaagccaaaattcttcgagataaccaaaacaattgaatgaagaaagcacaagaaacatttcatatttctcaacctttgtccaattcagcaactctattcacattgataaaaaaaacaatcaatcctgacgagacaatgccttattatattaagtcccaccaccaccaacaaggtcataacctgaaccagctaactccagcaacaacaacaatagaagaggaagaactaggaattccttttgttgttgttgttgttgttgttgtccttgcccctctcctcttctttgatgggttccgaggtctccaaacaggttgagagacgaaaggcgatccacacagagggaaaaactctgtctgatcttagaaactctggggaagattaccctggctcagattatcatccctcagacagaaaaaaatggatgtctgagctcaaccctgagaaagttgtgataaaacaaattgtttggcctggaacccatgattctgcaaccaacaagattggcatcccatgcatcactcggccttttgctcaatgccaatccttgtccatctaccagcagcttgtgttggggacaagggtgattgacattcgggtgcaggaggatcgtaaagtgtgccacggagtcctcgttacatacagcatcgacgttgtcatcaaagatctcaagaagttcttatcagaaactcagtccgagatcatcatcctcgaggttagaaccttgaggaacaactgggggattacctagttccccaggatgataaggtttttgaaaagacaatcgcagaggtgctaccaaagagagttatatgtgtttggaagccaagaaaatcgccacagcctaaggcagggagtcctctgtggagtgcagggtacttgagggataaatggatcaacactgatttgccatcaaccaagtttgagagcaacatgaagcatttgagtgagcagcaacctgttacgtccagaaaatacttctacagggtggagaataccgttacgcctgtggcggataaccccgttctgtgtgtgaagcctgtcactgagcgcattcatggctttgcaaggctcttcattagtcagtgcttctccaaagggtatgcagatagactgcagattttttctacggatttcattgaccaggatttcgttgatgcatgcgttggactcacacgtgccagggttgagggtagagcctgaaaattgaaattatctctcttatgctcgtaactcttcttg

SEQ ID NO: 12710 - DNA, 2771 bp, Glycine max
  Clone ID: jC-gmfl02220089g07_FLI
aaaagagcgcgtgttttatttccctcaaggacatattgagcaggtggaggcgtcgacgaatcaggtggcggaccagcacatgccggtttacgatctcccacccaagatcctttgtcgggtcatcaacgtgcagctgaaggccgagcccgacacggatgaggtgtttgctcaggtgactttgcttccggagccaaaccaagatgagaatgccgtggagaaagagccaccaccacctccgccaccacggtttcatgttcattctttctgtaagactctgacggcgtccgatacgagtacccatggtgggttttctgtgctgagacgacatgctgatgaatgtcttcctcctctggatatgtcgaagcagccacccacacaggaattggtggctaaggatcttcatgcaaatgaatggcgatttaaacatatctttcgaggtcaaccgcgtagacacttgcttcagagtggttggagtgtttttgtcagctccaaaaggcttgttgctggggatgcatttatatttcttagaggtgaaaatggggaacttcgtgttggtgtccgacgtgcaatgagacagcagggtaatgttccatcctcagttatctcaagccacagcatgcatctcggtgtccttgcaactgcttggcatgccatcttgaccgggaccatcttcactgtttattacaaacctaggaccagtcccgccgaatttattgttccgtatgatcaatatatggagtctttaaaaaatagttatagcatcgggatgcggttcaaaatgaggtttgaaggtgaagaggctccagagcagaggtttactggtaccgttgttggaatagaagattctgatcccaaaaggtggagagattccaaatggagatgcctcaaggtgagatgggatgaaacatccaacacccctcggccagagagagtttccccttggaaaatagagccggctcttgctcccccggctctaaatcctctttcaatgcccaggcctaaaaggcctcggtctaatgcagttccttcatccccagattcttctgttcttactcgagaagcatcatctaaagtaagcatagacccttcaccggcaaatgggtttccaagggtcttgcaaggtcaagaattctcgaccttgagaggcaattttacagaaagtaacgagtttgatactgccgagaagtctgttgtttggccacctactgcagtagatgatgaaaagatggatgtttctacttcaaggaagtatggttcagagagctggatgtcaatggggaggaatgagcctacatattcggatcttctttcaggctttgggaccagtggggatccttctcattcatccctgaaggatcaaatgagccctgcttattctgctagaaagcaatcattggatcatgaaggcaaacttcacatgcctcatccgtggcctgtaatgccctctagtctgtcactgaacatcttggactctaatgcaaaaggtcctacacatggtggtgatacatctttccaagctcgagggaatttgaggttcagtgcatttggtgaataccctgcactgcatggtcataaagttgaggattcacatggaaacttgatgccacccccacctgcaccccaaactcaatatcagagtccttgttcaagagagcttatgtcaaaacatgtatcagcaaaaacttgtgaggctgtgaaaccaaaagatggtgactgtaagctatttggcttctcacttatcagtggccctatcgtaccagagccttctttatcacaaagaaatgtgagtgagcctgctggtcagatgcatcttacagcacaccaacaaagaacatctgaaaatgatgagaagtcagatcactcaaagggatcaagacctgtagatgatctagttgttgatgaccatgacagaccattacagacttctcagtcgcatactaaagacgttcaagccaaacctctcagtggttctgctaggagttgcactaaagttcacaagaagggcattgcacttggtagatcagtggaccttacaaagtacagtggctatgatgaattagttgccgaattggatcagctgtttgaatttgggggtgaattattgtcaactaaaaaagattggcttatcgtctatactgataatgagggtgatatgatgcttgtaggcgatgatccatggcaggaattctgtgccatggtttgcaaaatttatatctaccctaaagaggagatccagaaaatgagcccaggtacactgagctcgaaaaatgaagagaaccagtcggtgatggctagtgatggtgcagatgcaaaagttgttaaatgtcagccacatcaaaagttcaattcagaaaatggccttgacgcctaatgattagtagattgatttccatagctttcagattctgggatggaaagtaaggaactgtcatgaagccatccatccagttggaaaacataacttgaagatgaaatcgaggctgactgctgcttatcagtgactgcttcaaatcaaatatataagatggcattaaaagagtagtatccgtccaattttggaaatcccggaattagtagtatatgcctgcccagttatacaatccctagtatttaatcaattgtgtttttgagtgaggtgatatagggtgatatcgaccttgctttttttttttttttaaaacaatcccaccttgtagttgttgctgtacatagttgtttctctcccaccctatgaacaacaacccattaatgtaatgaaagtttcgtatacc

SEQ ID NO: 12711 - DNA, 1904 bp, Glycine max
  Clone ID: JC-GMFL02220090D06_FLI
tcaaaacattcgccaagctgttttggaatatagaaaagtattcaatcagcaacatgttgagcctagggtaaggagggtggcattatatcgtggtgctgagtacttggaacggtacttccgtcttattgcttttgcagcatatcttggaagtgaagcatttgatgggttttgtggacaagcagaatacaaaatggcatttaagaattggatgcatgaaaggccagaggtgcaggctatgaaatggagcatcagattgagaccagggcgattttttactgtccctgaagagttgagagcaccacaagaatctcagcatggagatgcagtaatggaggctttcgtcaaagcccggagtggttctgttcttgggaaaggctacatactgaaaacgtatttctttcctggtcagagaacttctagccacatacaaatacatggtgcaccacacgtttacaaggttgatgaattccctgtgtatagcatggcaactccaaccatctctggtgcgaaggagatactatcctatttgggtgctaagcctaaagcaaatgtctcatctgctcaaaaagtgatattgactgatctgagagaggaagcagttgtctatatcaaaggcactccctttgtcctaagggagttgaacaaacctgttgatacactcaagcatgttggaatcactggtcctgcagtggaacacatggaagcacgattgaaagaagatatactagctgagattagacagtctggtgggctgatgctgtttcatcgtgaagaatatgatccttcaacaaataagtccagcgtcgttggatactgggaaaatattttggcagatgatgtgaaaacacctgcagaagtttattccaccctgaaagatgagggatatgatattatctattcgaggataccattaacaagagagagagatgctttggcctctgacattgatgcaatacagtactgtaaagatgactctgcagagagttacctttttgtatcacacacaggttttgggggagttgcatatgcaatggccataatctgtattagactaggcgcagaggcaagctttgcgtccaaagtcccacagccattgtttggtcctcatcagtgtgctgcaaccgaagagaacttggcctctcgagcttctaatgaagcagcactcaagatgggtgactatcgtgacattttgagccttacaagagttctcatacgtggtccccaaagcaaagcagatgctgatattgtcattgaaagatgtgcaggtgcagggcatctacgagatgatattctttattatcataaagaatttgagaagtttacagatggtgatgacgaggaacgagcatatcttatggatatgggtgtcaaggctttgaggcgatattttttcctgatcacattcagatcttacctttactgcacctctcctgcgaacatgaaattttctgcatggatggatgcaagacctgagcttggtcatctatgtaacaatcttagaattgataaataatatagcaaagcttatagttatgttaataatgtacagttagcatttcgacatccacttctttcccctccccctagcctgtccaataccctaaaaatacatactagtttgcaaacttatggctcataggcaaaacaacgcatcctttagtcagcttctttctgacattgggggcaaatatggtacataactgttgaaggaggagcaatatctgttcgcgaaatcaagtagtccagagcacaagaatttagttcactggactcaatgagcattaggttacactgttaagagacgttacatatttttatatattgtattgctattttagggagatttgattataggatcggtgtagttaattagattaattacgtggtcctccatgtctttgatt

SEQ ID NO: 12712 - DNA, 527 bp, Glycine max
  Clone ID: JC-GMFL02220090F05_FLI
gttcgagacccttattgacatttcagtgatagagatattgtcaaggcatgcttctgatgaggtctaccttggccaaagggataatccaaattggactacggattcaaaggcattggaagctttcaaaaagtttggaaacaaactggcagaaattgagggaaaaatcacacagaggaacaatgatccaagtctgaaaagccgacatgggccagttcagcttccatacacattgctccatcgttcaagtgaggaagggatgagtttcaaaggaattcccaacagtatctccatctaaaatgtgtgtgtggtttgcttatctattgtgcttttgaataaaatagacaatacttgtctatggttattattggctgtatgtctgtatttggatgctctcgatcggtttgcaagtaataagagtgttttcactgtcactttgtatttcgatcatcttaattatgtttactagtaataatgtggaagctgtacgtttgttaattctaggttaaataatagagcaattgtttttg

SEQ ID NO: 12713 - DNA, 1572 bp, Glycine max
  Clone ID: JC-GMFL02220092F11_FLI
cttgttgtgagcttgttcgttgttgtgcaactttgttgccacgccaatgcgaatatggtgttccccgttgtgcgcaaattcaaaggtcccgctgaaaacctcgctgctatcaaagctcatgatgctggtcgccgaggtagatttctctcggtcgttgatctcgctctcggtggcaatggccgtcctacttcaactgggctgtattataccaaaattgggcttggccaaatgactactatgtgcaagttgatacaggaagtgacactctgtgggtgaattgtgttggctgcacaacatgtcccaagaaaagtggtcttgggatggagttgaccctctatgaccctaactcatcaaaaacttcaaaggtggttccttgtgacgatgaattttgcacttccacatatgatggtccaatttctggatgcaaaaaagacatgtcctgcccgtacagcataacttatggagatggaagtacgacctctgggtcctatattaaggatgatcttacatttgaccgagttgttggtgatctccgtactgtacctgataataccagtgtgatttttgggtgtggttctaaacaatctgggacattgagttcaaccactgatacatcccttgatggaataattggttttggacaagcaaattcttctgtgctttcccagcttgctgcagctggaaaggtgaaaagggtattttcgcactgccttgacaccgttaatggaggaggaatatttgccataggggaagtggtgcagccaaaagttaagacaactccattggtaccaagaatggcacactacaatgtggttttgaaggacatagaggttgctggggaccctatacagctccccacggatatatttgattctacaagtgggaggggaacaataatagatagtggtacaaccttggcttatcttccagtctcaatttatgaccagctattggagaagactttggctcagaggagtggaatggaattatatcttgttgaggatcagtttacttgtttccattattccgatgaaaaaagtcttgatgatgcatttccaactgtcaagtttacctttgaggaggggcttactctgacagcttatcctcacgattacctattcccgtttaaagtaaaaaaggctgacagcagtcaaatcacaggcacaaaaaaggaagacatgtggtgtattggctggcaaaaaaagtacggcacaaactaaggatggaaaggacctaattcttctcggagatttggtgctgacaaacaaattattcatatatgatcttgacaatatgagcattggatggactgattacaattgctcttccagcatcaaactgaaggataacaagactggaactgtatatacaaggggtgcacaggatctttcttcagcttctactgtgctaattggaaaaatattaacgttctttgtgttgcttattaccatgctaagcacttaactgaatgatattattgtatcgagagatggcatttaatttattttgttgtaacataattccttgaatggtgagcttgatgcgaataaattaattatttatcgtcgtgtt

SEQ ID NO: 12714 - DNA, 1511 bp, Glycine max
  Clone ID: JC-GMFL02220093E06_FLI
cttgtgcactcagttactctctctctctctggagcgtcgtcgtttcgttagggcacaaaaccccttttcggatcggtggagcaaggcctcgccggcgagattcccgaggctgttcaatcagcgatcgagcaccggcgaaaagcggcgaagatgaaggttttcgtgaagactctcaagggcacgcacttcgaaattgaagtgaacccttcggacacgctttctgaagtgaagaaaaatatagaaactgttcagggtgcagatgtctatcctgctgcacagcaaatgcttattcatcaaggaaaagttctaaaggatggtactactttggaggaaaataaagtagctgaaaatagttttattgtaattatgttatcaaagactaagagttcatctggtgaaggatctactacttcaactgctccttcagttaaggcaagtgcaactcctacttcaacctctgtgtctgctgcgcctcaagctcctgcttcaactggagcaacgcctacacctgttactgccccagctgctcctgcttctgctgcagctcctgctcctatatcttcaggctctgctgtgccagagtctgatatatatgggcaggcagcatctaatcttgttgctggaagtaacttggagggaaccattcagcaaatccttgacatgggtggaggaagctgggacagggatactgttgttcgtgctcttcgtgctgcttataacaaccctgagagagctgttgaatatttgtattccggcataccagagcaagctgaagctccacctgttacccgagagcctgcaagtgctcaacctgcaaatcctccagctgctgctccacaggcagcacaaccagcatctgttccttctagtggacctaatgccaatcctttagatctctttccccagggccttccaaatgttgggtctggtgctgctggtgctggctctttagactttcttcgcaacagtcaacagttccaagccttacgcgctatggtacaggctaatccacaaatattgcagcctatgctacaagagcttggcaaacaaaatcctcatcttatgcgattgattcaagagcatcaagttgacttccttcgcctaattaatgaacccgttgaagggggtgagggaaatatactgggacagctagctagtgccatgccgcaagcagtgacagtcacccctgaggaacggcaagcaattgaacgtctcgaagcaatgggatttgatcgtgcaactgtattggaggtgtacttcgcttgtaacaaaaatgaggagctggctgccaactaccttttagatcacatgcacgagtttgatgaataattagatctcctttccaatttgtcaaaatagttgttttatgtttccttttgaacagtctttgttatgtaatgaggtaatatttgataatgacaagtctcgaatggacaagagatattttaatcactgcattattgcacaggtattcatcattttcttctcttagaaattttatcaatattctt

SEQ ID NO: 12715 - DNA, 1016 bp, Glycine max
  Clone ID: 701206255_FLI
cctcctggaggcccactccggggcggggcgggtgcaggcccggttcgggtttggcaagaagaaagccgccgccccgaagaaagtttccagggggtcgggctctagctccgataggcccctgtggtatccgggcgccaaggcgcccgagtacctggatgggagccttgtcggagactacggattcgacccatttgggctagggaagcccgccgagtacctgcagttcgagttggactcgctggaccagaaccttgcgaagaacgtggctggggacatcattgggaccaggaccgagctcgcggacgtgaagtccacgccgttccagccctacagcgaggtgttcgggctgcagaggttccgcgagtgcgagctcattcacgggaggtgggccatgctcgccactctcggagctctcactgttgagtggctcactggtgttacatggcaagacgccggaaaggtggagctagtggaaggttcatcatacctagggcaaccacttccattctcaatcaccacactgatctggatcgaggttctcgtaattggctacatagagttccagaggaacgcagagctggacccagaaaagaggctgtacccaggtggcagttacttcgacccactgggcctggcctcagatccagagaagaaagccacccttcaattggcggagatcaagcacgcccgtctcgccatggtgggcttcttgggctttgcagtccaagctgccgccactggcaagggcccgctcaacaactgggccacccacttgagtgacccactccacacaaccatcattgacaccttctcatcctcctcttaagaagaagcaaaagaagaagaatagtctttcttgtgcctggtcattctagttatattgtaaaagtctttttcttcttcttcggctttgggttgtaattaaacattttctacatagctggattagtagtacttgtgaaaaacttgtaacgtgaaattggagaggctaagcagaaatgcttctgcttgatgtt

SEQ ID NO: 12716 - DNA, 853 bp, Glycine max
  Clone ID: 701206301_FLI
caatttctctctcctctctctctctacaaatccttctttctttcttctcttcgctgctcactgtagccatggctttcagagtaggaggagcgggagggggaaatgcctcttctggcatgggtgttgctgagcatagtgtaaacaccttcctggaattgcagaggaagaaagttcatcgctatgtgatttttaaaattgatgagaaaaagaaagaggttatcgttgaaaaaactggaggccctgctgagagctatgatgatttcactgcatccttgcctgaaaatgattgccgatacgctgtctttgactttgattttgtgacatctgagaactgccaaaagagcaaaatcttttttattgcatggtctccttcagtggcccgcattcgcccgaagatgctatatgcaacatccaaggacaggttcagaagggagctgcagggcatccattatgagattcaggcaacagacccaacagagatggatcttgaagtcctcagagaacgtgcaaactgagcagtcacctacacaagaggcttgtgtctaggtgatgtagttagaatatctgaggcctcagggaatgatgttgactgatgataccctttagtttttctactatgatccctgtctgtttcgacctatttctcgtaaattagctgacttgtcatttatcaagtaaataacctgcacctgtgaaggctgatcaggggttcctgcctaagaaaccccactgcaggggaatttatgcttttccttattgccatgatgcttctcaggtgcagattaatacagtaatcgctattggaaattcgacttatattatatgaatttcaaatagacgcaattggtgagtc

SEQ ID NO: 12717 - DNA, 611 bp, Glycine max
  Clone ID: 701206459_FLI
ggcttgtagcagcaaatccagtaaattatggtcggccatgtcagctatcttgtgtagaggctttatctgctgctttgacaatatgtggggaagaaaaaactgcaaatttgttgcttgacaagttcaaatggggccatgcttttatgtctctgaatggggaattactgagggcctactccaaatgccaaaatagtgctgaaattatatctgttcaaaatgcttggctgtcacaagagagtcagattccaagggctcctactgacagtgaagttacgacacctgaaagtgaggataaaatccagaactcttccgattctgaagatgggcttccacctcttgaaaagaacatgaatcatttgagcatagtcaacagtgatgaagagagtgaatagattcattttacatctttaaggctgcggtactggaagtgatttgaagatgtgtgcaatgcagaatcgcttagtggcaaatcgttttggttaacaaaatatatgcgttgttgcctgggtggggcatagttccctgtccttttttatctctaaattgaaataaggaaatatgatcgagtgtcacttagttgtatttggaatagagagatttagcttgtgatc

SEQ ID NO: 12718 - DNA, 1694 bp, Glycine max
  Clone ID: 701206489_FLI
aaggaatgcacccaacttcttaaaagctgcctgcattccgtcattcttccaattggaagcttacccattggcctttgtgtccatcgagctttgctgtttaaagtgttggctgacttaatcaatctaccatgccgtattgcaaagggctgcaagtattgtaggaaggatgtgggtgcctcatgtatagtgcaatttggttctgacagggagtatatgattgatttagttggaagacctggggcaacatgccagcctgattcttcactgaattctgcatcttcaatgttggtcccttcaccattatgtcatccaaagttcaagccagttgaaacagctgaatatacaaagacactagcccaattgtatttcttggacagtgaagcactgcatcttgtatttgataccacatcaggacctgctgttaatcatagtggcagaatggatctacagaaaactgaagctctgggtgcaaattatgcgggtgggaacagccatctgattgctttgattcctggtgcagaggaatatgagtctttcaatgaagcaaaccagtcaataatggattacccaagtcatgaagttgatcttgacaaggaggatctggatattccatggagtgaacttattttgaaggagaacattgggacagggtcatttggaaccgtccttcgtgcggactggcgcggttctgatgttgctgtgaagattcttaaagtgcagggttttgatcctgggcgatttgaagaatttctaaaggaggtctcactcatgaagcgcctccggcatccaaacattgtacttttgatgggtgcagttattcaacccccgaagttatcaatagtaacagaatatttatcaagaggcagtttgtatgaacttctgcacatgcccaatgttggatcatcacttagtgaaaagcgtcgtttaagtatggcttatgatgttgcaagcggaatgaattatcttcatcaaatgagacctcctattgttcatagagatttgaagtctccaaatcttttggttgatgattcatacactgttaaggtatgtgattttggcctttcacgtacaaaggcaaacacatttctttcatctaaaaccgctgccggaactcctgaatggatggcacctgaagtcattcgaggagaactgtcaagcgaaaaatgtgatgtattcagctttggtgtaatcttgtgggaactagtgaccctgcaacagccatggagacaattaaatccttcacaggttgttgcagctgttggttttatgggcaaaaggctagagattccagggcatgtgaatcctcaagtggctgccttgattgagctctgctgggccacggaacactggagacgaccttctttctcctatgttatgaaatgtttgcagcaaataattgctgatgctaaagggtgaacaagtttaccctgataatcttcaacctgtatacagacaagaaacagcaatattgaacagaaaaataaatgggattccagtttattcaggaaattgctgaagaattacaatataccgttttatagagtaacctacgaatttttgttgtatatgctatttatataatcattactcacattgtcatatatattactatttgctttggatgtacctataataatcgtatgacactgggattctaatttatacatataagaattatttttatcttttaaaag

SEQ ID NO: 12719 - DNA, 1494 bp, Glycine max
  Clone ID: 701206518_FLI
caaaaaatttggtggatgaagtttggataaatcgcccaccggcagagataaatgctgttattgtacatcctgtgaaatttgcaggtcgctctgttgcagataagttgaaagatttgagaaaaaagcttgtacatgagcaaacccgtgggattattttcacagcacttgatgaagttgcatggttgtataatattcgtggaagtgatgtggcctactgtcctgttgttcatgcatttgctattgtgacatccaattctgctttcatttatgtggacaaacaaaaggtttctgttgaggtacaaactcatttagtggagaatggaattgaaattcaagagtatacagccgtaagctctgatgcgacattgcttgcaactgatgagctagatgctgtatctactgccaaggctgctttagccgaaacagaggccagaaaaattcccagtgaaattgataagagtgtaaatggtgaacatcaagcagaagaaaatagtaatgacctcatatgggctgatccagtttcatgctgttatgcactgtatgcaaagttgaaccccgatacagttctcttgcagcaatcacctttagcccttgcaaaagctttaaagaactcggtggagttggatgggttaaaaaaggcacatattcgggatggtgcagcagttgtgcaatatcttgtctggctggataagaagatgcaggatatttatggagcttctggttactttttggagaaggattctgtgaaaaaggagaaacatttgcaatctttgaaattgactgaggtgactgtaagtgaccagcttgaaggttttcgagcatcaaaagaggtagagctaactgaacaattaagtatatatttggatatgcttttcttagaaaaaattttgctcaagaaaaaaaagtggtgattccaaagattttggcttctgaaataggcagtggggaataaccattttcagctttcctagaaggctgatattttaaagttgttaaagtttttctttatagaaaagaactttcattaagaagacaatatttagttattagacattgcagaggtggcattacctgtaatttaggtatttttgttttaaaattgattatcttaagttgtcaggaaaagactaaattatgcacaattttgttcctatagtgtgctgtttgattggaatagattcattaggattgatcagaacagttacgggtatttcctggaattctaacttaaaatgttcatctcccttgcctttgatactttttcaaaattttgttttatagacttattattctttatgatcctccctagaatctaatcatccattgtatgcttaagtagtgaatgacctttccagatgttgcgtacagtgtttctgtagattctgcatataaggtggatttaaaatgttttgacctgtttgatatgttatatgtacaaatgctgcgatgttaaggaaggatcacattttttctttgcaacttcatcaggccaat

SEQ ID NO: 12720 - DNA, 731 bp, Glycine max
  Clone ID: 701206519_FLI
tcggctcggccgaaatctgcagaaaaaatgtcaaaagcaaacgcaaagaacaaatccccctccaccgagctccaccctccttacttcgagatgattgcggatgcgatatcgtccttgaaagaccgcacgggttcgagccagccagcgatagccaagttcatcgaggacaagcacagcaaagtgctccctcccaacttccggaaacttctctccgttcagttgaagaaactcgtcaaatcggagaagctttacaaggtcaaaaactcttacaaactttcttccgccacggacaaagagacccagaagaataccgaaaccgagcccaaacagaaggttgaaaagaagaagaagaagaagaagaaggtgggtgagaagattaagaggctgagccaagtgaagacacccgaaactctgaagaagaaagcacccaccaagaaggacgcggcggcaactaagaagaaatctgcgtcggcggtggaaggttcaggaggagggaaagtgaagtgtttgagtcaggtgaagacccctgaggccttgaagaagaagaagcccaatttgacacccaaaccttccaggcccaacaggaatgctaggaaatgaaaccaccacttgtgtcgtatgtatgttaatgcttttttttttttttaagttctgttgccttgaagtggattattgttatgatcaacttataacagttgacgattgcaatgtggtagtttctgcgattattt

SEQ ID NO: 12721 - DNA, 1520 bp, Glycine max
  Clone ID: 701206553_FLI
gcgaaatgccggtagggtatgtgcagattccggtaggggtggcggggccgttgttgttggatggattcgaatacactgtgccgatggccaccacggaagggtgccttgtggcgagtaccaacagagggtgcaaggccatctatgcttctggtggggccagcagtgtggttttgagggattgcatgtctagggcacctgttgttagattctccactgccaagagagctgcacagttgaagtttttcttggaggatcctctcaattttgataccttatcacttgttttcaacaggtcgagtagatttgccaggctccaaggtattcagtgtgctatggctgggaagaatgcttatttgagattcacttgtagcacgggtgatgccatggggatgaacatggtttccaaaggggtgcaaaacgttcttgattttcttctgaatgatttccccgacatggatgttattggcatttctggaaattattgttcggacaagaaacctgctgcagtaaattggatcgagggacgtgggaaatcagttgtttgtgaagcaattatcaaagaagaagtggtgcagaaggtattgaaaaccaacgtgtctgccctggtggagcttaacatgctcaaaaaccttgctggttctgctgtcgccggtgctcttggtggatttaatgcccatgctagtaacattgtttctgccatctttatagccactggccaagatccagctcaaaatgttgagagttcccattgcttaaccatgatggaagccgtcaatgacgggagggaccttcacatctcagtgaccatgccttccattgaggtgggtactgttgggggtgggactcaacttgcatcccaatctgcttgcttgaatttacttggtgtgaagggtgctagcaaggagtcaccaggatcaaactcaagactcttggccaccattgttgctggatctgttttagcaggagagctgtctctgatgtctgccattgcagcagggcagctagtgaacagccacatgaaatacaacagatcaagcaaagatgtaaccaaaatatcatcatcttgaggtcagggacgtggttgcagtcattaattctggactctagaataaaaaaattgagggtaagcggatttagggaaggaaaatggagaagcattagattagattgttggcatccacgtttggctctgcattgctgtctgtttagatcttttattatttggagagaggaaagtagagttatactctagatcttccctgtccccttctggatcatttcttcttttcattgcttcttctgccgagccattcagtgggtgttaacactttttttctcctcaaccaagacatttgacgtgttatattctaattcttttccccctatataatatgcttagcatatctatcattgtagccgaatgggttgatgaatattctcttgtccgctagtgcccgtcaattaagcttgagatcccattgtctcaagtctttatctaattaatgaatgtatttctgttt

SEQ ID NO: 12722 - DNA, 1504 bp, Glycine max
  Clone ID: 701206618_FLI
ttgggagttaggttctgcacgctctgcttccagcgagtgttctttcttcgtttcaacaccttaatttgcacacgctgcttcttcagcttgagaaatggcacaagaaacctttctattcacatctgaatctgtaaacgagggtcaccccgacaagctgtgcgaccagatctctgatgcagtgctcgatgcgtgccttgaacaggaccctgacagcaaggttgcctgtgagacatgcaccaagaccaacatggtcatggtctttggagagatcacaaccaaggccaacgtagactatgagaagattgtccgtgacacatgccgcgaaattggattcatctctgatgatgttggtcttgatgctgacaaatgcaaggtgttggtcaacattgagcagcagagccctgatatcgcccagggtgtgcacggtcacttcaccaagcgcccagaggaggttggtgctggtgaccagggtcacatgtttggctatgccactgatgaaacccctgagtacatgcccctcagccatgtccttgcaaccaaactcggtgctcgcctcaccgaggttaggaaaaatggtacctgtgcttggctgaggccagatggcaagacacaagtaactgttgagtactacaatgacaatggtgccatggttccagttcgtgtccacactgtcctaatttccacccaacatgatgagactgtgagcaatgaccaaattgctgctgaccttaaagagcatgttatcaagcctgtcattcctgagaagtacctggatgagaagaccatcttccaccttaacccttctggccgttttgtcattggtggccctcatggtgatgctggtctcactggaagaaagatcatcattgatacctatggtgggtggggtgctcatggtggaggtgccttttcagggaaggaccctaccaaggttgacagaagtggtgcctatatcgtgaggcaggctgcaaagagtgttgtggcaaatggccttgccagaaggtgcattgtccaagtttcctatgccattggtgtccctgagcccttgtcagtgtttgtggacacttatggaactgggaagattcctgacaaggagattcttcaaattgtgaaggagaatttcgacttcagacctggaatgatcaccattaacttggaccttaagaggggtggccataggttcctcaagacagctgcttatggacactttggaagggatgaccctgacttcacctgggaagttgtgaagccactcaagtctgagaagcctcaagcttaagattgttgtgaagttaatcactcccttcaatggatgtcttgctaggtgtggatgaataatttgcgtgttccatgactactactacttcattcataggtctaatgtcatctcatcaatacttaaactgtttttttttttccttttctccttttactcacaatttattttttggttatgcaatgttaccgttttgatgcaatggaaattttatcagaattttgtacc

SEQ ID NO: 12723 - DNA, 803 bp, Glycine max
  Clone ID: 701206630_FLI
gccaataatgcatacatattccctggatttggtctcggtttaataatgtctgggaccattcgagtgcatgatgacctgcttctggctgcctgtaagtgctcaagacacttgcgaacattaatttcaaacttatgtttgggacaggtgaaaataggatcatggtaggaatgaaatatacatttggaattaatacaatgtcatattatttgattttgatggaacagctgaggctttggctgcacaagtgagccaagagaactttgataagggactcatatacccaccattcaccaacatcagaaagatttcagcacacatagctgccaatgttgctgctaaggcttatgaacttggtaagctcttggtttaatgggaggttctatggttgcacttttttttttttttctttaaaattttaaatattaaaagaaaatcttataaaagtgagtttgtgtttttgtcaggcttggccactcgccttcctcaacctaaagatttagtgaagtttgcagagagctgtatgtataccccagcctacagaagctaccgatgaaaagtgataataataaataggcgcttttttctttttcatttatcatgatatcatttcattgtcaattttttaattttttaccttctttatgttcctgttatgttttttgtaagttatttgtattgggtgggttagtaggttaggacggtggtggtagtgaagtggtacttggaccaaaaggtagcttgaaaatttgtgtttcgctataaatgttgtgacagtaatctaaattagaaaaggaagcatttct

SEQ ID NO: 12724 - DNA, 829 bp, Glycine max
  Clone ID: 701206994_FLI
aaaacacttgaaaggtaccaaaagtgcagctatggtgcagttgaagtcagcaaacctggcaaagagcttgagagcagctaccgtgagtacttgaagctgaaagcaagatttgaatctcttcaaaggacccaaaggaaccttcttggtgaagacttgggcccactaaataccaaagatcttgagcagcttgagcggcaactggattcatctctcaagcaagtgaggtccacaaagactcagttcatgctggaccagttagctgatcttcagaataaggagcatatgctggtagaagcaaacagatctttgaccatgaagctggaagaaatcaattcaagaaaccagtataggcaaacatgggaagctggtgagcaaagtatgtcatatggtacacaaaatgctcactcccaaggctttttccagcctttggagtgcaaccccacattgcagataggttctgactacaggtacaaccctgaagcctcagagcagcagctagctgccacaactcaagctcaacaagtcaatggatttattcctggatggatgctttgacctaagctctcagtattttggatggctacataaataaaattagcaaacacctaagaccaaagtcaaaatgcctcttgctgttggaaatgtgtaaatgctgcttgttctttagttatttatttgttttggcataaaaacagcagtgactgacttaaaactattaaaactttagccatagtcataggatgtggcatgaaggttatagtattttgaatatctttggaggacaagttttatctgactgaatgacctgttaatgtcatttttcttttgc

SEQ ID NO: 12725 - DNA, 1375 bp, Glycine max; identical to SEQ ID NO: 9380
  Clone ID: 701207126_FLI

SEQ ID NO: 12726 - DNA, 1496 bp, Glycine max
  Clone ID: 701207149_FLI
ttctgagtggcgatcattaaaggttcaatgggatgaaccatcgtctattttgcgtcctgatagagtttctccatgggaattggagccacttgtgtctacccctcctacaaacccccagccatcccaaagaaacaagagatcgcggcctcccattctaccttcaacaatgcctgattcttctctgcaaggtgtatggaaatcaccagttgaatctgcaccattctcttattgtgaccatcaacatgggcgagatgtctatccatcaaccaatttcaattccactgcaactggttttcttggttttggtgggaactgctatgcttccaacaagtcaatatattggtccagtaggatggaaaactccacagaatctttttctcctgtagcacttaaagaatttggagagaagagacaagggactgcaaatggctgtagactctttaggattcagttacatgacaattctaattctaatgaagaaagtctaccaatggtcactttgtcaggaaggatgggtgatgatggccccttccatctttggatgctgagtctgaccagcattctgaaccatcaaatgttaatcgatctgatatcccttcggtaagctgtgatgctgaaaaatcatgcctgcggtctccccaggagtcacagagcaggcaaataagaagttgcacaaaggtccacatgcaaggtatggctgttggaagggctgtggatttaacacggtttgatggatatgaggatctgctaaggaaattggaagagatgtttgacatcactggtgagctctgcggatcgacaaaaaaatggcaggttgtgtacactgataatgaagatgatatgatgatggttggggatgatccatggcttgaattttgtagcattgtgaggaaaattttcatctacactgcagaggaggtgaggaagctttcacccaaaataggacttccaatcagtgaagaagttaaacccagcaaaatggactctgaagcagtagccaatcctgaggatcagtcatctattgtggggcctggttgctaatgtcttaggtcttccaacatttcagttgttatatatatatacaatagatattggcatgaaaataggaagtagaacgtgagagaaacgagtatgtacctggcaagcccttcatcatggcctataaggagcatatggttagtgtattctgcatctatacaggagcagcataacagcaccaaagcagagggcttggggtattgtggcttttctctttctttcatagctctgtaatcaccgagtttcgatgccttgcttgttcagttttgtattggttgcgagcgtgcagaaatgtcttgttttttttttttttggttgcgagcagcataacagcaccgaagtatcttactatgtatgcatttggattttttttttggttcttttgtaattcacttgttatgatgcatcatctcatttatgtatatataactttctattatatacatactatttaatgt

SEQ ID NO: 12727 - DNA, 717 bp, Glycine max
  Clone ID: 701207169_FLI
atcccatcggttaattttgttgatctcaacaagacttcaagtcttccttctagtcctccaatgggtgttgccccaggaaaaacatgcaagaagtgtcgctgtgttaataatcggagctgcacaaaggtgcttaagctgggaaatgctcttggaagagcagttgaccttgcacgctttaatgggtataccgaacttattgctgaattggactccatgttcgattttcaaggaaccttgataagcggaggtagtgggtggcacgttacctgcttggatgatgaaggagatatgatgcaacttggagattatccctggcaggatttcctgggcgtggtgcaaaagatgatcatatgtccaaaggaaggtactgacaatctcaagccaggctcctcagctaatccttgaaacctttagtcgcctaccttttctccccttttccaccattgcatgcatgcacagtttgcagtactgtgtcgtttctagttcgaataaatttctcttttcctgagaatctaggagatcaataagtttctgctataaaaatatagcaatcatagtgaaataaatttacagagtggaaaaacaaaaactgctttttcttgttttaagaacctgtttttcatgatacttgtggaaagtactcatgagtcatgaccgtgatatgaataattgacataataaatgcatggttattccgtcctcatgaacgggcgttcg

SEQ ID NO: 12728 - DNA, 417 bp, Glycine max
  Clone ID: 701207208_FLI
taaggaaaatgggttccaaggctttgctcgtccttgttgtgttcttggcttttgtcctcgttctttctggtgaagttgcacccgaagatatggatgagaattttcatgcaaatgatgtaggtgttgctgatacaaatatggtagatgaaatgaaatatagttacagtagttggcgaactggtgctgcactgccttgtcctcctaattgctgttatgtgttccatggaaagtgtataccgtgctgctgaaccgcataactaagtaggaacttttgctaagaattagttgttgctatcactattgctatgtatagataaagagaaatgctagcaacacaaactacatgagaagtgtagttatgcatggaataaaaatgaaaatccctcatacttaataaaagaatgttagattaatttg

SEQ ID NO: 12729 - DNA, 455 bp, Glycine max
  Clone ID: 701207222_FLI
gttttaaattgtttcagtgatttaaggaaaatgggttccaaggctttgctcgtccttgttgtgttcttggcttttgtcctcgttctttctggtgaagttgcacccgaagatatggatgagaattttcatgcaaatgatgtaggtgttgctgatacaaatatggtagatgaaatgaaatatagttacagtagttggcgaactggtgctgcactgccttgtcctcctaattgctgttatgtgttccatggaaagtgtataccgtgctgctgaaccgcataactaagtaggaacttttgctaagaattagttgttgctatcactattgctatgtatagataaagagaaatgctagcaacacaaactacatgagaagtgtagttatgcatggaataaaaatgaaaatccctcatacttaataaaagaatgttagattaatttgacatgatttctctttc

SEQ ID NO: 12730 - DNA, 1955 bp, Glycine max
  Clone ID: 701207337_FLI
agaaagcacagcctctggatatgtggctttatctctccgagcacgagaagttcaatgactttggcagtgaaagttctcttgtatggcatgaaaccaatgttccatatgctgtttggggacctgagagtaccaggactcatactttgaagtatcatccgtcggagtctttgaagcataatgggagtctatatgctcatgttttctttgcgcactctggcttttcgcctgacccaagtgatccggagtaccaacctcaagcagcgtttggaaggacgcatcctgttgtgacgtacttgcccaagtcaaaagcagataaaaagaaaagtctgctgggaagttcaccagattctagtgaggctcaagtggcatccaaggtggttgatgaatctgaagatgatgatgattctagtgatgatggtgattctaatgatgatggtcctgtggagtgggcttcatattggaaaccaaatataacaataaacttggttgctgacttcactcagtacccaaagacaggtgtagcaccaaacattgctccttacttgaatgtcgatcctcttactgggaactactatccaattgtttatttcaatgagttctggttactcagggataagctgatacctttaaacgagacagtgactgaattatcacttaacctggaagttggtcccattagtatgacaaagtggcagttattcctgcagattgaccagtccttccagattcaccgtagttatggaagcatgcttgaaggcgaggctgatgaactcaagagggtattcttggaagggaatccttacctcctggcaattaccatggttgtttctcttctccattcagtctttgacttcttggctttcaagaatgatatccaattttggaataaaaataaatctatggaaggactctctgcaaagaccgttgttgtgagctttgcttgtcagcttattatcttcctttatctgcttgacaatgacacctcttggatgattcttgcaagctctggaattggttgtgttattgagttctggaaaattggaaaagccatgcgcatagagattgataggacaggaaggatacctatgttgaagctccgcgatcgagagtcatatgtacggaataagacaaaggaatatgatgatattgctatgaagtatttgttctatgttctatttctccttgttgctggtttttctgtttactcgctgatgtatgagcgtcacaagagctggtattcttggattctgtcttcgctcacaagttgtgtatacatgtttggctttattatgatgtgccctcaattgttcatcaactacaagctcaaatctgttgctcatctaccttggaggcaaatgacatacaagtttctcaacaccataattgatgacctttttgcctttgtcattaaaatgccaacactccatcggctttctgtcttccgtgatgatcttatctttgtcatatacttataccagaggtggatttataaagtggacaagaaacgtgttaatgaatttggttttggaggcgaggatgatcaggttgtggcagagacagacgccacaaaggaagaagagaacactacaacggaagaagagaagaaaactaattgatttggttttctctaaacaatttgagaaaattttacagtagataccaaatactgtagaattctacggggattggtttgtttttctcccccttttgttacacatttgcatttagatttttgttgaaagaaagctttagtttggccttgtctactggaatttttactaggatcgaaggattgagggaatttaactactgaaaccttcatggttgactgtaatggtcataacagctttttagttaccccctctgtagtttttctttgatctcaaatgtcttttagtttgtgatagataacccttttatatgtattattttcttccactcatgtatttttaact

SEQ ID NO: 12731 - DNA, 1365 bp, Glycine max
  Clone ID: 701207361_FLI
tcagaattctctaaaagagatctttttctgctctttgaagaaagaagggtctttgcttgattttggagatgtctctgctctcagatctcatcaaccttaacctctccgataccaccgagaaggtgatcgcagagtacatatggatcggtggatcaggaatggacctgaggagcaaagcaaggactctcccaggaccagttagcgacccttcagagcttcccaagtggaactatgatggttccagcacaggtcaagctcctggtgaagacagtgaagtgattttatacccacaagccattttcagggatccattcagaaggggtaacaatatcttggttatctgtgatgcctacactcctgctggagaacctattcccactaacaagaggcacgctgctgccaaggttttcagccatcctgatgttgttgctgaagtgccatggtacggtattgaacaagaatacaccttgttgcagaaagatatccaatggcctcttgggtggcctgttggtggtttccctggacctcagggtccatactactgtggtgttggcgctgacaaggcttttggccgtgacattgttgacgcacactacaaagcctgtatttatgctggcatcaacatcagtggaattaatggagaagtgatgcccggtcagtgggaattccaagttggaccttcagttggaatctcagctggtgatgagatttgggcagctcgttacatcttggagaggatcactgagattgctggtgtggtggtttcctttgaccccaagccaattaagggtgattggaatggtgctggtgctcacacaaactacagcaccaagtccatgagagaagatggtggctatgaagtgatcaaagcagcaattgacaagttggggaagaagcacaaggagcacattgctgcttatggagaaggcaacgaacgtcgtttgacaggacgccacgaaaccgctgacatcaacaccttcttatggggagttgcaaaccgtggagcttctgttagggttgggagagacacagagaaagcagggaagggatattttgaggacagaaggccagcttccaacatggacccatacgtggttacttccatgattgcagacacaaccattctgtggaagccatgagcaaaacctgcatgttttctccctttggatggaaaggaacagttatgcttttcttagtaggatttggtctctctctctttttaccttttgattggtactatggttggtgccttgttggttggtgcaactaactggcaagggttgttcattgttttcttctattcctttccctcgttttccgattgttacaatgacaataatttaatggttattatcagtcttgaac

SEQ ID NO: 12732 - DNA, 1182 bp, Glycine max
  Clone ID: 701207375_FLI
gtgccaagagaaagaggaagaaccagtatcgcggaatccgccagcgtccatggggaaagtgggctgctgagattcgcgacccaagaaagggggttcgtgtttggcttggaactttcagcactgctgaagaagctgcaagagcttacgatgctgaagcaaggaggatccgtggcaagaaagccaaggtgaatttccctgatgagccttcaggcgctgcttcctcaaaacgtctcaaggcgaatccagaggctcagccaatgaagaaaaatctgaactctgtgaagccgaaaataaaccagatgttcaattttggtgacaatcttgagggctactacagccctatagatcaggtggaacagaaaccactggttaaccagtatgttaaccgtgccccgtttgctggaaatggagttcaagtctcacctgttactccatctgctgatgttactgcttacttcagctctgagcattcgagcagctcgtttgattattctgacctcggatggggtgaacaagtccccaagacacccgagatctcatccatgctttctgctgctcctttggacggtgaatctcagtttgtgcagggtgctgctgatcagaatcagaagaagaacaacctgctggatatggcatctgtgcaagatgattctgcaaaaactctttctgaggagcttgcagacattgaatcccagctgaagttctttgagaccccttcttttcttgatgaagcctgggctgatgctgcattggcgtctttgctcagtgaagatgcatctcaggatgctgctggaaaccctatgaacctttggagcttcgacgacctgccttccatggcaggagtcttctgaacaccttcatatccctttttatgtaaataaagctacaagaattgtgatcgtgatgttggtgatggaatccacagcaagaaaaccaacctgcttaaagcatatgtggagtttatttatcttgtagctaatgcagtataggactatatataggtttttatagggtatcctttgtgtgaaactcaagagacctcgttttcaggggattttctgtttgatgtccataaggattatcaattatgttatatatggtctgggatacagtcttgacttacagtttttaacttggttgttttcattgttatggcaatttgattatgatttgagaacagcc

SEQ ID NO: 12733 - DNA, 629 bp, Glycine max
  Clone ID: 701207418_FLI
gcagcactttcactgtaatttacaatttatattctcaacctctgagaatggcattctcttccactctacttcttctgctcgtggcgatgttcgtcttctctgccgtcgcacaatctccggcgtcgtctcctgagttcgctgctgctccaccgaaaaccgccactccctcgccttcttcgtccatgtctccacccgccgctgctccttcaccttcatcctccgtcgtgagctctccgccgtctcctcctacttcagttccggcgtcttctccgtcgccttccatctctccgtcgtcgatctcttcccctccgtccgatgcccccgcaccgtccgagaatgccgccgtctcgaatggattcgccgctgtcggatctgtcgtagtcggtctcgtcgccgccgcatcgatcatgtgaaccgctacataggcgtatatagaaaatttattatctcctatatattctccttattttttttttacttttttatagttattattttttcatttagagttttatatctggagaatttcgagtttgtataagacaagcgatttaccttgttagtttttcattaatttcgtaatagtattcgctatttgcctgtttgttcagtgaaaataatttcgtgtt

SEQ ID NO: 12734 - DNA, 1332 bp, Glycine max
  Clone ID: 701207433_FLI
aaaaaaaagaaatgaatatactaaaaaaatgtaatatgcttgatgggcgtgggacagtgggggaagttgtaggggtttcagggcacgcattctatcgctgtttctctcgaatcaacaaaacgccaccgtttcattgatctacttcctccaaggccaggtctccaagaattggtaccaattcaagctgcaaatatacttgaacttcaacttatcccacattctccactctcaatggcttcaactctcaaatctggcggaattcatacaggggcaatcaatgatgatttatacaaggaattgtggcatgcatgtgctggtccccttgtcactctccctcgtgaaggggaacgagtctattactttccacaaggtcacatggaacagcttgaggcatctatgtatgagggattagagcagcagatgccttccttcaacctgccttctaaaatattatgtaaagtggtcaatgttcatcttcgagctgaacctgaaacagatgaagtatatgcacagataactttgcttcctgaagcagatcaaagtgaggtgaccagccctgatgatcctctgcctgaatctccgagggtcaagatccattcattttgcaagacacttactgcttctgacacaagtacccatgggggtttctctgttcttcgaagacatgcagacgattgtctgcctccactggatatgtctcagcagccaccatggcaagaattggttgcaactgatttacatgggaatgaatggcattttaggcattttttcgagggcaacccaagcgccacttacttaccactgggtggagtgtctttgtcagttccaaaaaattagctgctggtgatgcctttatattcttaaggggtgaaaatggagagctgcgagttgggtttaggagggtcatgagacagcaaagcaatgtgccttcttctgttatatctagtcacagtatgcatcttggtgttctggccactgcatctcatgccattgccactggaacactgttttctgtgttttacaagcccagaacaagccggtcagagtttattgtgagtgtcaacaagtatctggaagttcagagtcataaactctctgttgggatgagattcaaaatgcgatttgagggtgatgaaattcccgaaagaaggttcagtggcacaattgtgggtgttggagataataaatcatcgtcggtctggcctgattctgagtggcgatcattaaaggtgcaatgggatgaaccatcctcaattttgcgtcctgacagagtttcatcatgggaattggagccacttgtgtctaccactcttgcaaactcgcagccaaccc

SEQ ID NO: 12735 - DNA, 1165 bp, Glycine max
  Clone ID: 701207561_FLI
gttctcaccttcatctcttctcttctcctctattttgctgtcacacacacactcacaagcattaacatctctcacacgctttatttgccttttcgagatctgtgcttgaaccttcacttgtgtttccttccttctgcagacgagcttcaccttgcgccgaagggccacagatggttgaaaccgatatggatgccgaaactgttgcaaatgtggttccaccaaaggagactccaaacagtgttcccatctcttatcattcctcacactcacaccctcctcttaatgagaggattatttcatccatgaccagaagatctgttgctgcacacccgtggcacgaccttgagatagggcctggtgctccaacgatcttcaattgtgtgattgagattgggaaagggagcaaggtgaaatatgaactggacaaaaaatcgggtcttatcaagatcgaccgtgttctttactcatcagttgtgtatcctcacaattatgggtttatcccacgtactatttgtgaggacagtgatcccctggatgtcttgattattatgcaggagccggttcttccaggttgctttcttcgggccaaagcaattggtctcatgcccatgattgatcagggggagaaagatgataagataattgctgtctgtgctgatgatcccgagtatcgacattacaatgatatcaaggagcttcctccacatcgtttagctgaaattcgtcgtttttttgaagactacaagaagaatgaaaacaaggaagtcgcagtaaacgactttttgcctgcctcagctgctttcgaagcggttaatagatccatgagcttgtatgcggactacatagtggagagcttgagacggtagtcgttgatgaatgatgcacgtcaaggatttttaactgacggaccaatggaagatgtttgcttgaaaaaaggctgcattatcaatattatgtaggaataaaaaaaaacattttactttagctgcctcttagctcatgcatgttctacaaactgtgcttaatttcaaatatgtcatccctgcaatatcaaatttacctgcctcttatagcacatgcacaatccaatatcaaatgttttaatcttgtataattttatattctcaccctttctattagaaagagtgtaatggttttttatatt

SEQ ID NO: 12736 - DNA, 1061 bp, Glycine max; identical to SEQ ID NO: 11370
  Clone ID: 701207668_FLI

SEQ ID NO: 12737 - DNA, 1515 bp, Glycine max; identical to SEQ ID NO: 8286
  Clone ID: 701207680_FLI

SEQ ID NO: 12738 - DNA, 933 bp, Glycine max
  Clone ID: 701207758_FLI
cagaaacaaaaaaaaaacctcacttagatcacatagatcaaacaacaaaacacagagttacctaaattgaacctaccccagtaggttctacaagctcttgatcatggcctcagcatcaggggaggcaccaccaccccaacccacttcaacagaagcagctccagcatcaggctcttcagctccagccatatcagcagcagcaccacaacccggaggatcatcgccggcgcctccgagccgctacgaatcgcaaaagcgtcgagactggaacacgtttctgcagtacctacagaaccacaagcccccattaacgctggcgcggtgcagtggcgcacacgtcattgagttcttgaagtacttggaccaattcgggaaaaccaaggttcacatcacggggtgcccgtactacgggtaccccaaccctcctgcgccctgcgcttgcccactgaaacaagcgtggggaagccttgacgccctgatcgggcgactcagggcggcttacgaggaaaacggaggccgccctgagtctaacccgttcggcgccagggccgtcagaatttacctcagggaggtaagagaaggtcaggctaaagcaagagggatcccttatgagaagaagaagcggaagaggaccaccgtggtgatggtgagtagtggtggtggtggtagtagcggtgcagttgcctctccgagtggcggtggtgataccgctattggtggtggagctggttctagtgctagtttaacttcttcagcaactgccacagctaatgatactacaaccacagtataattttaatagttatttaattatttatttttccttaattttttttgtttttacattattactatctatttttagttttctaaggaaattaattgtgattacaaggcttatataattatcaagttgcatattttattatggcg

SEQ ID NO: 12739 - DNA, 1830 bp, Glycine max
  Clone ID: 701207771_FLI
cctaccctaaatttccatgtattccaacacaagacagacactgatttatgtagatagataaccataaccataccatagcttacaaattaagctccgctcactctctttctctctagaatccatggcagccattggtctgaatggcgtaaaggttgggacgacgtcgtctcaggcgtaccttgaaggcaaggcagtgaaggagacgagagcgttgatggctgaactgtgtcgccatttctacacccttggatgggtgacagggacaggtggcagcatctccatgaaggtccacgatgactccatccccaggcctcaacagctcatactcatggccccttctggtgttcagaaagaaagaatggagccagaggacatgtatgtgttatcacacagtgggtctgtcttgtctgctccatctcctaaaccttggccgcacaagcctcctaagtgtagtgattgtgatccacttttcaagaaggcatatgaaatgcgtgatgctgcggctgttttccacagtcacggaatagagtcttgtctcgtaacaatgatcaatccattatcaaaggagtttcgaatcactcacatggaaatgataaaaggaatcaaggggcatggctattatgatgaacttgttgtccccataattgagaatacggcctacgagtatcagctcacggaatcttttgctaaagctattgaagactacccaaaagcaacagcagtgcttgttcgcaaccatggggtatttgtctggggagactcatggatcagtgctaaaacacagtctgagtgttaccattacctctttgatgctgctctcaaacttcatcaaatgggattggattggtcaactccaaatcacggtccaatacaaagtgcaagaaggggtctaagtattgctggggagtcaaatgtgtcagttaaagcaaggaaatctaatggtgacagtgatccattgccacgttgcgttgttcttgacattgaaggaactactactcccatatcatttgtttccgaggttctcttcccatatgcccgtgataatgttgggaggcatctatctctaacatatgatacccccgagaccaaagctgatatcaagttgcttcgttcccaagttcaaagtgaccttgaacaagggattgcaggtgctgtgcctatccctccagatgatgctgggaaacaggaagtcattgctgcacttgttgccaatgtggatgctatgattaaagctgatagaaagatcactgccttaaaagagttgcagggtcatatatggaaaactggctatgagaataatgaattggagggaatagtttatgatgatgtaccagaagctctagaaaagtggcacgccttgggtataaaggtatacatatattctagtggtagcagattggctcaaaggctaatatttggaaaaaccaaccatggggacctaagaaaatatttatctgggttttttgacactacagtggggaacaaaagagagacacgcagttatgttgaaatttctgagtcactcggtgttgaaaaaccatcagatattttatttgtcactgatgtatatcaagaagccacagctgcaacggctgcaggtttggaggtgataatttctattcgacctggaaatggacccctccctgacaatcatggcttcaagacaatcaaatccttctcggagatctaagaccaattgcagtcttctggaatgacattaaatgtgttatcattactaagaatagtgtaacgttcacttcttaattaaaataatgtaattaaaaaaaattaaaataatgtaatgtaatgtattttgcgttgagtttctcc

SEQ ID NO: 12740 - DNA, 1072 bp, Glycine max
  Clone ID: 701207895_FLI
ctgcaaacgccgtaacgggttgctcaagaaggcttatgaattgtctgttctgtgtgatgctgaggttgctcttgttgtcttctcaagccgtggacgcctctatgagtatgccaacaacagtgttagaggaacgatcgataggtacaagaaagcatgtgctgcctccacaaatccagaatctgtctctgaagctaatacacagttttatcagcaggaagcgtccaaattaaaacgacaaatcagagacattcagaatctaaacaggcacatccttggtgaagctcttagctctctgagtctgaaggaattaaagaacctggagagtagactggagaaaggtttaagcagagttagatccagaaagcatgaaactttgtttgccgatatcgagttcatgcaaaagcgggaaatagagctgcaaaaccataataattttctgagagctaagatagctgaacacgagaaagcacaacaacggcaacaggatatgataccgggaaatgtgtgcgagtcaaccatacctccacaatcatatgaccgcaatttcttccctgttaatctcatagattccaataatcaatattcaaatcaagaccagactgctcttcaacttgtctgataaacgatttgaaattatgccgcagcctttcaagtggtgtgggatcccttacatcgtcctatgtttcgtgaaggagagtgcccttagaaactcctctgctaaagttcttacaacggagaacaagagaaaaactaatcagcatttgtaccaatacatcatttgatattgtttatgtatctttcaatatatatagtttctattcagtcctggcatattgtatttttatgttataaatgcttatttcaatatgaacactatatctatcgaggagtaaaagttaactgggcgtccgcattattcatcaaagttggacaacaaagaggaggggattaaaatcagtgggttacttttgattctcaagcatttgaggaataacacaactattgtatttgattgtgttgcaagtcttacgatgggtaaaataaaaataaaaaatcaaagtgaataagttag

SEQ ID NO: 12741 - DNA, 2565 bp, Glycine max
  Clone ID: 701207942_FLI
caggtacaacatggttgaccaaggtcttcttaaggaaccagtattttcattttggttcaaccgcaatccagaggaagaggaagggggtgagattgttttcggtggtgttgatcctgctcactataagggaaagcacacttatgtgcctgtgaccagaaaaggatattggcaggttataatttttttaatacttaataatgctttctttttttacctttttctatatgttaatttttatttttgttttcagtttgatatgggagatgtacttattggcggtaaacccactggtatgtagagaatgtgttagcagaaattgataatttgttcttcctatgatgcatcattggcatttttgtaaatgggtcagagttttaatttatttggactgacctgatctatttgtctatcaggatattgtgctaatggctgttcagccattgcagactcagggacttctttgttggcaggtccaacggtatgaataaatgagtgtagatatagattgattaatgtttatgtagtattcaacaattatgggggtctttagacattgataattctcattgcgttgtttatattgcatgtgaaaaaagatctaacaaatgcttctaactagcttgtttctatgatcacatatgtggttttgttcttgtagactgtcataactatgataaaccatgcaattggagcatctggagttatgagccaagaatgcaagaccattgttgcagagtatggacaaacaatattggatttgcttttggctgaagtgagtaccatttgtaatttgttctccctgcatattttggttgattaatggtcatgagtgggtatgtttgaaagatatgattttctaataatttttcttatgtttttcgcttttgcaccttttagacacaaccgaagaagatctgttcccgaattggattgtgcgcatttgatgggactcatggtgttgagtgagtcccgaagatatttttattccttgaatctttggtcatttatttaaatagtttaatatatttatgtaaaatttccattttattatttgttccttctgcccttcagtgtggggatcaagagcgttgtagatgagaatgaaagaaaatcattgggtggtcatcatggtgctgcttgtcctgcatgtgagatggcggttgtttggatgcagaaccagctgagccgaaatcagacacaagatcagatactaagttacatcaaccaggtgagtcagttgtcttaattttgctattcaagcgtcctgctgcacctcttgatttatagcctcatgatgatagattgatattgcagctttgcgataaaatgcctagcccgatgggagaatcagctgttgactgtgggaatatctcttcattacctgtagtgtcctttactattggtggaagaactttcgaccttagcccagaggaggtatgatttcccccaaaggctcaaacctgattagttgcttttgcaatgactagtcactaaccagatttaatttaatggataaagctaaattcatgaagagcagcaggagttagagtaggggaggatcaggaaactttttatagaaaaataaaatcagaattcaagttaaagctagtacatcaatagctttacggtgtctttgcaattgcataactttacctaaagaaacacatcctataggtgccttattttccatagagtaatattatcctgacataataaatcgggttttctagttaagtggttttatcagattgacattgacatttagttaaatgtgattacgcgagtcttcttctctgttgtcctcactcagcttctattttatttattcagtacgtactcaaggtgggtgaaggtcctgtggctcagtgtattagtggctttactgctatagatattccacctccacgtggccctctctggtacttaaattgcttcaattagcgccattatatttgcctcactttttttcatcctatgttgtctttggattgtgactcaaatcactcaatggcatctccgttaatgtaggatccttggtgatgtcttcatggggcgttatcacacagtgtttgattttggtaaactcagagtgggatttgctgatgctgcatagagtgttagcgtttctcagactatggcgatccaattgctattattagtttatataaccgttgcagtcaaaatggacctaaagttctggcttgtacaggtttatattattaatgttaatactttgggtgttccataatactaaaagcttaacagatgtatctgcggctgcgaaatagtccataattggctccgtagactctatgcatgttttagttgaaagggtatagctatggttctcatgattccttgttagttccctctgttcgtcttcttttgcaagatgcgtgtatggggttatatgcgatgaccttccataatgatagtttgcttcatattaagataaaatagaaatcgaaggagtcagctttcaaatttcaagttacagatataatctatatctatatacagtattagggaaatttgtcaatcaactaaagatgtaaatagccgatc

SEQ ID NO: 12742 - DNA, 1961 bp, Glycine max
  Clone ID: 701207946_FLI
cggtactgcgcggagacaattttcccgcgtctggactacacggcggagccgccggtgcagacggtggtggcgaaagacgtgcacggcgagacctggaggttccggcacatctaccgagggacgccacgtaggcacttgctgaccacagggtggagcagtttcgtgaaccagaagaaactcgtggctggggattccgttgtgtttctgagggctgagaatggtgatttgtgtgttgggattcggagggcaaaaaagggaattagcgagggttcaggttcaggttcatcatctgtgtggagttcagcttctgggtctggaaatggaaattgtgggattgggccttatgggcctttttcttttttcttgaaagaagaaaacaaaatgttaaggaatggttgtggtgggaatttgagtggaagggtgaaagtgagggctgaggatgttgttgaagctgtgactcttgctgctagtaataagccttttgtagttgtgtattacccaagagctagtactcctgagttttgtgttaaggcttctgctgtgagggctgctatgaggattcagtggtgttctgggatgaggttcaagatggcctttgagactgaggatgcttcaaggataagttggttcatgggaaccattgcttctgttcaggttgttgaccccatccgctggcctaattccccttggaggcttcttcaggttacttgggatgagccagatttactacaaaatgtgaagcgtgttagcccgtggcttgttgagttggtatctaacattccactcattaatttcacacccttctctccaccaagaaagaagctgcggccacaacacccagacttcccccttgatgttcaatttccaataccaatgttttcaggcaaccagcttgggcctaacagccccttgtgtggtttttcggataatgctcctgcagggatacagggagccaggcatgctcaatttggaaaatctctatcagatctccaccttaacaataaactgcagttggggatgcttccaactaatatccatcaacttggagtgtataatgagatttcaaatggtaacatgatgaccaaccatgataagagcaaagaaagtttatcatgctttctgaccatggggaaatctaccaagagtttggagaaatctgatgatgttaagaaacaccagtttttgctttttggtcaaccaattctcactgagcaacaaatttctagctgttctggagatgtgttgtctcaccgaaaaagatcggtaagtgatgataaggacaaagcgaagtgccttatggatgactcgcaatctacactctcacagcagttttcaccaggaaaagcatcttctgctgagttctcttggcaacttggcttggatactggtcattgcaaagttttcttggagtcggaagatgtaggaaggaccctagacctatcgctgtttggttcttatgaagatctgtataggagacttgccatcatgtttgggattgaaaggtctgagattttgaaccatgtgctctaccatgatgcagctggtgctgctaagaaaaccggagaagaacccttcagtgacttcatgaagacagcaaaaagattgacaattctgacggattcaagcagcaaaaacattaaaagggcctttattacaggaactcgtaatggtgaacatggactagatgcatcaaacaaaacaggccctctgagcatatttgcttaaaatatgctatagatagcatctgagacattgttgagatctgagtagttgaaggacagtcctaactctatttacctctgcaaagactgaacatgagctgaatcttttatcatggttgttactattgtgtactaaaaacaatatctatcaaggttggcttagttgtttattagtgtacaaataatgatgccattatcatggtcaactgttattgtaatattaaccaagatttggacccc

SEQ ID NO: 12743 - DNA, 745 bp, Glycine max
  Clone ID: 701207952_FLI
tgaatttgaaatagccatcaccctctatttccaccctgatgtctgtgaaaaacagttggacttgtatcaccatttgaaattatatccagaagatgaatctggcccccagtctacgaagaaacctgtggttgttgaatcttataatgagattgtttttcctgaaccctcggagggttttctagcacgtgtacagaatcatcctgctgttaatgtgcctaggcttcctgctggtttgaatttaccaagtcctgtaccaattgatactgtgaatgataaggagagaggtgacaccaaagatcatcctctaacccaatggttcatgaacttctctgaggctgatgagctcttaaaacttgcagcagctcgccagcaggtgcaagctcatattgttaagctgcgaagacaattaagtttggtggaaggactacctcagctgtctaaaccgccctctggttatgaatgcacatgattcttatttttaaatcttttgggcttcccttttgggtcaaacttggaagattcattatgaacaagtatgtatatatgcgtatagtcatccttgtagattgtgttgcttatttttatctatggcagccaaaagattagaggtttgaactttgaagaatggacatgatcctgggcaaatactagttgtaacctgaggagtataatattttatctcaaacttatctaaatccctgttgctttaacagtttaatcatttaacaaccgaacttcgattatt

SEQ ID NO: 12744 - DNA, 1787 bp, Glycine max
  Clone ID: 701208018_FLI
caggaattctctggatcataaatcagatacaactggaagtagtattattgtagcaaagtgaacatttttccctcatgaaaatgtggcttggcaagaaaattatcttccttcaaactctgctttgtttttccatagttggaaccaattcccatggattgaaggaataccattttgttctgaaagaagctcattatagaagactctgcagctcaaaacccatattgacagtgaatggacaatttccagggccaactgttagagcctactatggtgaaacgatatatgtcaatgttcacaacaagggaaaatacaacatcaccttgcactggcatggagtgaaacaaccaaggaatccatggtcagatggccctgaatacatcacccagtgccccatcaaacctggtgggaaattcaggcagatgttgattttttctattgaggaaggaaccatatggtggcatgctcatagtgactgggcaagagccactgtccatggagctatctatatttatccaagaaagggtgaatcctacccttttcccacacctgatgaagaagtgcctattgtattaggagaatggtggaagagtgatgtcagcgatgtgtatgaggaatttctcagaaatggaggatccccaaatgaatctgatgctatcacaataaatggtcaacctggtgatctctatccttgctccaaatcagaaacattcaagttaaatgtgcactatggcaagacttatcatctgcgcatggtcaatgctgcaatgaatctcgttctcttttttgccgtttcaaagcacaatctcacagttgttggtgttgatagtgcctactctaagccattaacaagagattacatatgcatagctccaggacaaacagctgatgtattattgcatgccaaccaagagcctaatgactactacatggctgcaagggcatattcaagtgcacttggagttgcctttaataatggcataaccacagctaggatccactatcatgagaatcatgctccaaacaaatctccttcattaccttatctccctctttacaacgacacaaaagcagtttttgactactatgttagcattaagggcttaaatgaagcagacccctatcaagtccctacaaatatcaccactcatatgctaaccaccctttcaattaacacatttccatgccctgaaaaccaaacctgtgcaggaccaaatggaacacgtttagcttctagcgtgaacaacataagttttgaaaaccctaccattgacatactagaagcctattactaccacatcaaaggggtgtatcacaaggggttaccaaaatttcctcctttgaaatttgactttaatgcagagtatttgcctctagaacttcagataccaaagaaaggaaccaaggtggctgttattaaatttggttcaacagttgaacttgtttttcaagggacaaatttggttactgggatagaccatcctatgcatctgcatggcactagtttctttgctgttggatatgggtttgggaattttgataaacacaaggaccgcaagacatacaatctcattgatcctccccttatgaatacaatactagtgcccaagaatggttgggccagcataaggtatagggcttctaacccaggtatgtggcatgagaaaattgatctttttaaatgctattttttattttattgttttagtaggtaatttatgaactagcatgtaaagaatgttatgtaattagaaactattgtgtgggataaatttgttaacttttataat

SEQ ID NO: 12745 - DNA, 1515 bp, Glycine max; identical to SEQ ID NO: 8286
  Clone ID: 701208091_FLI

SEQ ID NO: 12746 - DNA, 1875 bp, Glycine max
  Clone ID: 701208171_FLI
agctaatgaaaagaagcgtccttttgttcttacgagagctggattttctggcagccaaaggtatgctgcaacatggactggagataatctttctacatgggagcatcttcacatgagtatctccatggtacttcagctgggacttagtggtcagccactttcaggtcctgatattggtggatttgctggaaatgcaacacctagactttttggaaggtggatgggtgtaggttccttgtttcctttttgccgagggcattctgaagctggcaccactgaccatgaaccctggtcttttggggaagagtgtgaagaagtttgccgattggcattgaagaggcgctaccgtctgatcccacttatttacactcttttttattttgctcatacaaggggcactccagtttcaacccctactttctttgctgatccaaaagatcccagtctgaggaaacttgaaaattcttttttgcttggtccagtcttagtgtatgcaagcaccttacgtagacaggggttggataagttggagattactttgcctaaggggatatggttgaattttgatttcaacgatgcacatccggatttgccagctttatacttaaaaggtggctcgattattcccgtgggcctccctcatcagcatgttggagaggctaatccttcagatgacttgactctttttgtggctttagatgaacatgggaaagctgaaggtgttctatttgaggatgatggtgatggatatgaattcactaaaggcagttatttattaacacattatgtggctgaacttaaatcatcagttgttacagtgagtgtccacaaaactgatggatcatgggaaagacctaaacgccgcttgcatattcaattattgctgggtgggggtgcaatgcttgatacatggggaactgatggagaagttctgcaactaattttgccttcggaagatgaggtgttgaagctagtatctactagtgagaagaattacaaggaccgtttggaaaatgcaactccaattcctgatgtagaagaggtttctggacccaagggaacagagctttcaagaactcccattgaactgaaaaatggtgagtggaatcttaaagttgttccctggattgggggtagaatcatgtccatgacacacattccttcaggaacacaatggctccatagtaggattgagataaatgggtatgaggagtatagtggtatggagtatcgttctgctgggtgttctgaggaatattctgtcattgatcgagaaccagggcttgtggtgttagagggtgatattggtgggggattggttcttaaacgtcatatctatgttccaaagaatgttcccaatgccatccagatagactctagtataatagcacgaagtgttggagctggttctggagggttctcaaggttggtttgcttaagagttcacccaacatttagtgttttgcatccatcagaatcttttgtttcatttacttcaatggatggatcgaagcatgaagtctttcctgatggtatggagcaattctttgaaggagacctcattcctaatggcgaatggaggctggttgataaatgtcttggcttggcactggtgaaccgatttagtgttagtgaggtattcaagtgtcttgttcactgggattgtggcactgtcaacctggagctttggtcccagagtaggcctgtttcagagcaatcccctctcagaatttcccatcagtacgaggttataggaatttcataataatttaactgatcatcaatgtatctagaatgttcgaaacagtgtagtgctgttacaaaacctgcacctaaaatctatgcataaaaatttcagtgttaaaaaaaaaaagg

SEQ ID NO: 12747 - DNA, 1636 bp, Glycine max
  Clone ID: 701208271_FLI
cgatcaaacaataataaccggtttttctcacttttctttttcttttgggctttcagtttcacataacaaaccgtttgcagaacatcccataaaagcttagcttgtattcagtttctcttctcccaacgtttttgtcgctagtaacagaatattacaaagtaacggctttctcagtggagcgcttgatttgggttggtgggtcaacttcaagtttcaatttttttttcatttttgtctggtcgattgagaaggctcagttgcagagacggtgggggtgggaaggttatggctttttgcccaattttttgttgcggaaatagttcggatcgcaaaggacgagggaagaaacaacctccatggcgggtgttttctttgaaggaattacactccgctacaaataatttcaactatgataacaagctcggcgaagggggattcggcagtgtgtactggggccagctctgggatggatcgcaaattgcagtgaaaagattgaaagtttggagcaacaaagcagacatggaatttgctgttgaagttgagatattggctagagtacgacacaagaatcttctcagtctacgtggctattgtgctgaaggtcaggaacggttaattgtttatgattatatgcctaatttgagcctgctctctcatcttcatggacagcactcagcagaatcccttcttgattggaaccggcggatgaatatcgcaattgggtctgctgagggaattggatatctccacaaccagtcaatgccacatatcatccacagagatatcaaggcaagcaacgtgttgttggattcggattttcaggcacaggttgctgattttggttttgccaagttgatccctgatggggcaacacatgtgactacgagagttaaaggcaccctaggctaccttgcaccagaatatgctatgttaggtaaagcaaatgagagttgtgatgtctacagttttggaattctccttctagaacttgctagtggcaaaaaaccacttgagaaacttagttctgcggtgaagcgatcaataaatgactgggcactgccattggcttgtgagaagaaattcagtgaactagcagatccaaaacttgagggtaactatgcggaggaagagcttaaaagagtagttttaactgctctcttatgtgttcagagtcagccagagaagagacccaccatacttgaggtggtagagctactgaagggagaatccaaagataagttagcccaactggaaaataatgaactctttaagaaccctccagctgtaggacatactgatgatgggaccgttgctgctgaaggcagttcagatttcatctcagaagacaaggaatcaaaacctgagttggaagagaatactgagccataaactctgcaaaagaaatggaactatggatttgatatgctatacagattgattgtgaacctgcaggattgctttttttgtattactatttttattacttgtgcagagaaagactgggtgcctattcattatagaagttgctgcatgcatgtttctacttgccacactatgaatgtggttatgaatcatgcagaattgctgaaagtctgaaactaggaatttgatgttaaatacagattgtgaagttttc

SEQ ID NO: 12748 - DNA, 592 bp, Glycine max
  Clone ID: 701208328_FLI
cacaagcaaatcctaaaaagttgattgagatatatagaaactagcttcaatttcacaaaatgaagaaagtgtttgtcacatttttagctgtgctagttgtatttgttcttacagcgaaagcttcagaggcacgactaccagttaaaacaaattcagcatcaaatgactacaattgttcacaagtctataacctgttagtttcgtgcgtagattacatgattggtggagatgatggtgccccttcaggtgtttgttgccaaagtgttaatgcagtgaaagcatcagcaccaacacaaattcaacgaatggctgcatgtaagtgctttttcgacgtagcaactcgccttccttccttgctcgaaaacaaggccaattcacttcctaaattatgtggtgttgatttgggttttatcatgagcaagcagaacaccaattgtaacaatgttcctgtaagctcaaggcaagggagagattagtacaataaaattgatgcatgtttggaagtttctttcttcttgaaaaaagaaaataaaatggtttgttgaatatacaagcgtttcatgttggaaataataatgagtggatattttct

SEQ ID NO: 12749 - DNA, 1501 bp, Glycine max
  Clone ID: 701208544_FLI
acgaaacaggcgttgggttgagaatagaggggcgcgtaagaataaattagagggaaagggggggttgacacttccattttacgaaactcaattaacgtgaaatcaggtctacgaaaatcaccttttggacacctgatttcagttctttttcttctcaataattattatttgtatttgtaaacacacactatcaaagcaaatggggtgctcattctccgggttgaacgcactttacgactccgtgaacggcggaggtgatgtttggatcaacgagaaccgtttccgcatcgtgcgccagctcggagaaggtggcttcgcctacgtctacctcgtcaaggaggctcccgacgactccgccgccgctggcctcgccaagaagctcaaaggctcctctcatctctccgatgatggaacttatgctatgaaaaaggtcctcattcagaacaatgaacagctggagttggtcagggaggagatccgtgtttcatcactgttcaatcatcccaatctgctcccgcttcttgagcatgcaatcatttctgtcaagcctacccatgaaacatcttggaaccatgaagcatatttattgtttccagttcatttggatggaacattgctagacaatgccaaaataatgaaagccaagaaagaattctattccacctcagatgtgcttcaaatatttcgtcagctttgtgcaggactcaagcacatgcacagttttgatcctccttatgcacataatgatgtcaaacctggtaatgttctcataacacacagaaaaggacaaccacctcttgccatactgatggattttggcagtgctcgtcctgcaaggaagcaaattagctccaggtcagaggcccttcagttgcaggaatgggcatctgaacattgctctgctcctttccgagctcctgagctgtgggattgcccaagccaagctgatatagatgagaggactgacatttggtcgctaggatgcacattatatgcaataatgtatggggtatctccatttgaatatgcacttggagagtctggtggaagcctgcaattggctattgtaaatgcacaggtcaaatggccagcaggacccaagcctccatatccagaagctcttcatcagttcgtgtcatggatgcttcagccaacggcttccatgcggcccaggatagatgatatcattatccatgttgacaagttagttgcgaagttctctcaatgagttactatggaagtgagaagtggggcttgagatttttatgttgcagtcgtttaaaaaaattcgtgtgcatttgccgtccagttatatgttaatggatagaaaagcaatagcaattcctcgcctgacggagttaaccatatatttatatgtatcttcgattttggtggtagtctaggtagtcgggcgttggctttaaagtattgtttgtcatttctacataattttgtttcttgtaatttatgaaatggccaatctccctgtgtcttcagaatt

SEQ ID NO: 12750 - DNA, 602 bp, Glycine max
  Clone ID: 701208549_FLI
gggaagttcaatatggctttgctccctctcatcttgaaagcagctttgtcataaggttggtgtgaagagagaaagagaggaagagagtgaaaggaagaacaactatgagaaaagtgagtttaacaacaatagtaatagtaataagcatgtgaagaaagaagagtgccctttgactccatcatgttggaaaggcttttgggacactgatgttatgggaacaatctttagtgtgcctcctttgtcaccactatctccactaatggttgtttgagattttgtggaacttttgctctttcaatgatgttttgaggtaaccaaactaaggggagagagagagatgatgctggtgattgtcctctctgatttaggttgctaatttgcctaaatcaaaatggtagtactaattaatctactaatagattaatttgcaagtgaatatatatatggatttgtataatgtaaatataggatagtactatgaagcaagatctttttgtttgttgaaaaaaaaaacaaaaaacccatgcttatcttcttcctttaggtaaaaaaatgtactgtacttgaagcaatattgaaatttgtttattcgtttattggag

SEQ ID NO: 12751 - DNA, 1406 bp, Glycine max
  Clone ID: 701208643_FLI
tttctctctcgttttttctcaaaaagttgcaagagttaaagcaaaaaccaaagtgagagagaaaatgatgaagccatcgatgctcagatctcttcactctgccgccacccgcggcgcctcccacctctcccgccgtggctacgcctccgagccggtgccggagcgcaaggtggccgttctaggtgccgccggcgggatcgggcaacccctctcccttctcatgaagctcaaccccctcgtttccagcctctccctctacgatatcgccggaactcccggtgtcgccgccgatgtcagccacatcaacaccggatctgaggtagtggggtaccaaggtgacgaagagctcggaaaagctttggagggtgcagatgttgttataattcctgctggtgtgcccagaaagcctggaatgactcgtgatgatctttttaacatcaatgctggcattgttaagacactgtgtactgctattgctaagtactgccctcatgcccttgttaacatgataagcaatcctgtgaactccactgttcctattgctgctgaagttttcaagaaggcaggaacgtatgatgagaagagattgtttggtgttaccacccttgatgttgttagggcaaaaactttctatgctgggaaagccaatgttccagttgctggtgttaatgtacctgttgtgggtggccatgcaggcattactattctgccattattttctcaagccacaccaaaagccaatcttgatgatgatgtcattaaggctcttacaaagaggacacaagatggaggaacagaagttgtagaagctaaggctggaaagggttctgcaactttgtcaatggcctatgctggtgccctatttgctgatgcttgccttaagggcctcaatggagtcccagatgttgtggagtgctcattcgtgcaatccactgttactgaacttccctactttgcttccaaggtgaggcttgggaagaatggagtggaggaagttctgggcttaggacctctctcagattttgagcaacaaggcctcgaaagccttaagcctgaactcaaatcatcaattgagaagggaatcaaatttgccaaccagtaattgaacatgttatcacatacgtgtctggtaggctaatgttaatgttattccttcaagaaccaaatcaaattttgcaatctcagaaccattgttgtattgttgccggcagtggtgtggcgactttgttgttttatttagagtaggtatacgccatgatttaataatttaagtctgagagctttttgttgctaaagagattcaacgatcttataaccgggtttaggttttggccattccattaataatggtcccttttaactgtgtatggtttcacgtaatgtaattgcagggtgttgtacccttc

SEQ ID NO: 12752 - DNA, 425 bp, Glycine max
  Clone ID: 701208747_FLI
tgagtcagtcatccttgctaaatttattgaagccgtgcagagctgtcccgatccaagctcccaagctgctctgaagctcgtctgtgatctttatgctctggatagaatatggaatgacattggaacctaccgaaatgttgactatgtggctcccaacaaagccaaggcaatccacaagctcgcggagtatcttagtttccaagtgaggaatattgcaagggaacttgttgatgcatttgatcttccggatcacgttacacgggcccccattgccaagcggtcaggggcctactcgcagtacacacaatatgtgggattttaaaaaaaggaacgcaaagaagattgatgtatttgcgggaattaacatgagaaaatattttcttggctcattgttgaaatttatatgctagtggttgctcctgacc

SEQ ID NO: 12753 - DNA, 1173 bp, Glycine max
  Clone ID: 701208795_FLI
agagatggcaccaacacaccttcgaggaggcctgaacatgatgtttcaagttgcaaccacttttgggattttcacagctaacatgatcaattttggaacacaaaagatcaagccttggggttggaggctgtccctaggcttggctgcagtaccagctcttttgatgactgtgggagggatatttcttcctgacactccaaatagcttaattgaacgaggattggcggaaaaaggaaggaagctgctggagaaaatccgaggaaccaaggaagttgatgcagagttccaagatatggttgatgcaagcgagttggcaaagtccataaagcacccatttcgtaacatccttgaaagaaggtacaggccagagttggtgatggcaatcttcatgcctacctttcagatcctgactggcataaattccattctcttctatgctccagtgctgtttcaaagcatgggatttggaggagatgcatcactcatctcttcagctttaaccggtggagttcttgctagttcaacgttcatttccatagcaacagtagataggttgggcaggagagttcttcttgtcagtggtggactacaaatgatcacatgccaaatcatagtggccattattctaggggtcaagtttggagcagaccaagaattgtcaaaagggttttcaattttggtggttgtggtgatttgcctatttgttgttgcttttgggtggtcatggggtccacttgggtggacagtccctagtgagatatttccattggaaatccggtcagcagggcagggcatcacagttgctgtaaaccttctcttcactttcataattgctcaggcctttcttgctcttctctgctcattcaagtttgggatctttctcttctttgctggctggatcaccatcatgaccatatttgtttacctgttcttacctgaaaccaaagggattcccattgaggagatgtcatttatgtggaggaggcactggttctggaaaaggatttgcctcccaacagatggtagtatctgaattacccatgctaatgatgtcatgaagtaaagtccaaaatttataacttatgcatccaactcaaccagttgaacttagttaagttttgtgtatctgttaagttgagaataatggataaataattacataattattagatc

SEQ ID NO: 12754 - DNA, 958 bp, Glycine max
  Clone ID: 701209105_FLI
gttgaggtgcctaagaagaagaacaatatcatgttcttgggtgatgggaggaccaacactatcatcactgctagcagaaatgttgttgatggtagcaccaccttccactctgccaccgtcgctgtggtgggttcaaatttcttggcccgggacttaacattccaaaacacagcgggcccatcaaagcaccaagctgtggccctaagggttggtggggacctctcagcattcttcaattgtgacatcctagcattccaagacaccctttatgtccacaacaatcgccaattctttgtgaagtgcctaattgctggcacagtggatttcatctttggcaactctgcagtggtgttccaagactgtgacatccacgccaggcttcctagctcgggccagaagaacatggtcacggcccaaggaagagttgaccctaaccaaaacactggcattgtgatccagaagtgtaggattggtgccactaatgacttggagtctgtgaagaagaatttcaagacatatctagggaggccttggaaggagtactctaggactgtgatcatgcaaagtagtataagtgatgtgattgacccaattgggtggcatgagtggagtgggaattttggattgagcactttggtttatagggagtatcagaacactgggcctggtgctggtacttctaatagggtcacttggaaagggtataaggtcatcactgatactgctgaggccagggaatatacccctggaagcttcattgggggctctagctggttgggctcaactgggtttcctttctctcttgggttgtaaattatgttcaacttttgagcattataattgttacctattattgttatgttttttattagcaaaagggctgaagcccaagctagaaccctctacagaaaggcactccctagagaaacaaagttgaccaaaaaatttaaaagaaaac

SEQ ID NO: 12755 - DNA, 1242 bp, Glycine max
  Clone ID: 701209411_FLI
ctgtgagctggtctatatccaagactctgtgagctggaggatagggtttgggataccaactgtgtgcatgctatgctccataataatgttctttgtgggcacaagggtctacgtgcatgtaaagcctgaaggaagcattttttctggtattgctcaagttttagtgactgcatataaaaagagaaaactcaaccttccaatgagtgaggagaagccagatggagttttttatgatcccccactaattgggatcacagttgtgtcaaagctgcctttaaccaaagaattcagggccttgaataaagctgcattaataatggagggtgagctaaacccagatgggaccagagtaaatcaatggagacttgtcagcatccaacaagtagaagaggttaaatgcttagcaagaattatcccaatttgggcagcagggattcttagtctcatttccatgactcaacaaggaacatttactgtgtcacaagcaatgaaaatgaatagacaccttggagccaaattccaaatcccagctggttctgttagtgtcatatcactaatcaccatagctttatggcttccattctatgaccgaatcctagtgccaaaactcagaaaaatgactaagcatgaaggtggtatcactctcctcctaagaattggaattggcatggtgttctctattctatctatggttgttgctggctacgttgaaaaagtgagaagggattcagcaaattcaaatccaactccactaggaattgctccaatgtcagtgttgtggctagccccacacttgatccttatgggtctatgtgaggccttcaatattataggacaaattgagttcttcaacaggcaatttcctgagcatatgagaagcattggtaattccttcttctcgtgttcttttggtgtgtctagctatgtgagtagcataatagtcaacatagttcatcattctacaagaacacatagccatccggattggttaacagatgatataaatgctgggaggctagactacttttactacctaatagctgggttaacttccctcaacctagttttttttatatatgttgcaagaagatatcagtacaagggaaatgtggacctccttgatgaaactcatcaggtagagcttggatctcacaaagcctaaatttaaagagatttatataaagattatgttgctatatatgtacgaagactttatagataaatgaaagtgttttttttttc

SEQ ID NO: 12756 - DNA, 705 bp, Glycine max
  Clone ID: 701209443_FLI
atacactgtgaatggaccatcaacctccaccgtgccccgccgccgcctccgcaacggacaaccctcgtggcggaacgcgccaccccatgtaccgcggcgtccgcaagcgccggtggggcaaatgggtctccgaaatccgggagccacggaagaagaaccgcatatggttggggtcgtttccggtgccggagatggcggcacgagcatacgacgtcgcagcctactgcctcaaaggccggaaggcgcagctcaactttcccgacgacgtcgactccctgccgcttccgtcgtcccgcacggcaagagacattcagaccgccgcggcccaggcggcgcgtatgatgaaagcttccggcaatgatgagaaaagcggcattgcctccgacgacggcgatagcggttgcgatgatttttggggcgagattgagttgccagagctgatggacggcgagtgctgctggggttgtccggccggcgcttcctcctggacttcctccggcgatctcgccgagtggccggaggaggagctttcgccgcagcaaccgtcgtttatggcatgtctataatctactgtatctctgtattaatgctgcatgttcagttgtcgttggtatgtttcttgtattatatatcctattcctaatgttatatcctatgtgccaactgttcctgttgtcataaataatattaatagttattatcagt

SEQ ID NO: 12757 - DNA, 1459 bp, Glycine max
  Clone ID: 701209450_FLI
cccccatcaagatttcatcatcctcttcttccatgaaacaattcaattgctctaagaaaccaaaactgatttaaccttaatttcccaacctacacagttcactccctctctctctgtctttctttctttctctatgttctctcaatggtgccgccaccagagaacatggcaacaccaaaagaccaagatgccacacaaggccgaaaaatcaccaccacaacaacaaggccagcgccggaacaaggcgtaaagtgcccgcgatgcgactcatccaacacaaagttctgctactacaacaactacagcctcacccagcccaggcacttctgcaagacctgcagaaggtactggaccaacggcggagccttgcgcagcgtcccgataggcggcggctgcaggaagaacaaaagggccgtcgtcaagccctcttcctcttcgtcatcttcatcaccaagactttcaacctcggcgcgttgcccttcccctcgaggctcaacacaaaccaccacattccaacaatcataaacacagggttgttcaacaacaaccagttgtcgcctttcctggacgttaaatcagctttgtttcaacttgacgctcctccagctgctctgtcaaactccttgatgggcattgccccgcccagcgcccagaacaacaacttctgggcgctgggtcggtctcaaagctcgacactgtctgatccattaaacagtacaatgcagtccatgcagcaatctctgaatgttcatagcagccttgcttcttcaattgagtcactgagctgcgtcaaccgggacttgcacctgaagatgcagcagcagcgttacgcgacaatgatgtccggtggggacacccaccacaagggtgatgaaaacagtggcgtttcgtttcctcaaacggttaatgggttcgagaatcaaaaactggtgatgaaccccgttatgtttcagaagccagtagagagcttgccagccggcagtgccgtaacagaaggcccaagtggggcttcagttacaacagtggcaccacccaccgaatggttctttgggaattcttcttttccctcaacaggtaatggtggtggcaatggcaacaacaacattaacattaatattaatgatgcaaacaacaattggagtgatgcccttgcttgggggaattttcagcagcagcaacaacaatacagtgctttgccctagatttgactaaaaaaggagaattaagagagaggaattagatatcgaggtagagatagctagtttttcttaatcttggaaggaaaaaaatggaagaaattataattattaactaggacaaatctataattgtctaaaccccttttaattaggtctatgttaattacttaattagttagtttcttgttttatgttatgttcgaatgttcaaatgttcaaattgtgatatatatatatatatagaaaggatatttaaagat

SEQ ID NO: 12758 - DNA, 1050 bp, Glycine max
  Clone ID: 701209467_FLI
gaagatccatagctaataagctaggttcagtagttagtgagtgatcgatatctggagatgggtcgaggcaagattgagataaagttgattgagaaccccaccaacaggcaagtcacttactccaagcgaaggaatggtatcttcaagaaagctcatgaactcagtgttctctgtgatgccaaggtttcacttatcatgttctctaaaaacaacaagatgcatgaatacattagccctggcctcacgacaaaaaggatcattgatcagtatcagaagactttgggggatattgatctgtggcgttctcactatgagaaaatgcttgaaaacttgaagaagctgatagatattaacaacaagctcagaagacagatcaggcataggataggtgagggtttggacatggacgacatgagcttccagcaactgcgcactcttgaagaggatttggtttcttccatagggaaaatacgagaacgaaagttccacgtgatcaaaacacggactgatacctgcaggaaaaaggttaaaagcctggagcagatgaatagagatctgctgtttgaacttgaaaagtgtgcgatccatccacaatttattttgcacgatgaaggagacgaggaatcagcagttgcactggccaacggcgcctccaccctgtatgcgttctgtcatcagcaccattctcatctgaaccttccctcccaccattctcacggagaagaaccctttaaaactgatgaccttcgccttgcttaattgagtgcaacaattaactagcaatgtaaattaactagctagcaagcaagcactaagcacttgttaattatgctttgtattatcctatattggacctgttaaacttaaacgcaacgttgcttccaacctctctagtctctatccagatcgagaattagctgaagcttatatatattatgtagtatttggcaagagtgtggtatgaaaaacagaaagactgtattttatttgttattataagtttacattgagtggttatgtaatattaattgcttggtacgttgcttcagt

SEQ ID NO: 12759 - DNA, 641 bp, Glycine max
  Clone ID: 701209511_FLI
gaaaggcgatggacctcggaacctatgaagtgccagaaggagtggacattctaggaagatacgatgcagagtttgcaaaaatcctcacaaaagacgctttgaaattcgttgctgagctgcaacgtgagttcaggagcgatatcaagcatgcattagagaagctaccagggcacaagaagacagaggaggccacagctactactcctcctccaccaccacctgttgcatcattggagcatggtgaaggtgctcatcatgaaggagaggccaaggagaagaaaggtatattagaaaagataaaagagaagcttcctggttatcactccaagacagaggaggaaaaggaaaaggaaaaggagagtggtgctcattgatatttaagattgagacaaggcttttttgttggttggagatgcatgattgtggtgtgctttgttttcatttcatcatatgacagccttgtgggtttctttggtgtttcttgatgcatacttaatttactttattattgtgtatttatctcttccatttacaaaaaaaaaagtttgtgtaggtttccttctttgaagtaaaaagaaattaaatatgtactgaaaatggaataatagtgtgttttatttgtgttttataatttctttttt

SEQ ID NO: 12760 - DNA, 1528 bp, Glycine max
  Clone ID: 701209670_FLI
gaactcgtctccgtcttcttcccagttaccttcatcaagcgctgattttgacaagtttaatagtttgccgcgcttccgcccacttgaatgcttgcaagggaacccggttccggcgttcctgtccaagactttcgaactcgtcgacgatccctcgctggatccgatcatatcctggggctccaccggtgttagcttcgtggtgtgggatcctaccctgtttgcaagacacgtcttgccgaggaatttcaagcataacaatttctccagttttgttcgccagttaaatacctatggattccgcaagattgacactgaaaaatgggagtttttcaatgaagctttccagcgaggaaagagacatcttctgaagaacatccggaggcgcgggccacctcagtcccatcaggttggtggcaatattgtgccttattccgatgcagataaggccgggcttgaatttgagctagaaagtctaaggaaagaaaggagtgtgctaatgcaagaggtggttgagttgcaacaacagcagagaacgacacttcaacgtgcgagacaggtgaatcagaggcttcaatctgcagaactgatacagaaacaaatggtttctttcttggcaaggttatttgaaaagccagcatttttaaccagtctccagcatgcgaaggaacaaagagatttagggtgtcctaaagttagaaggagatttatcaagcagcaccaaggccaaacagaaatatcagattttttaaatgaagggcagattgtaagataccaacctgattggagaaatgtaaccacctcttctgaaatacaagaaatgtatccagtttcacttgaagagtctccaaattacctttctcaggctttggcaaaagaatttagtgaaggcacagagaatctgatatcagatgaagtcatgtcaattgctgacaccatggggtttaagtcatcaagctttggacttgatggtaaccttttcaaagggaaaaatgtcatgagctcaaacgaaggtcttcttgcagaggagtttgtgtctttcccagaggatttgaccaaggagacaggatttccagagttttcacctcttggaactgaaggcatcatcaagcgagaagataaacggaacaccaactttgatgttagtggtgctgattcaagctctgggaatgaacagtggggaaatcctatcaattatgaagtgccagaatttgtagtcacaagtggtatgacagacatgtgggatattaactatttaactcacagcaagtgacagaaagtatcccaactgatgattcaacacttgatgaaaaagaaagataatataaataagaatatggatgcatcgggcttcatctgcttctgcacatattgtgctgtgtttagttcccaggggtccaattattaaataaattgatttgtaactggtgctcattcactaatcaccaggtttcattcttttagattagttgtgtagttgttcatgctagtagttatgaaccaaattcttaatttaaatatgttaagattt

SEQ ID NO: 12761 - DNA, 2744 bp, Glycine max
  Clone ID: 701209742_FLI
ttcacaattacaattcacataacgaaacaaagttagttactgtttctgctgcttttcgattcctgagaatgtttcagaacatcatgaacgctttcaccaccaccggagacgacgacaacgggccagggcaccgagtgaaagggacggtggtgctgatgaagaagaatgtgttggacttcaacgatttcagtgcttcgtttcttgatcgtcttcatgagtttgtggggaaacgagtttctcttcagctcgtaagttctgtcaacgttgaccctgggaatggcaatgggttgaaggggaaacttgggaagcctgcttatctagaagactggatcacaacaatagcacctttgacagcaggagaagcagcattcaaggtcacatttgagtgggatgaggagataggaacaccaggagcatttataataaggaacaatcatcatagtgagttctacctcaaaagcctgacactagaagatgttccaggccaaggtgtcattcgctttatctgcaactcttgggtataccctgctgataaatatgaaaaggatcgcattttcttctccaacaagacataccttccaagtgaaacaccaatgccactacttaagtacagagaagaagagttggagaatttaagaggtaatgggaagggtcagctccaagagtgggacagggtctatgattatgctctctacaatgatttgggaaatccggataagggtccacaacatgctcgtcctactctaggagggtctaaggattacccctaccctcgtaggggaagaactagtagaccaccggccaaatcagatcctaaatgtgagagtaggctgaatattgcctcgagcttagacatctatgttccaagggatgaaagatttggtcacttgaaaatggcggattttcttgcctatgcactgaaatccatagttcaagttctcaaaccggagtttgaatctctattcgacagcacccctaatgagtttgacaaatttgaagatgtacttaaactctatgaaggtgggattgaggtgcctgagggtatacttacggaagttagggataacatccctgcagagatgcttaaggaaattttccgatctgacgggcaaaggcttctcaaatttccggtgcctcaagtgattgcagtggataaatcggcatggcaaactgatgaagaatttggtagggagttgctggctggtataaaccctgttgtaattcgtggtctccaagagttcccaccagcaagcaagctagatcccaaaatctacggtaatcaaactagcacaataaccaaagaacacatcgaaagtaacctggaagggttcacagtagatgaggcaattaaagaaaggaggttgttcattttagatctccacgatgcattgataccatacgtgaagaggataaactctacttctacaaagatgtatgcaagcaggacaattctgttcttgcaagatagtgggactttgaagccactagccattgagttgagtttgcctcatcctgagggagatcaatatggtgcaataagtaaagtttacacgcccgtggaacaaggcattgaaaactccttctggcaactggccaaagcttatgtagtggtagctgactcaggctatcatcaacttatcagccactggttgcatactcatgcagtcattgagccaattattttagctacaaataggcaccttagtgtgcttcaccctattcataagctattgcatcctcactttcgtgacaccatgaatataaatgcactcggacgacagattctcattaatgcaggtggtgctttagagttaacagtttgtccatctaagtattctatggagttttcatctgtgctttacaaggactgggttttccctgagcaggcactgcctgaagaccttgtcaagagaggagtggctgttaaggactcaacttccccgtatggccttcgattattgattgaggattacccttttgcagttgatgggctagagatttggtttgctatcaaaacatgggttaaggactactgctccttttactacaaggaggatgacactatcaagaaagatactgaacttcaatcttggtggaaggaaataagggaggtgggtcatggtgacaagaaagatgagccttggtggccaaagatgcagacatgtgaagagctgattcagacttgcactattatcatatggattgcctcagctctccatgctgcaatcaactttggacaatatccatatggaggcttcccaccgagtcgtccggctataagccggcgattcatgccagaaaaaggaactccagaatacgatgaacttgtggcgaatcctgataaggcttatctgaaaacagttacttcacagtttctggctgttcttggcatttcacttgtagagatcttgtccaaacattctagtgatgaggtctaccttgggcagagagacactccagattggacatctgatgctgagccattgcaagcctttgagaagtttggcaaaaaacttgctgatattgaggaaaggatcttgagaatgaatagtgatgagaaattcagaaaccggtatggtccagttaagatgccatacaccttgctttatccttctagtaaaggtggactaactggcatgggggttcctaacagtatctcaatttaatttaaagggggctgtaaccagagtcttgtctttagttgtatcaaataataatggccttaaaggaccttggttattttg

SEQ ID NO: 12762 - DNA, 807 bp, Glycine max
  Clone ID: 701209756_FLI
atgggtgtcgcattctccgcaaaggttgtggtgaggattgtgccataaggccatgcctcgagtggatcaacactcctcaggcccaagccaacgctaccctcttccttgccaaattctatggtcgtgctggcttggtcaacctcatcgattctgccccacaacacaatggacctgctgtattcaagtcactattgtatgaggcatgtgggagaattgcgaatccgacatttgggtcagtgggcttgttttggaccggtgagtgggcccaatgccaagctgccgttgatgctgtgctagctgggtcccagatcaaggtcgtgggagcttccgattcgcaggggattgcgacacatggcgacgagcatgttgcccaaatccttggcattcgccacgtgtccaaagatgctgaaatggaccatgtgaaaggaagagccaagaagatcaagagatctaggacagtgatcaagccaaagccacaagtgagttcaattgactcggctgcgatgttgaagctgacttggagccgtgagccaggaaggtccgagggtgatagtgaggaaactgtggaagctatgttggtgagccaaaacaagccgagtcgtaatggtggagttgagatggatttggatctcactctcggctaggcttctactgttagtgaagtgttgctaccaaatcaatttagtaatagaaaatagcgttgtttttaatattttgttttatattttactcaaaaagtattttgttttattcggcatttgtatgtttttcttccgtgaaacaggatcattgggcatagccaaatgt

SEQ ID NO: 12763 - DNA, 1107 bp, Glycine max
  Clone ID: 701209890_FLI
ggaaaggtggccctgagaatgctacttgcacctacaaaggtgtgaggcaaagaacctggggaaaatgggttgctgaaatacgtgaacccaaccgtggtgcaaggctctggcttggaacctttgacaccgctcgtgaggctgctttggcctatgatgctgctgccagaaagctttatggacctgatgcaaaactcaacctcccagaactctctgtgccttatgctgctggagtgatgaatccttctcacatgcaacaacagcaacagcaacagcaacaacctcaggttccccaaatgatgatgcaacaacaacagcctctcgtgcaccctacctttgaccttgtcaatgtcactcctcattctgatttcaacaacaacagcatcaacatcctcaacaacaaccccgtggtctcttccatggcttcttcttttcttgcagatgcagcagcacccgtgtataccagctgcgactctattgtctctcttccgttgtctgcaaccaattacaccaccaacaacacggtgccgatggaaatggacggctactactattcctccatcgctgtggagagcaaggaggacgacatgtttcgccccttctggggtccaacaatggacgacaccatgcctgtgtctgatgagtccatctggactgaagctgctatgtctcttgattatcctattgttggaggaggaggcgggttcgtaacaaccgaaaatctctttggagaagctactgcgtggactccctgcaaactccttctttctgcatgtaaattgtcatcggatgaaagagacagacagtatagcaataaagtattatgtctgtgatagtgaatatcttacatcatcatctggattatcacctttcatcatctcctggacagtctttgatatatacataaaagagatatgtgtatatataaaagtgtgtacaaaactatggggattaattgggggtgtcaagtatatagatttatgattagccagtatatatattacttagatgataatatatatttacatcttatagttaaaaactttgtctggaggacgtcgtggagtagcatggcatggatcatctattgtattgctagaatattattat

SEQ ID NO: 12764 - DNA, 1206 bp, Glycine max
  Clone ID: 701209913_FLI
ctttctttctttggaagataaagaatgggttctaagtccgaaaccgtttgcgttactggggcttctggttacatcggatcatggcttgtcatgagactcatcgagcgtggctataccgttcgagccaccgtactcgacccagctgatatgagggaggtgaagcatttgctggatctgccaggtgcagagagcaagctgtctctgtggaaggcagaacttacagaagagggaagctttgatgaagccattaaagggtgcacaggtgttttccacttggccacccccgttgactttaagtccaaagacccagagaatgaaatgataaagcctacaattcaaggagtactaaacatcatgaaagcatgcctgaaggcaaaaactgtccgaaggctagtattcacgtcctcagccggaactaccaacattactgagcaccaaaagcctatcattgacgaaacctgctggactgatgttgagttctgccggagattaaatatgactggttggatgtatttcgtttctaaaacacttgcggagaaagaagcttggaaatttgcgaaagagcacggcatggacttcatcgctatccttccagctcttgtcattggtccctttctactgccaacaataccttctagcgtgatcagtgctctttcacctattaacggaattgaggcacattattcaatcataaagcaagctcaattcgtccacatagaagatatctgtcttgctcacacatttctgtttgaacagccaaaagcagaagggaggtatatatgcagtgcatgtgacgttactatccatgacattgtaaaattaattaacgaaaaatacccagagtacaaggttcccaccaagtttcagaacattccagatcaattggagcccgtgagattttcttccaagaaaatcacagacttgggattccaatttaaatacagcttagaggatatgtacactggagcaattgatacatgcatagagaaagggcttcttcctaaacctgcagaaattccagcgaatggcatcgagcataaataaatataggttttcatatctttgcctcggtgatggctatgaatgttgcttttcttgttcagtttctttaatgatgtttccgttttgtgaattcgtagtcaaaattgtaagtggtttgtaagaccaaattagttatctacaaattgtttaatattatcacaggac

SEQ ID NO: 12765 - DNA, 1588 bp, Glycine max
  Clone ID: 701209925_FLI
acttcacgctgacacacactacacaaacccctaaccttccttccttccattcactactactccttcactttacttcaaaatttcacccttccaaatccccaacttttacaattttactattagaatttacaatctctctttctcttcctcaatccaatccaatccaatcccctctcaatcgaagcaagaaaaccatgtatttatcggagaagcctcgtcccatcgatttctacaaggaggaaggcgcgcgcgacatgatgatcgaggtcgtctccaacggcgacctccctcctccgccgccgccgccgccgatgattctcggcgagagcagcggcgaggaccccgaggtcgagatcaaggccccgaagaagcgcgccgagacctgggtccaggacgagacgcgctctctcattggccttcgcgcgagatggacgcgctcttcaacacctccaagtccaacaagcacctgtgggagcagatatcggcgaagatgagggagaaaggtttcgatcgttctccaaccatgtgcaccgataagtggcgcaacctcttgaaggagttcaagaaggccaagcaccaggaccgagggagtggttccgccaagatgtcgtattacaaggagattgacgagatcctcagagagaggagcaagaatgtgcagtataaaagccctactcctccgcccaaggttgattcctttatgcagtttgctgataaaggtattgacgataccagtatctcttttgggcctgttgaagctactggaagaccaacactgaatcttgagagaagtttggatcatgatggacatcctcttgccattaccacagctgatgctgttgcagcaagtggagtccctccttggaattggagagagactcctggaaacggtggagaaagtcagtcatgttgtggaagggttatatcagttaaatggggtgattatacaaggcgaataggtattgatggcaccccagaagccattaaagaagcaattagggctgcttttaggttgagaactaaacgtacattttggttggaggatgaagatcagattatcagaagtattgaccgtgaaatgcctttaggaaattacactcttcacattgatgaaggaatggccattaaattacctctctatgatgagcctgaccatatacctgtgcatactgaagataagatattttacactgaagacgatttccgtgattttctgacccgccggggttggatatgtctaagagaatttgacagctacagaaatattgacaacatggatgatcttcgacctggtgccatatatcgtggtgtgagttgaaagcaggtacatggtgtggtcaatgttcagctaccataaaatgtctggagaactgtggtggggactgttcagatctttgatgtatgtgcggcactaacctggaattgtatttgttttaagttttgataatgctgtttatagttttatataggaaaaggaactagtccctttgcacaaattccgttccaatcattggccttaacatgtctgtaaatatgcatttgcagtgagaacatattgtctaattttatagtggatcattttcatcac

SEQ ID NO: 12766 - DNA, 1133 bp, Glycine max
  Clone ID: 701209941_FLI
atggactacacctacgacaccaagcatcgcacaatggaacctcatgggataaggggtgtaatggacttggagcatcaaattcactacctggaaactgaggcttatagttctattttgaaggctttcattgctcaatctgatcttcttacttggggcaaagaggggcttatgactgagctgcgaaaggaactaaatgttacagatattgaacatggagaaatcctactgaaaataaattcagaccagttaattaagcagataagggagcagaggaaattggcatctcaagctaaggattatattaaacctagtgctcctgattgtgtttgtgcttcgatgggaaattcagtgataagaatgaaaactccttcctctgctgcattttatactcagaagaaaatgtcacactgccaagcttctctaatttccactcccattccttctccaatgcctccaaaatttaatgatgatccattgaatgctgagtttgcccacggaaatgtgcagcaatctatggaaatgttaaattgtaatgttcagttaccacctgttggaggaggaagaggactgaaaggaaagtatccattgcagaaggatttacacagatctcaccttgtcaagttaaagaaaagatctgatttaattcagcttcgtgcaacagatagggttatccacgatgttaagaagatgcttttcagtagagggaaacctgacccagttgatattgagagagcaaaaaggactcttacggaacaagaaatagctataactgaagcacttggtaaagtggctaatgtgttagagaggggtgatgcacctaatcagatgcaacgttatgaactctctaagaatactcctggaggacaagaaatgatgatacatgctaatttccgtgaactaattggtaatggtaggttgaataaacatggggttcattctgatctgtgcagttagggtgatgatttcatggcatagatatggagcttttaactctgatgaggctatacaacttatatagtgatattgctggattggtttagtgaacagtttacttgtttaggattaactagtagctaaccgatgtgaaatgaacactttaatgtggcttatttcagcacgtgccaaattatact

SEQ ID NO: 12767 - DNA, 1005 bp, Glycine max
  Clone ID: 701210052_FLI
cttaatttctctctgccttgctcatttacacacctctccaacctttcactttcagctttatttgaatccctctctctcctttccaaatggccagcgttgaggttgcacatcaaacaccaacaacagttccagaaaatgaaacaaccgaggtaatcaagacccaggaaacaaccccggaaccagtaccagccactgaggctcctgcaacagaacaagcagcagctgaggttcctgctcaagaagaacaacaagcaactgaggttcctgccccagaatcaaccaccgaagcaccaaaggaagaaaccaccgaagcaccaacaacagaaacagtagaaacaacaactacagaagaagccaagccagaggagcctaaagaagttgcagttgagaccgaggaggtggtgacaaaggagacagaggaagagaagccagcagcagaagagaaatcagaggagaaaactgaagaagtgaaagaagaagcagaagagcctaaagaaactactgaaacagaaacagaatcagcaccagcagcaaccacagaggaagagaacaaaccagctgagacagtggaagccccagtagaggttcctgttgagaaaactgaagcttagacttatggacagtgtgagtgagaaaaacaagtttaaaaatggtcctagttgtggggatcattaggtctaccattttgcatgtcatgttgaaaagcttttttttttatttatttctttagtttactttattattaatatattattattatatgatggttaagtctttggttgtattatggagggtatacctacgtgtgagcacaacacttggctccacatcagcgtgcttaccacgtggtgacatgagaaattctaggagttgtgtattgaagtgagcaagctgctgctggtgctggagtttagggatgagggtttattttattggcagggttacatgagtttgtgatgatgtgttattgtgtttctttaggtttgaataaatgatatttacttt

SEQ ID NO: 12768 - DNA, 1297 bp, Glycine max
  Clone ID: 701210095_FLI
agaacaccgagggatccagatctgcgacgaacggggtgctgcctctggcgcgcaaggtggcattgattaccggaattaccggccaagacggttcgtacctgacggaattccttctagacaagggttacgaggtgcacggtctgatccgtcgctcctcgaacttcaacacgcagcgcatcgaccacatctatgtggatccccacaacgcccacaaggcccgcatgaagctccactacgccgatctctccgacgcctcctccctccgccgctggctcgacaccatcctccccgacgaggtctacaacctcgccgctcagtctcacgtcgccgtctccttcgagatacccgactacaccgccgacgtcgtcgccaccggcgccctccgcctcctcgaggccgtccgttcccacatcgccgcctccggccgctcccacatccgctactaccaagccggctcctccgagatgttcggcgccacccctccgccgcagtccgaaaccacccccttccacccccgctccccctacgccgcctccaaatgcgccgcccactggtacaccgtgaactaccgcgaggcttactccctcttcgcctgcaacggcatcctcttcaaccacgagtccccccgccgcggcgagaatttcgtgacccgcaagatcacgcgggccgtgggccgcatcaaggtcgggctccagagcaagctcttcttgggcaacctccaggcctccagagattggggcttcgctggggactacgttgaagccatgtggctgatgctgcagcaggagaagcccgatgactatgttgtggccactgaagagtcccacaccgtggaggagttcttggaagtcgcgttcggctatgtgggactcaattggagggaccatgtcgtcattgacaagagatactttcgcccctctgaagtcgataacctcaaaggggacgcttccaaggccaagaaggtgcttggttggaaacctaaagtggggtttgagcagcttgtgaagatgatggttgaccgggacattgagatggctaagaaagagaaggttcttgttgatgctggctacattgatgctcagcaacaaccttgaatctcatctgcaacttgaggaagagggggttttgctgttttgatcatataatgccgttgacatagtttagtttatgggcaatttatgttgttttcttgttgcaactgttatttcctagatgtgcatttgtcggatttcttcttcttgtaagcccgttgattcattcaattaaaagctatatacatctacgcccattttcttgt

SEQ ID NO: 12769 - DNA, 790 bp, Glycine max
  Clone ID: 701210145_FLI
ggaaagtccaagaccgaatctaagagagccgatgccaaacttgctgtgaataagaagggcgccgccaccaagactaggaaacccgccggaaaggggaaggcagcgaaagatcctaacaagccaaagaggcctccaagtgctttcttcgttttcatggaggaattcaggaaggtgttcaacaaggaacatcccgacaacaaagcagtgtctgctgtgggcaaagctgctggagcaaaatggaagacgatgtctgatgctgaaaaagcaccttatgtggcaaagtctgagaaaaggaaagtggagtacgagaagaacatgagagcttataacaagaaacaggcggaaggtcctactggtggggatgaagaagaatctgagaagtctgtatctgaggtgaatgatgaggatgatgacgaggaaggcagtggcgaggaggaggatgacgattagagaatggactgatgataatagcatttatgtaggttctgatgattttgatcatccgtgtaggtggtctggtcatttccttataaacatatttctctttccaaaaaatatttccctgctcctccttccgtaaattgctcgtctttccaaaacgtgaatagtttaaagaagggagttctctttatttgtatttctaaatccaactgtttagttaagggatggttatctcttgtagagcttttagtttgatttagagttttcttgttgaaatctggttaagtttgtatcaatataattgacttatcatcccctttctgctgtatatatgcgatttatgtttttt

SEQ ID NO: 12770 - DNA, 2257 bp, Glycine max
  Clone ID: 701210281_FLI
ggagaatctccttcgcaaatgccagtatcatgttactacaactaatcaggcagttgaggcactgacaatgttgagggaaaacagaaataagtttgacctcgttatcagcgatgtgaatatgcctgacattgatggatttaagctccttgagttggtgggacttgaaatggacctacctgtcatcatgttgtcagcacacggtgatacaaagctggtgatgaagggtgttacacatggtgcatgtgactatttgctgaaacctgttcgaattgaagagttgaagaacatatggcaacatgtggttcgaagaaagaattttgatagcagggatcagaacaaggcttccaatgaggagaaggctcctaattttgctgggggaggtagtcaaggcctaagatcagaaaacagtgctgaccagaataaaaggcttggtaaaaaaaggaaggaccaaagtgatgaagaagaagaaggtggggaagagaatgaagatgatgaggacccctcagcacagaagaaagctcgtgtggtttggtctgttgagctgcatagaaaatttgttgctgcagttaatcaactgggcctagataaggctgttcccaagaaaatacttgacctaatgaatgttgaagggcttacaagggaaaatgtggcaagccatctacagaaatatagactctatctgaaaaaggcagcccagcaagctaacatggttgctgcattgggtggtagtgattcttacctacgtataggttcaatagatggatatggagatttttgcacctcatctgggtctggaaggattacaaacgctacattaccatcatatgcatctactggaattttcagtaggctgaattctccagctgccttgaacatgagaggaattagttcttctgcacttatccggcctgttcagtctcaaaacatcaacagctccttaaacacacttggaaacattcagccatccatttttcctgcaaatcaaagctcaagtttattacaaggaattccaacatcaattgagcttaaccaatctaagcaaagaaactgtacaactggaatatcacagttaagccaagttgattcaagtggatttacagttgcctctggcttcccagaccatagggctactgttaatggtccaaacaattctctcccgtgtgtctcaaataatcatataatgttacaaggaaatccacaaacgcatggcccaggagcgtttagcaatcagtcttctgtcagagcggcttctttgtgtgctgaatcttttgacgtgggcttatgtggttcttctaatttgttggatcataatcggtgcaatgataactggcagaatgcagctcaattgtctaaatttcctgccaattccttgccactttgtgaggctttcagcaatgaccaactgcctcccactagcatcaatgattcgaactcaagtactcatattggcaacaacagtccagttgatttttcttctaggatgggaatttctgttcctttggaggacaccagaaatgagctgagatgccaagagggcttgattgggaatattgtacagccttcaagttacacaccacgacaaaggtgggaagaacataaactggattataaccaaaacatgagctgtccctttaattctgtaaattcacacgcttcctccagtggagtgacaagttctatggggcatgttttaaaccaaaataatacaatttgcagcaatagagttgatgcatcatctttggttggccaactaaatggagcatccccatcaatcagccggtgcactgaagttgagaaattctcttcagacattcgactgaagccaaatgaagcctacattttggagcaaatgaagtcccaagatggatttatgcagaatacttttgggaccttggatgacataatgggtgtaatggtcaaaagggagcaaaatgagtcgacattgttggatggagaaatgggatttgatgcctaccctgttggatcatgcaactgatttcttcttaaccagaacgaatccaggagcaataaaatcgtgaaacttgctccagtctctgaaaccgattaatgtacacctatttttatgttctgctactaaatttattttcttggccaacattttgttgtttcacttatggacttttgttagccatctgatctgttccatctttttttcctttcaatctgtagtgtatccccataaaaattgtctttggtttagataaaataattgtaatatgaatgtttcttggtgctc

SEQ ID NO: 12771 - DNA, 899 bp, Glycine max
  Clone ID: 701210318_FLI
tttataacagcggtggaaggtctccttctctctcaatccacaaggatatataacagcgctagctcttgttaaattcttctctaccttactactccctcactttgtgttagaatcatcatgggtttgcaaaaccaattaaacgacgtgtcgtcgggttcgattccgcttctggtgttggcgcagatagccacctgcgtcaactacctccgctccatgcttttcgcgcttttgcaaaccctaggtctcagccgattccactccgaccagatcgtcgacgagcgcttcctcgccgccgtcggatccggcctcgccggacttatcatgctctccgatcagctcaccctcagcagccaattcttccaccatcaccacggcaccgccgccggccacgaccacgaccacgaccaccacccctgcgtcgtgtgccaggccaccttcgaggacggcgaccaggtccgcatgctctcctgccgccacgtcttccaccgccgatgcttcgacggctggctccaccactacaagttcaactgcccactctgccgctctccgctcttctccgacgagcgcgtggcactcacggagcgccgcctcggccagcaactcatctcttggttctccctacactgatgcggccacgtttcgttttctgaacctccacttttacggttttacccctctcacgcgatcactttttacagagctgtacgcgggtttctttttctgtttttcttttccttgtttttaatattagttttttttttcccatagggtattaggctagatttatttatttttctctttttaacagtaatttttctgaaggtattttttgaagggttttcttccgtctgaaaatcctttttgagatgctgtaaattttggaactctgtgtttatggt

SEQ ID NO: 12772 - DNA, 1052 bp, Glycine max
  Clone ID: 701210352_FLI
gaggaatatggcttccttaagctcctcattagtgctgctccttgcagctctaattctatcccctcaagttcttgctgactatgagaagcccccaatttacaagccacctgtttacacaccgccagtttataagcccccagttgaaaaaccaccagtgtacaaacctccagtttacaagcctccagttgaaaaaccacctgtttataagcctccagtttataagccacccatttacaagcctccagtgtataaacctccagttgaaaaaccaccggtttacaagcctccagtttataaaccacctgtttacaagcctccagtgtataaacccccaattgaaaaaccacccgtttataagccaccagtttacaagccaccagtgtacaagcctccagtgtataagccaccagtttacaagccaccagtgtacaagccaccagttgagaagccaccagtatacaaaccacccgtttataagccaccagtttacaagccaccagtgtacaagccaccagttgagaagccaccagtgtacaagcctccagtgtacaagccaccagtatacaaaccaccagtttataagcctccagttgagaaacctcctatttacaagccaccagtttacaagcctcctatagagaagccaccagtgtacaagccaccagtgtacaaaccaccagtgtacaaaccaccggtgtacaagccccctgttaagaaacctcctatttacaaaccaccttacccaaagtaccctccaggctccaactgaagacacccacctgattttgaattaagttaagggatgtattaagtatatgctaaataagaggtgtatctacaaccattgactttgtcatgctcaaaaatttagtttaatttacaaattatggcaagggttacacctggctagcttccgcgtttagatcatttgtttatagtgctatggccacgacaagagtgttatgggtgcatgaatgtaaaacgaaaaaaaaaaaaattgtgtttattttgtacttcaagttatgaataaaagaatttcactgtttgtttgt

SEQ ID NO: 12773 - DNA, 1309 bp, Glycine max
  Clone ID: 701210428_FLI
gatggtgaaatgtattgtaggaattgcatttggtggaaagaatgtaacccgtgtgacataagtggccgcacatttagagaactagccacttctatataagaataacattagcaggcaaaggccttatctggcaccaaacatgagttctctgaatcttggaacatggcctcgtcccacctctatgttgaacacaccttcacatctccttcccccttttcacactctcactctcacaacaacgcttcccaaactcgcaagtggaaccccaaaactaatatcttcttttcccctcgtctctgctgtgcccactaaggaacacacagtcacaacccaggaaattcaactccaagacacgccgctcaacttcgatttcaagggctacatgatcgccaaggcccacacggtaaaccaagccttggacgccgccattgcgttgagggacccacacaagatccaccaagccatgcgctactccctcctcgccggcggcaagagggtccgccccgtgctctgcatcgccgcatgcgagctcgtcggtggcacagaggccaccgccatccccgccgcctgcgccgtcgagatgatccacaccatgtcgctcatccacgacgacctgccatgtatggacaacgacgacctccgccgcggaaagccgaccaaccacaaggtctacggcgaggacgtggcggtcctcgccggcgacgcgctcctcgccttcgcgttcgagcacgtggcagcgtccacggagggagtgtcgccgtcacgcgtggttcgagcgattggggaattagcgaagtcgatcggtacggaagggcttgtggcgggacaagtggtggatatagattcggagggggtggcgaatgtggggctggagacgctggaattcattcacgtgcacaaaacggcggcgttgctggaagctgcggttgtgttgggggcaatagtgggaggtgggagcgacgaggaggttgagaaattaaggaagttcgctaggtgcattgggttgttgtttcaggttgtggacgacattctggatgttacgaagtcgtcggaggaattggggaagacggcggggaaggatttggtggctgataaggttacttatcccaagctattggggatagataagtcaaaggaatttgctcaagaattgttaaaggatgccaaggaacaattgtctggcttcgatcctccaaaggcggctcccttgtttgcattaaccaattacattgcttataggcaaaattaaaagtgaaaacattggataccctgttttctcaccggggaaccactcaaataaatttctctg

SEQ ID NO: 12774 - DNA, 663 bp, Glycine max
  Clone ID: 701210548_FLI
cactggtgccagccatgtctttccttcttcctctttagacaccgacgtcccaaacatgaaacgttctgccaattctcgcctctggacaagtatttgtgaaggtttgaagcaggtagttccatggaagagtaaaaaactgaagaagaaaaatgggagtggacttaggttctaattttattttcatggacagcatcgtctggacaaaaatcaattatccactgaatctgtaccatatttttttacttaattagatgacaatgatatcctaattatagaaggggtgtcagacagaaagcctgtttcttttgttatactgctaagtgcaaaactttgggttaactagttcattcatgcttgtaacctggatggtgaaagttgtacagcttatttaattcatgctcgctagaatatttgctcttaattgaagtgaagttggtatctatctcagtttgtgcagccattatttgttagtcactgctcacacctctgtcggtgtgccccggccccccgggaatatgatatggatggacacacacatcacaagttccttaatggattgtcggtacaatatcaacgataactttatgctattaagtgagctcattaggcttaattaagtattatttttttacacatattgttcattataaagtttcttttaat

SEQ ID NO: 12775 - DNA, 1012 bp, Glycine max
  Clone ID: 701210780_FLI
aaccactcttaatttctctctgccttgctcatttacacacctctccaacctttcactttcagctttatttgaatccctctctctcctttccaaatggccagcgttgaggttgcacatcaaacaccaacaacagttccagaaaatgaaacaaccgaggtaatcaagacccaggaaacaaccccggaaccagtaccagccactgaggctcctgcaacagaacaagcagcagctgaggttcctgctcaagaagaacaacaagcaactgaggttcctgccccagaatcaaccaccgaagcaccaaaggaagaaaccaccgaagcaccaacaacagaaacagtagaaacaacaactacagaagaagccaagccagaggagcctaaagaagttgcagttgagaccgaggaggtggtgacaaaggagacagaggaagagaagccagcagcagaagagaaatcagaggagaaaactgaagaagtgaaagaagaagcagaagagcctaaagaaactactgaaacagaaacagaatcagcaccagcagcaaccacagaggaagagaacaaaccagctgagacagtggaagccccagtagaggttcctgttgagaaaactgaagcttagacttatggacagtgtgagtgagaaaaacaagtttaaaaatggtcctagttgtggggatcattaggtctaccattttgcatgtcatgttgaaaagcttttttttttatttatttctttagtttactttattattaatatattattattatatgatggttaagtctttggttgtattatggagggtatacctacgtgtgagcacaacacttggctccacatcagcgtgcttaccacgtggtgacatgagaaattctaggagttgtgtattgaagtgagcaagctgctgctggtgctggagtttagggatgagggtttattttattggcagggttacatgagtttgtgatgatgtgttattgtgtttctttaggtttgaataaatgatatttacttt

SEQ ID NO: 12776 - DNA, 918 bp, Glycine max
  Clone ID: 701210833_FLI
gcaaggtcagagaatgaaatgataaagcctacaattcaaggagtactaaacatcatgaaagcatgcctgaaggcaaaaactgtccgaaggctagtattcacgtcctcagccggaactaccaacattactgagcaccaaaagcctatcattgacgaaacctgctggactgatgttgagttctgccggagattaaatatgactggttggatgtatttcgtttctaaaacacttgcggagaaagaagcttggaaatttgcgaaagagcacggcatggacttcatcgctatccttccagctcttgtcattggtccctttctactgccaacaataccttctagcgtgatcagtgctctttcacctattaacggaattgaggcacattattcaatcataaagcaagctcaattcgtccacatagaagatatctgtcttgctcacatatttctgtttgaacagccaaaagcagaagggaggtatatatgcagtgcatgtgacgttactatccatgacattgtaaaattaattaacgaaaaatacccagagtacaaggttcccaccaagtttcagaacattccagatcaattggagcccgtgagattttcttccaagaaaatcacagacttgggattccaatttaaatacagcttagaggatatgtacactggagcaattgatacatgcatagagaaagggcttcttcctaaacctgcagaaattccagcgaatggcatcgagcataaataaatataggttttcatatctttgcctcggtgatggctatgaatgttgcttttcttgttcagtttctttaatgatgtttccgttttgtgaattcgtagtcaaaattgtaagtggtttgtaagaccaaattagttatctacaaattgtttaatattatcacaagacattttttacggt

SEQ ID NO: 12777 - DNA, 1225 bp, Glycine max
  Clone ID: 701210864_FLI
gcggcccctacactctcaaataccgcggcagcatgtgggggtataagagatttttcaaacgggctcaactcgaggcgtcaactttcctcaaggatgactgcttgaagataaactgcactgttggtgttgtggtgtcttccattgattgttccaagttaaacacaatacaggttcccgaatccgatattggggcacatttcgggatgctgttagagaatgaggagggatcagatgttactttctctgtcggtggagaaaggtttcatgcacataagcttgttttggctgctcgatcaactgcatttgaaaccgagttttttaatgggatggaggaggatgatcatgatgtagttgttactgacatggaaccaaaagttttcaaggctttgcttcattttatttatagagacactctaatagatgatgaagagctctttatgtcacgttcatcattcttgccttcggtatctgaatcatttgctgcaaagttgttagctgctgcagaaaagtatggtttgccaagacttaaactgatgtgcgagtctgtactttgcaaagacatctccatagattctgttgcctatattctggctcttgctgatcgttatcgtgctacagaattgaagtctgtctgtctacaattttctgctgaaaaccttgtcgctgtgatgcaatctgatggttttgagtatcttaaggaaaattgtcccttgctgcaatcagaactgctaaagactgtggcaggatgcgaggaggaatttagtggagaaggaaagtgtcgaagtgtgtgggcccaattttctgatggtggtgacaccaatgataggagtgtaagacaacaaacctgggaaaatggtgttgaaagaagtcaaagcttatgggttcacctttctgatggtgttaacaacaatgataggagtccagggcaagaaacctgacaaggtaaggtacaccatcatttgtctgttaggcttaaatggtagattaaaagctactgcagggataagattaaccaattgtgcggactggcaaaaggttagaaatgcaaacaatgtaaagaacgaaggctgagatactgcctccattgtaataatattatgtcttataaatactgttttttctttgataatatgattacaaggatgcagtggtagcaataagtaattacattgatcattgtatgaaagtttgttgagaacattttcattaagaactggtcttgttt

SEQ ID NO: 12778 - DNA, 549 bp, Glycine max
  Clone ID: 701210894_FLI
ctctcctactgttaacgttttctgttttctttccgtcgacgttctggctgcgtcccaagaatctctgacgccgttgtcggttttctccggccacggctacttccaacggatggcgacgacgaccacggagttcgatctcgattacgagttccccgatctcgattacgaccttcgctatctcagtctcgccggaatcgatgccctcaccgctttccaaaacctattaccggaaaggatctgcaccctattgaaggggaaaatataagaagagaaagatatttagagaaatagtgttgtggtaggtggattaagattaagatctcaaacattagatttttgttgtgaaggtgaaagtaaaattactctgaaataaaagaaaaaaaagaatttagtaggagtaggagatgtttgggctgaataaaaaggtgagtgggtgagtgaaggttgcagtgaagtttgttcgtgaacaagacttttgtgatgtggactgcttcttcattattgggttgtgttgagacttgagaacttgtgtgaacgcaggactttgtg

SEQ ID NO: 12779 - DNA, 447 bp, Glycine max
  Clone ID: 701210935_FLI
caaattttgaaggcgccgctttcataaattgatcctacaacttgaaggaggctgcatgcctgcacctatcaagaaattcttgtatcacattgcataacatttttctttaaaaaaaatcccttatttttagttgggacgacaactataatgcaacataataaattgaaataataggcaaaatagcaaaagttgttgtgggcgcagctgaaagacatggttcaacttaatttgtggttttaggaataaaaatgttgtgattctctgaagaagaaaaaaatgttgtcatagcttcataggtaatattaacttgggccttacacaaaaaaatgttgttatatggttgttgtgtgtgccattcacatttttttctatttatgatctacaattattttgtttttttttatgattttatctaaaatttataatatatataaattgtttttttat

SEQ ID NO: 12780 - DNA, 1408 bp, Glycine max
  Clone ID: 701210962_FLI
gaagtatcagatctggagcaggagaatagcgttggcagcgtttgcgtttgctctgctgttccaatcggcctcagcagacgacgtcgttgtgctctctgaagataacttcgagaaggaagttggtcaggacagaggagctctcgttgagttctatgctccttggtgtggacactgcaaaaagcttgctccagaatatgaaaagcttggtagcagcttcaagaaagccaaatctgttttaattggcaaggttgactgtgatgagcataagagtttgtgcagcaagtatggagtctctgggtacccaacaattcagtggtttccaaaaggatctcttgaagccaaaaagtatgaagggccacgcactgctgaatcacttgttgagtttgtaaatacggaaggaggaacgaatgtaaagattgctacagttccttccaatgtagtggtgctaacacctgaaaattttaatgaggttgtcttggatgaagccaaagatgtcttggttgagttttatgcaccatggtgtggacattgcaaaagtcttgctcctacttacgagaaagttgccacagcatttaaattggaggaagatgtagtaattgcaaatctggatgctgataaatatagggatctggctgaaaagtacgacgtgagtggatttcctaccttgaagttcttcccaaagggcaacaaagctggtgaagactacggaggtggaagagacttggatgactttgtggcttttatcaatgagaaatctggagcaagtcgagatggaaaaggacaacttacttcccaagctggtatagtagaaagcttggatgtcttggtaaaggagtttgtagctgccagcgatgaagagaagaaatccgtgtttacccgattggaagaggaagttgtgaagcttaagggttccgcctcaaggtacgggaagatttacttgaaagctgccaagaattacagggaaaaaggttctgattatgctaagaacgaaattcagcgcctacagcgcattcttgacaagtccattagccctgcgaaggccgacgagttaactctaaagaaaaatatcttgtcgacatatgctgcttgacttattggtgcattgttaaccaactctcatggaagctcgtgatccaccgcagctgccgatgattgtttgactttgatatcgaaattgctgggagatattcaacgtggatacttacttgtagtgcttagtttgagtctctattaatgaccctatcttgcatggcgcttttggggttaaagattacgattcttctccccattgtagtcttacctgagcagtttaaaattttgggagacgataacttttgtctttataccatgtgtttccttcgctatttgatggtgtacgatttgcttataaataagaaatgaacgcaac

SEQ ID NO: 12781 - DNA, 2835 bp, Glycine max
  Clone ID: 701211360_FLI
gtgacatttggatttaggaattaggacatggccacacccattctatataacgttccctcccttggccaccaccctcgctcacatttattatttccctctttgccccaaatgtcttcaaccttctcacccctcctcaatctcattgcagtcttcctcctcctcttcttggtccggcacacgtgcgaggcacgtgacccgttcgcgtgcgacccgaaaaatggcgccacggagaacatgccgttttgcaaggcttcactggcgataccagagagggtgaaggatctggttggaaggttgacgctgcaagagaaggttaggcttctggtgaacaatgccgcggcggttccaaggcttgggatgaaagggtacgagtggtggtcggaggcactccacggagtttcaaatgtgggtcccggagttaagtttaatgcacagtttcccggtgctactagcttccctcaagtcatcaccaccgctgcttccttcaatgcttctctctgggaggcaatcggacaggtagtgtcggatgaggcaagggccatgtacaacggtggaacagcagggctcacgtattggagcccaaacgtgaacattttcagggacccaaggtggggccgtggacaggaaactcccggtgaggacccagtgttagccggtacatatgctgctagttacgtcaggggactacagggaacggacggtaaccggttgaaggttgctgcttgttgcaaacacttcacggcttatgacctcgataattggaatggcatggatcgattccacttcaatgcacaagtgagtaagcaggacatagaggaaacattcgacgtgccattcaggatgtgtgtgagcgaagggaaagtagccagtgtcatgtgttcttacaatcaagtcaatggggtccctacctgtgccgaccccaacctcctcaagaaaacagttcgtggcctgtggcaacttgatgggtacatagtatcagactgtgattctgttggggtgttttatgataaccaacattacacaccaacgccagaagaagctgctgctgatgccattaaagcaggtttggatttagactgtgggcctttcctagctgtgcacacgcagaatgcggtcgaaaaagggttgcttagcgaagctgatgtgaacggtgctttggtgaatacactgacggtccaaatgaggttaggcatgtttgatggagagccatcggcccatgcatatggcaaattgggcccaaaagatgtgtgcaaaccggcccatcaagaactcgcccttgaagctgccagacaaggaattgtgcttcttaagaacactggtcctgttttgccactctccccacagcgtcaccataccgtggctgtcattggacccaattctaaagccaccgttacaatgattggaaattatgctggtgttgcatgtggatacaccaatcccttacaagggataggaagatatgccaagactattcatcagttgggttgtgaaaatgtagcttgtaaaaatgacaagttgtttgggtctgctataaacgcggcccgtcaagcagatgcaacggttttggtgatgggcctggaccagtccattgaagctgaaacggtggacaggactggcttgcttttgcctggtcgtcaacaagaccttgtttcaaaagtggcagctgcctcaaagggaccaactattttggtcataatgtctggtggttctgtggatataacttttgcaaagaataaccctcgaattgtgggcatcctgtgggctggttatccaggccaagctggtggtgctgccattgcagatatcctgtttggaacaactaacccagggggcaagctgccggtgacatggtacccacaagaatacctaacaaagttgccaatgacaaacatggcaatgcgaggaagcaaatcagcagggtacccaggaagaacgtatcggttctacaatggtccagtggtgtatccatttggacacggcttgacatacacacactttgttcatacattagcgagtgctcccacagtggtgtcagttcccttgaatggtcaccgccgtgccaatgtcaccaatatttcaaacagggcaattagagtgacacatgcacggtgtgacaaactctccatcagcctcgaagtagacattaaaaatgtggggtccagagatggcacgcacacgttgctagttttctctgctcctcctgcaggttttggccattgggcactagagaagcaacttgtggcctttgagaaaatccatgttcctgcgaagggtctacagagagttggagtcaatattcacgtgtgcaagcttttaagtgtggtggataagtctgggattaggagaatcccgttgggggaacacagttttaacattggcgatgttaaacactccgtgtcacttcaggctgcagcacttgggattatcaagtcctgaaaattttaggctaaggtggagaatatctatggcacgtgcataatatatattagtatgtgaaaagttttagctttcaacaacaaaggttgcttctaagggatattcaaaggcaaactgttgatatacttggatacttgtattgaagacaaaacgtgctagattaattcatctatcacagtcaaattacacaataggattgatttgattttggagaggagattaaggaaatgtattgttttctcttctcctatatctttctacttttaggacttttattttattgttagtgtcttatcaataggattggtaataagatagttttctcattgtaattgtaattgtaacttccccccttatctttcttacgatattgttaataagattgggttcacatctatt

SEQ ID NO: 12782 - DNA, 1457 bp, Glycine max
  Clone ID: 701211444_FLI
tctcgttcacactttcagattgtgtgaagatgggggcgggtggccgaactgatgttcctcctgccaacaggaagtcagaggttgaccctttgaagcgggtgccatttgaaaaacctccatttagtctcagccaaatcaagaaggtcattccacctcactgtttccagcgttctgttttccgctcattctcctatgttgtttacgacctcaccatagccttctgcctctattatgttgccacccattacttccacctccttcccagccctctctctttcttggcatggccaatctactgggctgtccaaggttgcatccttactggagtttgggtcattgcccatgagtgtggccaccatgcattcagtgactaccagttgcttgatgatattgttggccttgtcctccactccggtctcctagtcccatacttttcatggaaatacagccatcgccgtcaccactctaacactggttctcttgagcgggatgaagtatttgtgccaaagcagaagtcctgtatcaagtggtactctaaataccttaacaatcttccaggcagagtcctcactcttgctgtcaccctcacacttggttggcccttgtacttggctttaaatgtttctggaaggccttatgatagatttgcttgccactatgacccatatggtcccatttactctgatcgtgaacgacttcaaatatatatatcagatgcaggagtacttgcagtatgctatggccttttccgtcttgccatggcaaaaggacttgcctgggtggtgtgtgtttatggagttccattgctagtggtcaatggatttttggtgttgattacattcttgcagcatactcaccctgcattgccacattacacttcctctgagtgggactggttgagaggagctttagcaacagtggatagagattatggaatcctgaacaaggtcttccataatattacagacactcatgtagcacatcacttgttctccacaatgccacattatcatgcaatggaggctacaaaggcaataaaacccattttgggagagtattatcggtttgatgagactccatttgtcaaggcaatgtggagagaggcaagagagtgtatttatgtggagccagatcaaagtaccgagagcaaaggtgtattttggtacaacaataagttgtgatgattaatgtagccgaggcttctttgaactttcccttgtgactgtttagtatcatggttgcttattgggaataattttgttgaaccctgatgttggtagtaagtatctagacagttgcatagcggttttgtttacagaataagatatagcctctctgaacagtttgattattgcaccatggtttgcaatcggtgcatgtcgaccaagtttctcaagactgtggagaagcttattcttgttccagttcttgaatccaagttgttaccgtattctgtt

SEQ ID NO: 12783 - DNA, 1514 bp, Glycine max
  Clone ID: 701211492_FLI
gtggaagtgagaagaaaaagacatggcagtgtcagcagcaaagttcgatgtggtaatcctaggagcctcaggtttcaccggcaagcaagtcctcaaagaagccctcaaattcctcaattccaaccatttcacctccctcgccatagcgggccgcgacccctccaagctggcccaaaccctcaaatgggccgctcagcccaacccgccgccccaaatccccatcctcgccgccgacaccgccgaccctccctccctccgttccctctgcgaccagacccgcctcctcctcaactgcgtgggccccttccgccgccatggcgaacccgtcgtggcggcgtgcgtcgcgtgcggctgcgactacctcgacatcacgggcgagtcggagttcatggagcgcgtggagcgtgagtaccacgcggaggcaacaaaaaagggttctttggtggtttcggcgtgtgggttcgactcggttccagcggagatgggctttttgttccattcgaggcagtgggtgggcccggcccggcccaacagggtgggggcgtacctgagtttggaatcggataagagaattgtggggaactttgggacgtttgagtctgcggttatggctgtgaaggatttgaaggaaatggaacgttctagagtcaccagagtgatccctgagattcctgggcccccacctaaaggagaaataatagaacaccagaagaaaattggcctttggggagtaacactaccttcagcggatgcaactcttgttggaagaacactttctactctaactgaatccccccatggtcttcctgggttgaatgagaatgctgagatggttgaaaaaaggaaagcctactggacatccgtgaagccggctcattttggtgtgaagataggctcaaaatctttgttgcacgtgttcggatttattcttattggaataatcattggtgttttaggaagaacctcttttggaagatggcttcttttgaagtatccttccatcttcacctttggcgggttcagtaagaatggtccttctgaagaggagattgcaagtgcttcattcaagatgtggtttgttggacatggtttcagcaatgagagtcttgctgcacagggaaacacaaaacctgacatggagattataacaagagtaatgggacctgaaatgggttatgtaaccaccccaataattatggttcagtgcgctctcgttcttcacggccaaagaaagaatctaccaaagggaggtgtttacactccagggattgtatttggtccaactgatctccaggaaagacttcaacaaaatggaatatcttttgatgtcatctcgaaaagctctatttcttcttgactctaagcagttcatccatttttggttggaagagaaaaaactgactggtcggagtgcagaagttataataaagtattgagagaatcttttttgttttatatgtctatattattattttgtaagaatactacagttatattgacatttgacttgaacc

SEQ ID NO: 12784 - DNA, 966 bp, Glycine max
  Clone ID: 701211541_FLI
aaccatccttttctttcgctcttcttccattccacactaaaaagtaacagtttcggagggaaacacaatacaacacaaaaagccccccccacaaagcaaatcaccttttttttcctttcaaaatgttcgccgaagagaatggcctcaagggagaccccagactccaagccatttcccaagccatcagagtcgtccctcacttccccaaacatggaataatgttccaagacataacgacattgctgttggatcacaaggcgtttaaagacaccgtcgacatttttgtcgatcgttacagagacatgcacatttccgtagttgctggaattgaggcaagggggttcatgtttggtccctcaattgcgttgggcattggtgcaaagtttgttcctttacgcaaaccacggaagctgccaggtgaagtaatttcagaaaaatatgctctagaatatggaactgattgcttggagttgcatgttggtgctgcccagcccggtgaacgggccataataattgatgacttggtggccacaggtggaactctgtcagcaggagtaaaacttctagaacgtgttggggctgaagtggtggaatgtgcttgtgtcattggtgtgcctgatgtcaaggggcagtgcaggagtattggaaagccactttatgttcttgttgagccacgtaaagcagataaatgtcaagctcaagcagataaatgttactgagatgtgatgttggttcgatcttgaactgacatacaaaaaggacgcttagtgtgagaaacacaggccataatgtgatccttaagttttcggctgatggagagttgtgttcatggcaattgccaaatatcatcctgggaaatgttcccccttttcatatctttttatctttgtacatgttagccatcatgttatgtggccagcagtttagaacaataacaatcattaaagaagggatggattttatggc

SEQ ID NO: 12785 - DNA, 1884 bp, Glycine max
  Clone ID: 701211587_FLI
gaaaatagtggtgacttcattcttgggttaagtttgtgactttgtcaaaatgcagaatatccctctcaatcacagaatcccaaacgacacctattaattttataaaatatgtatttaattcacatcatttcccccaaaatccctataataatatcttttcacagtcatgctcagatgaaagtcctacctatgaagcaattgtttacattttccgtcaaccaaaatgctacaaacgaaaccagagattcgtaattgcacattctcttttgttgtctccagctcatagaatattataaactcagattcattcagaatttcagattcacctttttcttttcttctctaccttctttttcctctgacagctttttgcagaaagttgtgatttttccttgaaagatggcatctttgagcatgatccagatcagaactgggaattgtgcatctgggtttggtttgaattgtgctgggaaggttaaggttggtcccagcagagttgggtttaaggtgtttgcttcagagactcaggctacagagcctgatcttagtgtaactgttaatgggttgcgcatgcctaacccctttgttattgggtcaggtccaccagggaccaattacacagtcatgaagagggcctttgatgaaggttggggtgctgtgattgcaaaaactgtatcacttgatgcggcaaaagttataaatgtaactcctcgatatgcccggctacgggcaggtgcaaatggatctgcaaaaggagaaattattggatgggagaacatagaacttatcagtgataggccacttgaaactatgttgaaagaattcaagcaattaaaagaagagtatccagacagaattctcattgcttctatcatggaggagtacaataaggctgcatgggaggagcttatcgatagagttgagcaaactggagttgatgcatttgaaataaatttctcatgtcctcacggtatgccagaacgcaaaatgggtgctgctgttgggcaagattgtgctcttctggaagaggtttgtggatggataaacgctaaagccacaattcctgtttgggctaagatgactcccaacataactgatatttcacagccagcaaggattgctctaagttcaggatgtgagggagtatctgccataaatacaatcatgagcgtcatgggaatcaacctcaatacattacgtcccgagccttgcgttgaggggtactcaactcctgggggttattctgcaagggcagtccatcccatagcacttgggaaggtgatgagcattgcaaagatgatgaagtcagagtttgatagtgagaactatacactttctgccattggtggtgttgagacaggcggtgatgctgctgagtttatccttctcggggcaaacactgttcaggtgtgcactggggttatgatgcatggctatggacttgtgaagaaactatgtcttgagcttcaagacttcatgaaaaagcacaatttcacatccatagaagatttcagaggggtttctcttgagtattttactactcacactgacttggtaagaaggcagaaggaagcagttcagaagaggaaagccataaagaaagggttgcaatctgacaaagactggacaggagatggttttgtgcaagaaactgaaagcatggtttcaaactgaaataaaatgtgcagttaaattatattagcgtgtttggaaatggaccatgggcatggtgtttcacatcttaattaatgttactagttctaccttttacatttccaaacacatttaagtaacctttcatatgcaattgcaaatgttgtccaaacgttaagtataactatagacattatgttttattatcaatgatggatattaatcttttcc

SEQ ID NO: 12786 - DNA, 1121 bp, Glycine max
  Clone ID: 701211635_FLI
ccaacactaaaatggcacttccatacccattttcctatctcctcttcctccttctaattctcttatcttctctcccaaacatttcccaagccacctctcgtgccccaaatcgcatgttagccttggttcaaaaccaaccgcttgtactaaaataccacaagggtcctcttctaaagggcaacatcaccctccatttgctatggtacggtacatttacccccacgcaacgatcaatagtcatcgatttccttgaatccctaacctccacgtcagcacctggagccccttcagtttccacgtggtggcaaaccaccgagagctacaggggaggcccctgcaccctcgtcgtagggaaccaaatcctcgatgaaacctactccctcggaaaatcactaaaaaacgaccacctcgtagctctggcgtcgaatcctaaactaaattcggcgcccggggatcgtgtcatccacgtcatcctcaccgcagctgacgtggcggtggaggatttctgcatgaaccagtgcgggacccacgggaggggcaagaacggaaattcagaaaagatcgcgtatgcgtgggtggggaattctgttacgcagtgtccggggcagtgcgcgtggccgttccatcaaccgctatacggtccccagacggcaccgttagtggcgcctaacggcgacgttggggttgacggaatggtgataaatttagcgacggttttggctggggcggttacgaatccgtttgaggacggttactatcagggtccggcgagtgcgccgctggaggcggtgtcggcgtgcaccgggattttcgggaagggggcgtacccgggttacgccgggaacgttctggcggagaacgcgacgggggcaagctacaacgccgtcggggtgcgcggccggaagttcttgctgccggcgatgtgggacccactcacctccacctgcaagacactggtgtgagatgaatgtaaagtgtaaacaatataaaaggaccataaaatatgggtttgtgtgtgagagagagaaaagagagatttgcaagtttgcctcggacggttgttattggaatgataggttatgtgtggtaataggtaataatagttaattttgatacttttt

SEQ ID NO: 12787 - DNA, 1427 bp, Glycine max
  Clone ID: 701211701_FLI
ctctcctcgttcacgctacccctttctgctcttcttctacctttcaagttttaaaagtataaagatggcagagacattcctatttacctcagagtcggtgaacgagggacaccctgacaagctctgcgaccaaatctccgatgctgtcctcgacgcttgcctcgagcaggacccagacagcaaagttgcctgcgaaacatgcaccaaaaccaacttggtcatggtcttcggagaaatcacgaccaaggccaacgttgactacgagaagatagtgcgtgacacctgcaggaacatcggcttcgtctcaaatgatgtgggactggatgccgacaactgcaaggtcctcgtcaacattgagcagcagagccctgatattgctcagggtgtacacggccaccttaccaaaaaacctgaagaaattggtgctggtgaccagggtcacatgtttggctatgccactgatgaaacccctgaattgatgccattgagccatgttcttgcaacaaaactcggtgctcgtctcaccgaggttcgcaagaacggtacctgcccttggctgaggcctgatgggaagacccaagtgaccgttgagtattacaatgacaatggtgccagggttcctattcgtgtacacaccgtgctaatctccacccaacacgacgagactgtcaccaatgacgaaattgctgctgacctcaaagagcatgtgatcaagcctgtgatcccagagaagtaccttgatgagaagaccattttccacttgaacccttcaggccgttttgtcattggtggccctcatggcgatgctggtctcaccggccgcaagatcattatcgatacttatggaggatggggtgctcatggtggtggtgctttctccgggaaggaccctaccaaggttgataggagtggtgcttacattgtgagacaggctgctaagagcattgtggcaagtggacttgccagaaggtgcattgtgcaagtgtcttatgccattggtgtgcctgagcctttgtctgtgtttgttgacacctatggcactgggaagatccatgataaggagattctcaacattgtgaaggaaaactttgatttcaggcctggtatgatctccatcaaccttgatctcaagaggggtggaaataacaggtttttgaagactgctgcctatggacactttggaagagaagaccctgacttcacatgggaagtggtcaaacccctcaagtgggagaaggcctaagtaattcattccactgctctatgctggaagttttttgagcgttgcccttataatatgtctaatatccataactttccacgtctcttactctgtgtgtttctctcctcttcctcctattttgttatttgtatgttcttttgtaattttttacgtgatcaactaaaaacatgtactctctgtttgt

SEQ ID NO: 12788 - DNA, 885 bp, Glycine max
  Clone ID: 701211702_FLI
caacaatggcttcttcgtcttcagaatcggcggtgtcggagcgaagaggaataccaggggctcagttcgtagaggatgtccaaacttacctcactcaatcgggtctcgatgttggttcagccctggcttttctccaagagagacttcagcagtacaaggtagtagaaatgaagcttcttgctcagcaaagggatcttcaggcaaagataccagatattgaaaagtgcttagacgttgttgctacattgaaagctaagaagggtactggtgaggaacttattgctgattttgaggtatcagaaggcatctattcacgagcacgcatagaagaaaccaattccgtgtgtttatggctgggagctaatgttatgctggaatattcattagaagaggctactggtcttctacagaagaacctggataatgctagagccagtttggaagttcttattgctgatttacagtttttgagggaccaggtgacaattactcaggttacaattgctcgtgtgtataattgggatgttcatcaacggagagttcaacatgctgttgctacaactgctcaagactagttaaaaaggagagtttattcaaacctagatccaaaattgaaaactcataccttttgcttagagtatgatttttatctcttgccaatttctgatttagataaattgtgggttgctcccttaatctagttccggttttaccacagtagacactagtaggagctttttcgtatatttatgttattattgtcttggtctcttgtaaaatgcccatatgttaggttgatgggaaagttttggtttggtgtgatcatatggatatattctactctgcaacattttttacttgtttaagttttctgttgctgttgct

SEQ ID NO: 12789 - DNA, 1198 bp, Glycine max
  Clone ID: 701211856_FLI
ccttctttctttttctgtgagcctttctttcaggttcttaacttgatcagtgtgcagtgtccaaatcataagggtagttgcaaattgcaatggctaagcatgatgttgagggtggttccttctctgcaaaggactaccatgatcctcctccagcaccgttgattgatgctgaggaactcacacagtggtccttctacagggctttgattgctgagttcattgccacaatgctcttcctttacatcacagtgctcactgtgattggttacaagagccagagtgatgtaaaggctgggggtgatgtgtgtggtggagttggcattcttggcattgcttgggcctttggtggcatgatcttcattctggtgtactgcactgctggaatctcagggggtcacataaacccagcagtgacatttgggctcttcttggctcgcaaggtgtctttgattagagcaataatgtacatggtggctcagtgcttgggagccatatgtggagttgggttggttaaggccttccaaaaggcttactacaacaggtatggtggtggggccaatgagctcagtgaagggtacagcacgggtgttggattgggtgctgagatcattggaacctttgttttggtttacactgtgttctctgcaactgatcccaagaggaatgctagagattctcatgtgccggttttggctccacttccaattggctttgctgtgttcatggttcacttggcaaccatcccagtaacaggcactggcattaaccctgctaggagtctaggagctgctgtcatgtacaaccaacagaaggcctgggatgaccattggatcttttgggttggaccatttattggagcagccattgcagccttctaccaccaattcatcttgagagcaggtgctgctaaggctcttggatcattcaggagcaaccccgctatttgagtcaatttaatttcttcttcatgatgagttcaaaatgaagaggaaattataagaataataaaaatattgtcaataatggcaattgcttgtgcttttattgcaaccttttctttgatcctattatgtagattaaaggttcttttcaagacaagagccattggtaaataccctttagtattttcaagcactttcctttctttcagtgtgtgatattttcttttaggtaatttaatctcttgtactcaacgtgg

SEQ ID NO: 12790 - DNA, 1032 bp, Glycine max
  Clone ID: 701211947_FLI
cagtgctgcaacttctttttggcttcctgtgtcaccaaaaagggtttttgaattcctccgcgatgagaactccagaagtgagtgggatattctttccaacggtggagttgtccaagaaatggcacacattgccaatggccgagacactggaaattgtgtctccctacttcgtgtgaatagtgcgaattcaagccaaagcaacatgttgatattacaagagagttgcgcggactcaacaggatcttttgtgatatatgctcctgtagatattgtggcaatgaacgtggttctgaatggaggggacccggactacgtggcccttcttccttcaggatttgctatactcccagatggaaccactgcacatggaggtggcattggtgacactggacatggtggttctctcttgactgtggcatttcaaatattggttgattcggttccaaccgcaaagctttctcttggatctgttgctactgttaacaatctcattgcctgcactgttgagagaattaaggctgctttatctggtgaagttgcttgacctaatggatcatcgtttagaagaaggataaaggggtgcaatgcattttggacaaatggggaggtgttgggaacttcggcttataccaaaaatgatgagaattgagaagtcaagagcgcaccttgcatgatcctttcttagcacccaacacagtgctgagaggattaaggttcgggaattgacttccctggaaatagtacatgctaagagcttaaatcaagaccttagtacttctcttcaccttcaaagactaagtatttatagttagtgttagcttcttctatgattaggttgtagctttgacttgatctctcttatgttccttctattgttttttgtgttttgttagatcaacgcactagccttatggctagtaaatgggaagcttgcaccgttagtgtagtgtttaattaagttctcactacgctacacatgtttgacccttttaaggttttcaaatgaatgttccttccaatttgcccaatctc

SEQ ID NO: 12791 - DNA, 2468 bp, Glycine max
  Clone ID: 701212072_FLI
gtgtatgtatctaaggagtataggaggagggatgtgttgcaagggattctcagggatgtggatgctctcaccagagatgaaatggagaaaatacccgaggaagagttggtcaacaagctccgcaatgtgttgagtgagaaacggtatttggtggtgcttgatgacatatggggcatggaggtttgggatggtttaaaatctgcatttcccagagggaagatgggaagtaagatattgctcaccacaaggaatggggatgttgctttacatgctgatgcttgtagcaatcctcatcagttgaggactttgacagaagatgagagtttcagattgctctgcaacaaagcgttccccggagcgaacggcatcccgttagagttggttcagttgaagagtcttgcaaaggagattgtggttaaatgtggaggtttgcctttggctgtggtagtggttggtggtttgctgtctaggaaactcaagtcaagtggggaatggaagcgggtgctgcaaaatatcagctggcacttgctagaagagcaagagaagatagctagaattttggcccttagctacaatgatctgcctcctcatttgaagtcttgctttctatatttgggtcttttcccagagggtgtgaacattcagacgaaaaaattgatcagactatgggtggcggagggatttctactgcaagaaggagaagaaactgcagaaggtgttgctcagaaatacttgaatgaattgattgggtgatgtggcaggtcaatcgactaaagcccggcgccattccatgcattcttgccatgacaggtatgactccttaaaacacaatgctggtcattcacgttccctgctgttcttcaacagagaatataatgatatagtgaggaaactctggcatcctttgaattttcagcaagaaaagaaattgaatttcatctacaggaaatttaagctgctcagggtattagaattagatggtgttcgggtagttagcctgccaagtttgataggggacttgattcaattgaggtatctaggattgaggaagactaatctagaagaagaacttccaccttccattggaaacttgcaaaacctacagacacttgatttaaggtattgttgttttttgatgaaaataccaaacgtaatttggaagatggtgaacttgagacatctcctcctgtacactccatttgattctccagatagcagccatctacggatggatacattaaccaatctacaaaccctaccgcacattgaggctggaaactggatagtagatggtggtttagcgaatatgatcaacctcaggcaattggggatttgtgaattatcaggacaaatggtgaattctgttctttctactgtacaaggattacacaacctccattcactgtcactatcacttcaatctgaagaggatgaatttccaatctttatgcagctgtctcagtgcactcatcttcagaaactctctttaaatggaaagatcaagaagctacctgatccacacgaattcccaccaaacctcttaaaactaactctgcataactcccacctacagaaggagtctattgccaaactggagagattgccaaaccttaaagtgctcattttgggtaaaggggcatacaattggccggaactgaacttcaatggtgaagggtttccacaactgcatattttgcgacttgttcttttgaaagaattggaggagtggacagttgaggaaaatgcaatgccaaggcttgagaacatggttattgaccgctgtgagaagctgaaaaagattccagaaggactgaaagctatcacttctctgaagaaattaaaaattataggaatgccagtagaatttgaacataaacttcggactaaagatttgttcgacttcacaaatactccagtaattgaatcaactacagacattttggcaattgattagtttctggcacaatgttagtgggtgacacatgccttcagctatggaatggaagcattttcaagtattggcactccaattttcagcatgcctgctttagtttattgttgacaaaatacatactgcttgatgaagtgtcaagcactgataactttttccacttctatgcacccaggatgttactccctttcatcctttgggaatggcttccaataactaattgtgaatgccattagatgtggaacttgtgtgagcagtacatagagcatttctctgagattgaacagctatgccaaattcaacagaaaccttttgctcacaaaaggatatctcaattacaggtaaatggccaatattttttcaatttttttttaaatttatggtttaaattttaaatgtggccaaaaaagggtcccggatattctttgtcctgtgttttgtttctttcattccaacacaactgaacatcactagacacttaccaagttttgtaattatatatctactagattttgct

SEQ ID NO: 12792 - DNA, 513 bp, Glycine max
  Clone ID: 701212095_FLI
gtaacgttcgcaaacatgtggagagagccatagatgacccaagatcgtttgtgactacatatgagggaaagcacaatcatgagatgccactcaagaacacaggaactgtagcatctgaaagagattcacaggcttctcttagtaaagataaagcatgattgacacttcaattagttagcaagtatgattcaatttcaatggcattggctgtcatcagaaataattcagaggatccattccttttatatcctaaagtatgctcagaataattgaagttgatcagaaagatcaagacattgacaatttcgaatgcagtacctagctactgagactaggatatttacttctacaacaacttgttgataataacagtattggtgctgataatttgtattatatatggaatcaagggcactggctcagtggcactgcccttcaataactttccatctctgctagctgcctttgtataccaaaccggtatattctattgtctatcatcatatataaatt

SEQ ID NO: 12793 - DNA, 1094 bp, Glycine max
  Clone ID: 701212102_FLI
gttatttataatgaaataaatggcatttgcaagagactcaaggcagtgcaatacccaaaatgaagctcactaccatcttaatcttcttcatctttgcccttccgttcacatttgctaacctgcgcgttggattctataccgcaacatgtccaagagcagagacaattgtaggtgaagttgtgcaaaggcgtttcagccaggataaatccattgtcgcagcccttcttcgcatgcactttcacgattgctttgttagaggttgtgatgcctcaatactaatagatccaacaagcactagaacatcagagaagattgcagggccaaaccaaactgttcgtggatttgagatcattgatgaagcaaaagcaatcttagaacaagcgtgccctttaactgtttcatgcgcagatatcatagcacttgccacaagagatgcagtggcactggcaggagggataaggtacagcatccccacgggaagaaaagatggtctattagccgatccttccttagtaatccttccagcaccatcattgtctgtacaaggtgctcttcagtttttcaccgcaagagggttgacactagaggacatggtgacccttttgggaggacacaccgttggttttgctcactgtagtgtgtttcaagagaggctttcaagtgttcaaggaagagttgatcctacaatggatcctgaattggatgcaaagctggtgcaaatttgtgagtccaataggccatcattgagtgaccctcgtgtgtttttggatcaaaactcttcttttttatttgacaatcaattttacaaccaaatgaggcttaggagaggggtacttcaccttgatcagcaattggctttcgactcattgtcaagggacattgtggaggattttgcggcaaatgatggtacatttcaagagagatttgcaaatgccatgataaagttggggagcattggtgttttggatggaaacgaaggtgatgtaagaaggaattgcagggcttttaatattcctctgtagaatgtgctattgcaatattacagagaaatgcctatgcaaaatcaataataacatttgaacgttatatttgtt

SEQ ID NO: 12794 - DNA, 1371 bp, Glycine max
  Clone ID: 701212136_FLI
tgaatctcagaattctctaaaagagatctttttctgctctttgaagaaagaagggtctttgcttgattttggagatgtctctgctctcagatctcatcaaccttaacctctccgataccaccgagaaggtgatcgcagagtacatatggatcggtggatcaggaatggacctgaggagcaaagcaaggactctcccaggaccagttagcgacccttcagagcttcccaagtggaactatgatggttccagcacaggtcaagctcctggtgaagacagtgaagtgattttatacccacaagccattttcagggatccattcagaaggggtaacaatatcttggttatctgtgatgcctacactcctgctggagaacctattcccactaacaagaggcacgctgctgccaaggttttcagccatcctgatgttgttgctgaagtgccatggtacggtattgaacaagaatacaccttgttgcagaaagatatccaatggcctcttgggtggcctgttggtggtttccctggacctcagggtccatactactgtggtgttggcgctgacaaggcttttggccgtgacattgttgacgcacactacaaagcctgtatttatgctggcatcaacatcagtggaattaatggagaagtgatgcccggtcagtgggaattccaagttggaccttcagttggaatctcagctggtgatgagatttgggcagctcgttacatcttggagaggatcactgagattgctggtgtggtggtttcctttgaccccaagccaattaagggtgattggaatggtgctggtgctcacacaaactacagcaccaagtccatgagagaagatggtggctatgaagtgatcaaagcagcaattgacaagttggggaagaagcacaaggagcacattgctgcttatggagaaggcaacgaacgtcgtttgacaggacgccacgaaaccgctgacatcaacaccttcttatggggagttgcaaaccgtggagcttctgttagggttgggagagacacagagaaagcagggaagggatattttgaggacagaaggccagcttccaacatggacccatacgtggttacttccatgattgcagacacaaccattctgtggaagccatgagcaaaacctgcatgttttctccctttggatggaaaggaacagttatgcttttcttagtaggatttggtctctctctctttttaccttttgattggtactatggttggtgccttgttggttggtgcaactaactggcaagggttgttcattgttttcttctattcctttccctcgttttccgattgttacaatgacaataatttaatggttattatcagtcttgaac

SEQ ID NO: 12795 - DNA, 748 bp, Glycine max
  Clone ID: 701212210_FLI
gcagtctctgcacccctccctccttgtttgtatcatatcaggcagctcagaaggcaaagatagatccatgtccaccaccgcaactacaacctctgaagaagttagcagcaatgagtggaaagtcatacacatgagcgagcaagaggaggatctcattcgcaggatgtacaagctagtcggggacaagtggaatttgatagctggtcgcattcccggtcgtaaagcagaagaaatagagagattctggattatgagacacggcgatgctttttctgttaaaagaaacggaagtaaaacccaagactcgtgattttctctggtcatgtatcttttctgggcataattctgctaaatatataaaattgggttaaatatatttttggtgtctataaaatttcttttttttttttggtctctgtgaattattttgtatatttttagtctcttgtttatttttttgttatcaatatcagtttcttaaattttttatacttttttctgccatttttaatctctttgatagactgatatttatgacgaaaaaattaataaatgatttgaaatagtaaaaaaatgaaatttcattagagttaaaaatatatttaaccctataaattctgttctaaatcttacagaattatcgtcaattgtatttcttgtcgttgagatgagaattaatgtacactttcgttaatcggtcatgagtatctcatatagaagctatggaaaagtttgcatgttggtttgt

SEQ ID NO: 12796 - DNA, 448 bp, Glycine max
  Clone ID: 701212212_FLI
gttggaagagtttcaaataaatccacttcaactgaatcctagtgctgaagaaatggggcatggacgctatccaggtcaaccccaaggccatgctctctttcaaccattggactgtgagccaaccttacaaattggatatcatcctgatccagtatcagtggtgtcagaaggcccaagcatgaataattacatggcaggatggttaccatgaaagagtgtcaagtgtggagcataattaaagatcgatcctgccgtttcaaatctatttcaagtcaaggaaaacggaaatttgtaatagcacgtaatggacttaattacacttgactcttccttctaattaatctaggaacaatataagcagtgattttgtgtgagctttcataaacagcacctagctagctagcctcctccatgtttcaataatcacttcttccttttcctaattaat

SEQ ID NO: 12797 - DNA, 804 bp, Glycine max
  Clone ID: 701212220_FLI
ctcatatcctcaatcaccccccctcgcactcgctcttcccttcctctggtggcgacaatgtcgactcctgctaggaagaggctgatgagagacttcaagaggctgcaacaagacccgcctgcagggatcagtggtgccccccaggataacaacataatgctgtggaatgctgtcatatttggtcctgatgatactccatgggatggaggcacgttcaagttgacactccaatttactgaggactatccaaataaaccaccgactgtacgatttgtgtctcgcatgtttcatccaaatatttatgctgatggaagtatttgtttggatatattacaaaatcagtggagtcctatttatgatgtggctgctatactcacatctatccagtcattgctttgtgatcccaacccaaattctcctgcaaactctgaagcagctcgaatgtttagtgagaacaagcgtgagtacaatcgaagagtgagggaaattgtggagcagagttggacagcagattaagttcatccttatatgcatgggaagctttgaaggcatgaatttggttgcagtgatggcaactataagaatgattgtgcaaactcatcacatttatattctctgctgatatgaatgatagcatcatcttatctttaatttattatagcttctgcattgcatatgtcagctaatgtaaaatagaattatgcgtgtcaatttactttcgattgttgtcagacattcaacatgaaaattatagtttgctgaactggttatgatttcatcaaggtttttgaaaaaattagcttc

SEQ ID NO: 12798 - DNA, 589 bp, Glycine max
  Clone ID: 701212261_FLI
caacacgaaagcatagccaaaacctttttcgaagtctctgattttcctaatggctccggcaaaggcagagaagaagccggcggagaagaagccagcggcggagaaggcaccggcggagaagaagccgaaggcggagaagaagatctcgaaggaaggagggagcgagaagaagaagaagcgcacgaagaagagcgtggagacctacaagatctacatcttcaaggtcctcaagcaggttcaccccgacattggtatttccagcaaggccatgggcatcatgaacagcttcatcaacgacatcttcgagaagctcgcccaggaagcgtcgcgtttggctcgctacaacaagaagcccaccatcacctcgagggagatccagaccgccgtgcgtctcgtgctccctggtgaattggccaaacacgccgtttctgaagggaccaaggcggttaccaagtttaccagctcttgaattagggtttgttaggcggttgtgttgcagatctagggttttctgtggatttcttttcttaaaaattagtttgtagatgtaatgatctgaacagttgttaatggaaggtttcgtttgaat

SEQ ID NO: 12799 - DNA, 1289 bp, Glycine max
  Clone ID: 701212272_FLI
cccccactccaacatgtttctcattccttttctaagtcgattaatatttacagagtgaagattttatttttctttctttctttggaagataaagaatgggttctaagtccgaaaccgtttgcgttactggggcttctggttacatcggatcatggcttgtcatgagactcatcgagcgtggctataccgttcgagccaccgtactcgacccagctgatatgagggaggtgaagcatttgctggatctgccaggtgcagagagcaagctgtctctgtggaaggcagaacttacagaagagggaagctttgatgaagccattaaagggtgcacaggtgttttccacttggccacccccgttgactttaagtccaaagacccagagaatgaaatgataaagcctacaattcaaggagtactaaacatcatgaaagcatgcctgaaggcaaaaactgtccgaaggctagtattcacgtcctcagccggaactaccaacattactgagcaccaaaagcctatcattgacgaaacctgctggactgatgttgagttctgccggagattaaatatgactggttggatgtatttcgtttctaaaacacttgcggagaaagaagcttggaaatttgcgaaagagcacggcatggacttcatcgctatccttccagctcttgtcattggtccctttctactgccaacaataccttctagcgtgatcagtgctctttcacctattaacggaattgaggcacattattcaatcataaagcaagctcaattcgtccacatagaagatatctgtcttgctcacatatttctgtttgaacagccaaaagcagaagggaggtatatatgcagtgcatgtgacgttactatccatgacattgtaaaattaattaacgaaaaatacccagagtacaaggttcccaccaagtttcagaacattccagatcaattggagcccgtgagattttcttccaagaaaatcacagacttgggattccaatttaaatacagcttagaggatatgtacactggagcaattgatacatgcatagagaaagggcttcttcctaaacctgcagaaattccagcgaatggcatcgagcataaataaatataggttttcatatctttgcctcggtgatggctatgaatgttgcttttcttgttcagtttctttaatgatgtttccgttttgtgaattcgtagtcaaaattgtaagtggtttgtaagaccaaattagttatctacaaattgtttaatattatcacaagacattttttacggt

SEQ ID NO: 12800 - DNA, 1035 bp, Glycine max
  Clone ID: 701212327_FLI
aagaagcaaacaacacaatgagttctgaaaatttgatttttatatttatttttattattttgataagcattagttcaggaaattgtgtagataggaataggaagaagcattatgttctggtgcatggagcatgccacggagcttggagttggtgcaagctgaagccacgcttggaatctgaaggccacaaggtcacagtgctcgaccttgcagcttctggcatcaacatgaagagaattgcagatgttgacactttctcgcagtactctgagcctttgttgcagctaatgaccacaattccctcaaatgagaaggtggttctagttggtcacagttttggagggatgaacatagcccttgctatggagaaatttccagaaaaggttgcagttggtgttttcttaacagcttttgctccagacaccgaacatcgcccatcttacgtcttggaacagaacacgtcgtctgaagacttggacaacgaatttgccccaagtggaaacaagacatcagtgctctttggtcctgagtacttgtccaagaagcaataccagctctctcccgttgaggacctagaattggccaagacattggtaaggccatcatcactcttcattgaagatttgtctaagcaaaagaacttctccaaacatggatatggttcagttccacgtgcctatattgtttgcactgaggaccttgcaattccattggaatatcagctatggatgatccaaaatgctgggatcaatgacgttctaatgatcaaaggtgcagatcatgcagctatgtttagcaagcctagagaactattcaattctctccagaagatagctacaaaatatgactaggctataggttactttcatctgtacgttgtgtttgaatttgacttgtgttacaattataagatctcgtttagaaacatgactcccatgagacaaataaataaagccatagtcttgcaactactgcgtcatttccgatccatacacgcagggatctgtataaattttatttgataaaaatagaatg

SEQ ID NO: 12801 - DNA, 2688 bp, Glycine max
  Clone ID: 701212338_FLI
atgcccaacggaaacttcttatctctgcctccattcattacccacgcagcgttcccgcgatgtggcctggtcttgttcaaacagccaaggaaggaggagtagatgtgattgaaacctatgttttctggaatggccatgagctttctccaggcaattattactttggaggaaggtttgatctggtcaagtttgcccagactgttcagcaggctgggatgtacttgattcttcgaataggcccatttgttgctgcagaatggaattttggtggtgtaccggtatggctgcattatgttccaggcacggtattccggacttacaatcagccttttatgtatcatatgcagaagtttacaacttacatagtgaaccttatgaaacaagagaagctttttgcttcacaagggggtcccataatcttagcccagatagaaaatgaatatgggtactatgaaaatttttataaggaggatggtaagaaatatgccttgtgggctgcaaagatggctgtttctcaaaatacaggtgtcccttggataatgtgccaacaatgggatgctccagatcctgtgattgatacatgcaattcattctactgtgaccaatttacacccacttctccaaacaggcccaaaatttggactgagaactggcctggatggtttaaaacttttgggggcagagatcctcacaggccagcagaagatgttgcattttctgttgctcgtttcttccagaaaggtggaagtgtacataattactacatgtatcatggaggaacaaattttgggcgtacagcaggtggtccattcattactacaagttatgactatgatgccccagtggatgagtatgggttacctagacttcctaaatggggacatcttaaggaacttcacagagctatcaagttatgtgagcacgtattgcttaatggtaaatcagttaatatctcccttggtccttctgtggaggctgatgtctatactgactcatcaggagcatgtgctgcctttatttctaacgttgatgataaaaatgataagactgtggaatttcgaaatgcatcatttcacttgccagcttggtcggttagcattcttcctgattgcaagaatgtagtattcaacacagctaaggttacttcccagacaagtgtagttgcaatggttcccgagagtttgcagcaatcagataaagttgtaaattcttttaaatgggacatagtgaaggagaagccaggaatctgggggaaggcagactttgtcaaaaatggttttgttgatctcatcaatactaccaaagataccactgactacctgtggcatacaacaagtatatttgtaagtgaaaatgaagagttcttaaagaagggaaacaaaccagttcttctaattgaatccacgggtcatgctctccatgcttttgtgaatcaggaatatgaaggtactggttctggaaatggtacacatgcaccattcacttttaagaatcccatctccctcagggcagggaaaaatgaaattgctttgctatgcttgaccgttggcttacagacagctggaccattttatgacttcgtaggggcaggactaactagtgtgaagatcaagggactgaacaatgggacaatagacttgtcttcttatgcctggacttacaagattggagtccaaggagaatatctaaggttataccagggaaatgggttgaataatgtgaactggacatctacttcagaaccaccaaaaatgcagccattgacatggtacaaggctattgtagatgctccacctggggatgagccagttggattggatatgttgcatatgggaaagggtctagcctggttaaatggagaagaaataggaagatattggcctaggaaaagtgaattcaagagtgaagattgtgtgaaagaatgtgattacagaggcaaattcaatcctgacaaatgtgacactggttgtggagaacctacacagagatggtaccatgttccacgatcttggttcaagccatctggaaatattcttgttctttttgaggagaaaggtggagatccagaaaagatcaagtttgtgagacgtaaagtatctggagcttgtgcccttgttgctgaggattacccctctgttgcactcgtttctcagggtgaagataaaatacagagtaacaaaaacattccttttgcccgtttggcatgccccggtaacactcgtatatctgctgtgaagtttgctagctttggaagcccatctgggacatgtggatcttacctcaagggagattgccatgatcccaattctagcacaattgttgagaaggcgtgcctaaacaaaaacgactgtgtcataaaattaactgaagagaatttcaaaagcaacttgtgtcctggtttatcaaggaaacttgcagtggaagcagtctgtagttgaataataaactaacgaactccggtgcaagagactcgtcactttgtgactgctgttgattaatattattgtcgattccggaggaacattgcatctcaccatttattttaccagcttggctacatcaaaaaagcagaagaaaattttgcatatattaatattaatattatcagcaaggtctctaatgtacaaatataatttatggcagagaaatctgctgtaaatacgatatctattaatcaatttggctttc

SEQ ID NO: 12802 - DNA, 1822 bp, Glycine max
  Clone ID: 701212376_FLI
ctgtcatatgatggagattggattatgatctaaatatatattatttagtattttaattttgatttcatatttaggaatcaagtgaattgcaatcagaagaaaataaagtctccaatgagaaaaataagaaaagaaagctgaaaacaccggcccagcttaaggccttggagaatttttataatgagcacaaataccccacagaggaaatgaaattagtacttgctgaggagttaggattgacagaaaagcaaatatctggatggttttgccacagaaggttaaaagataaaagattgatgaaagatgaagctgttgctaatgggcgacaagatcgttcaagtggtgtcatccaagatcgtggcagtggacttgggcaagattcatgcggaagcagtaagcatgctgatcacaggtatctggatcctaaggaggttgagagccatggcctctacaatcacgaattgtcagttgcagatatgactcatggatgtaggaaccgttatactgaaaatgttagcggggtggatgacacatcatctgagagcagctcatttttgcaagaaaggttgttttctcaaggtctggatccatatgatatggagccttctagacatcttacacctaacggagctcttccacccctaaatcccaaaggtgcagttaacatgggacacaaaccatcaggatatttgaaagtgaagggcgagatagaacatgctgctataactgctgttaagaagcaattaggaaggcattatctggaagatggtccactacttggtatagaattcgatctgcttcctccaggggcatttgaatgccaaactgcagatccagctaatgaaccatactctgctacaaatcctctgcttctgaattctccagaaatctctgctgcaaaaagacaacccagtattagctctagatatgattcatattatactaaatttagttcccaagatccgcatatggaaggagctgactttggttccttgcacgaaactgatttccaggataaacaagataagaaagcgcgccagaatataaaacaaaggcaacctttatacggttataccaatcattttcctggaaggaactctttcccagatttgtatgaagactctactggagaagcatctgcttataatagcaccaagagtcatagaatgagcactaaacatggtgttgaggggatgcgatctgattctgcttctaaccatagtgatcactatgaagagaagcttgcagttaagcagaaaggcttgatgctgcatggttatgataatatcaatctaaagaatatgcaaaggagtgaacatgtaaaatctaaacctcctagttcaatccgtaatccccgtgttcctatgatacctgaagaacgggggttatctgctaggatggcaaaggaagagatgtttaagggggacaggaaagcaaaaaatacatactgcaatgtagatggagcagggatgctttcaaatgaaattatggttgcaaaacgagctaaagttgacatgcttcaacaatacaatgtgaaaaaatcacctgttgctgagatggaacaaaggaaaattcagagatctgctgcagacttgccttctagctttagcgaggatgaaactgctgacaccaattcctcactggattattaagtgatgttgataaatgctaacaagtgtgtgggatttctctaagccattgggtatgtacagcctaaaatgacacatacattttctctgtaacgtgggaaccattgtttctggcagcaatggcagtgactcgctccatttgctgttttttgtgctcacctatttgcctttgt

SEQ ID NO: 12803 - DNA, 1795 bp, Glycine max
  Clone ID: 701212455_FLI
tgggttccaacggtggaagtagtaacaacaacaataataaggtattggaaaaaccaggtcaagatcagcttgtgcagcagcagcaacaacaacaagaagcccccaagtgccctcgttgtgactcatcaaacaccaagttctgctactacaacaactacagtttgtctcagccacggcacttctgcaaagcctgcaagcgctattggacaagaggtggaactctcagaaacgttcctgttggtggaggctgcagaagaaacaagcgtgtcaagcgtccattaataacgacaaacccttcttctgctgccattgacactgctgcttctaataattcttctaactcttcttctgctccactacaacccccgatcgacactgcttcaacctcaaatcacatcaaccctttgttttatggcttaccaagtagctctagcgatgtgaatcttccattgttctctaggttcggttctagaatctccagctccgggtttgatcttcagctgaataatgcccttggattaggtttttcatccggggttttgtccaatgaagctagtgataataacggttacagaaactggtttggttcaaacaatacgcttctttcaagttatacatccaccactagtactactactccagctatgtcttctcttttgagctcttctttgcttcaacagaagttcatgacagatggtgttgatagcaccaacactttccagcatggcttaggcttaaccccactagagcagttgcaaatggcaagtgatcatagcagtgaggcagggatggtggccttaaaagacgtgaaagtagaattaggacaaaacaacaggttggagtggaataatggtgctgcttgccaaagccagatccagcatgtgggcttgtacgatccttctctttattggaataattcagcggcaacagctttgggtgtttggaacgatcaagctgctaatattggttcatcagtcacttctctgatctagaaaaatacaaatccaatcgaatcaagaagtatggttttcaagtttgtctcccccttctgtctcgttgctgctactttcttctttttctttttgttcttctttcttttgggccaaaatgggtttttggtttacttaattaattacatcaaaatttaatgaaaagagaggaaaagtgatacttgtaagaaaatgggaaagctaaagcctaaaggtgagaggagtttggatcggagtgatcatgtcagctgcatcctgcaaatatatataaatttctcttcagccctgttggttttatgtgtcaaggtcgttgggaaaagaattgcatatattgctctgagaggaacctcggatcctcttctctcatcgtctcacagttgctgcgcagtagtgttctctatggaaatgctttgtgttgaattgaagttctccatagttaagtaagttggtctttcattttgttatgtacatatgcgatgacatttccttttcttttttcttgtcttgtaatgtactactatctgtgattagctaggtgaggtagaggatttactgggtatgatgctgtccttaaagaaaggaactaatattggtttcatttttgttaactttgtgatgatttttgttttggatagggtgagaatgggaatatattgggcatatctggtataatggtatagaagagagggggattatttacttggctttaggtgattaatgatttaatgtatgtcggtggtttggtgcttatatgtgttcaaccttgttctatctattggttctgagaaactaactttggtccatgc

SEQ ID NO: 12804 - DNA, 1817 bp, Glycine max
  Clone ID: 701212459_FLI
ctctcccttgcgtgtcgtttgcgtcgattatcctcgaccggagctcgaaaacactgttaatttcgtcgaagctgcttacttgtcttccaccttccgtgcttctccgcgtccactaaaacccttgaacatcgttattgctggcgcaggattggctggtttatcaactgcaaaatatttggctgatgctgggcataaacctatattgctggaagcaagagacgttctaggtggaaaggttgctgcatggaaagacaaggatggagactggtatgagacaggtctacacatcttctttggggcttaccctaatgtacagaacttatttggagaacttggcattaatgatcggttacaatggaaggagcattctatgatttttgctatgccaaataagcctggagagtttagtcgatttgattttcccgatgtccttcccgccccattaaatggaatatgggcaatattgaggaacaatgagatgctgacctggccagagaaagtcaaatttgcaattgggcttctaccagctatgcttggtggacagccatatgttgaggctcaagatggtctttcagttcaagaatggatgaaaaagcagggcgtacctgagcgagtaactgatgaggtgttcatagcaatgtcgaaggcactaaacttcatcaatcctgatgaactttcaatgcaatgtatattgattgctttaaaccgatttcttcaggagaaacatggttctaagatggccttttggatggcaatccccctgaaagactttgtatgccgatagttgatcatattcagtccttgggtggtgaagttcatctaaattcgcgcattcaaaaaattgagctaaatgatgatggaacggtgaagagcttcttacttaataatgggaaagtgatggaaggagatgcttatgtgtttgcaacacctgtggatattctgaagcttcttctaccagacaactggaaagggattccgtatttccagagactggataaattagttggagtcccagtcataaatgttcacatatggtttgacagaaaactgaagaacacatatgatcaccttctctttagcagaagtccccttctgagtgtatatgctgatatgtcagtaacttgcaaggagtattatagcccaaaccagtctatgttagagttggtttttgcaccagccgaagaatggatttcacgtagtgatgaagatattattcaagccacgatggctgagcttgccaaactcttccctaatgaaatttctgcagaccaaagcaaagcaaagattctcaagtaccatgttgttaaaacaccaaggtcagtttacaaaactgttccaaattgtgaaccttgtcgtcccttacaaagatctcctttagaaggtttctatttagctggagattacacaaaacaaaaatatttagcttcaatggaaggcgctgttctttctgggaagctttgtgcacaggctattgtacaggattctgagctactagctactcggggccagaaaagaatggctaaagcaagtgttgtgtaacaaaaacaggaattgaaaatgagtcatggtagaatacaggagcatcaattcaagattggtattctttatgtggtcaggactcaggagaataaaaaagaaaggctcaccgtcaactatgtgcaataagctatagggaacaaatgacatgtgtcgatacttgaaaattcagcgcattgttttgtatcctccaagttactggatcaatgtttgtattggaacgaaatatgccatcatttaaacttgtatatccagtaattttatatatcaagatttgtcac

SEQ ID NO: 12805 - DNA, 1177 bp, Glycine max
  Clone ID: 701212551_FLI
tagagaagtcccttaaataaatctgaatttccctgctttgcttcaccaccccccttgcttgcgtgggtagaaatgcaagaagcagggctgggaatgggaatgggaatgatgagcggagaagtatccgccgccggggaccaccaccgtcaagtgaaggcggagatagccaaccacccactctatgaacagcttctatctgcacacgtgtcatgcctccgcgtcgccacacctatcgatcagttgccgctcatcgacggacagttatcgcagtcccaccatctcctccgctcttatgcctcacaccattcccattccctctcgccccatgaccgacaagaacttgacaacttcatggcacaatatttgattgtgttatgtacgttcaaagagcagcttcagcaacatgtgagggtgcatgccgtggaggctgtgatggcctgccgtgatattgaaagtaccttgcaagctctgacaggagtcagtttgggagaaggaacaggtgcaacaatgtcagatgatgaagatgatttgcagatggatggctctttagatcagtctagcgctgacgggcatgacatgatgggatttggtccattgcttcctacagaatctgaaaggtccctgatggaaagagttcgtcaggagcttaagattgagctcaagcagggttttaagtcaagaattgaagatgttagggaggaaatattaaggaagcggagagctgggaaattaccaggtgacacaacatcggttttaaaggcctggtggcagcaacatgctaagtggccctacccaactgaagatgacaaggcaaaacttgtggaggagacagggttgcagctgaagcaaatcaataattggttcatcaatcaaaggaaacgcaactggcacagcaactctcaatcggttaactctctgaagtccaagcgcaagagagagtatgcccactaaggattccagtctggtgcagaagataacaggtgatgcactacaacataagatggcttacaatagtgatggttgtaaattcttggaatacataacggatacaaactattcttgttgtgcacggtcgcctccatttctttcaagtgtttttttatttgtaaatttgtttgctatgatttgactggctgaagaagtatttttagcagctgaaagcctgaaagtgtttcct

SEQ ID NO: 12806 - DNA, 1182 bp, Glycine max
  Clone ID: 701212620_FLI
gcttgtgtctctcacgatccattggtgatatggatgttggtgaatttattgtccctgtaccacatgtaaagcaagtgaagctttccactgctggaggcaggattattctcagcagtgatggtgtctgggatgctctaagtgcagaaatggcccttgattgctgtcgtggcatgccacctgaggctgcagcaacccatattgtgaaagaatctgtgcaagcaaagggacttagagatgacacaacctgcattgttattgacatattacccctggagaagccacctacttctgtgccaacacaaaagaaaccggtgaaaggaatgcttaagtctatttttcgcaaaaagtcctctgaatcatcaacttttattgaaaaagaatacctggagccagatgtggtacaggaactatacgaggaagggtctgctatgctttcagagaggttagaaacaaaatatccactttgcaacatgttcaagttgttcatctgtgcagtgtgtcaggtagagattaaacccggggagggtatttccatacatgagggtctgactaacccaggaagattgcgtccctgggatgggcctttcctttgctcaagttgccaagaaaagaaagaagctatggaagggaagcgaacatcagatagacttagcagcgggagtgactgatgaattatcatgtacatttgcattttgagaatgacagattgttttaatgggaaggtcaaacttccacgcaacagtgacccccctcgattaccttggaggcttctcaggatacgaatctattttggaaatccacatgataatcaatatggagttttgtgttgttcagtcaagagattaaccaacaattgaagcttgttagaagaattctgacttagaagagaggaatatgaaccatccaaatgttgtagtaggttgtgttaaaagtgggaatgcacatttgtatataggtcttcggaatctcgaaatgtacctttaatggaagtggtctttgttgttgtattgttctacatggagggttttcaattttttgggggtccatacaagtaagtttatttagacgtcatatagatcatttccactaaggcttctgaacgatttttttattcttgtagccattcagttttgataatttcttttaccattccaatattaactttatgtaattgaaaatttg

SEQ ID NO: 12807 - DNA, 1726 bp, Glycine max
  Clone ID: 701212714_FLI
aaatttttcttctctcccttctttctctctctctctctcgaccattctcttcttcttctttttcttctcctctctctctctcccctccgccatggctgaggataaggagatgtctacctctgtcatcaatgggaatgattccctaactggtcacatcatatctacaactattggaggcaaaaatggggaacccaaacagactattagctacatggcagaacgggttgtaggaactggatcatttggaatcgttttccaggcaaaatgcttggaaactggggaggcagtggcaattaaaaaggttttacaagacagaagatacaagaatcgtgaactgcagttaatgcgtgtgatggatcatccaaatgtgatctctttgaagcattgtttcttttcaactacaagtacagatgaactttttctcaatttggtgatggagtatgttccagagtccatgtatagagtcttaaagcactatagcaatgctaatcaaagaatgccaatcatctacgtaaaactttatatgtaccagattttcagggggttggcttacatccacactggtcccaaagtttgccacagagatttgaagcctcaaaatatactggtggatcctcttacacaccaagtgaagctatgtgattttggaagtgcaaaagttctagtcgaaggtgaagctaatatatcatacatatgttcacgattctatcgagcaccagaacttatatttggggccacagagtataccagttcgattgatatttggtcagctggctgtgttcttgctgaacttcttttgggccagccattattccctggcgaaaatgcagtagaccagcttgtacatattataaaggtgcttggcacacccacccgagaggaagtacgctgtatgaatcccaattacaatgactttaggtttccacagataaaagcacacccatggcacaagatattccacaaaaagatgcctccagaagctattgatcttgcatcccggcttttgcaatactccccaagtctccggtgcactgcgcttgaagcatgtgcacatcctttctttgatgaacttcgtgaacctaatgctcgcttgccaaatggtcgtccatttccccctctatttaacttcaaacaggaattatctggagcatcttccgagcttgttaataagttgatacctgaccatgtgaagcggcaaatggggatacagtttatgcatctgggaggatcgtgacgataaagcttaggggacatagtgtatactagctgataagttaaaaaaaagtggcaccattattttttgtcttaataccatgttctgtgacctggcgaatgtagtttcaagctgaaccgagactgagattcgcgatgccggatggccgcagttgatccgtcagtatatgtaccttttgattcccttgtgctaactggtggatctttatttccccaggcatatatagccttgtttattgtaaacgtctacaatgtcatagtaatatttgacctgaaatggtcacacagatcagaactcagaatgcttctgtttggggaaaactaaagccttggctggaaggaggggagggtcgagaagagtttttttgatggtggggtttgttggttggcttttgtttcctcttgttaatatgtgcctcatttgcaatgttgcacaatgcacaccagttcctttccttgtgaaatgtaatgtggtatctatctgtttttcttc

SEQ ID NO: 12808 - DNA, 3018 bp, Glycine max
  Clone ID: 701212729_FLI
gccgcttctgtttctttgttctctccttctcttacagagcacacgccgcttgcaaaaccgattcttgacgctactcacgacttttgacagaagatggcttcaagattctggactcagggtggaagtgattccgaggaggaggagagtgattatggtgaggaagatgaacactcggcgggtgaacaagctccgaatcaagacgtgacaagcaagtactttgtggacaatgcaagtgacagtgatgattccgatggccaaaagcgcgttgtgaggtcggcgaaagataagcgattcgaggagatggtatccactgttgaccagatgaagaatgccatcaagatcaatgactgggtgagtttgcaagagagctttgacaagattaacaaacagcttgagaaggtcatgcgtgtcaccgagtctgagaaggttccgaatctgtacatcaaggcgcttgtgatgctggacgatttcttggttcaggctttggctaataaggatgccaagaagaagatgagtagtagcaatgccaaggccttgaactccatgaagcagaagttgaagaagaataataagcagtatgaggagttgattaccaaatgcagggagaatcctgagagtgaggaggaaaaggaagaggaggagagcgaggacgagtatgagagtgatgatattgagccggagcagcttccggaagcaaaatctgattctgaagcctctcagtatgacaatgaaaagcaagatgctggtgatggtccttgggaccaaaagcttagcaagaaggaccggcttttggataaacagtttatgaaagaccctagtgagatcacgtgggacactgtcaacaagaagttcaaagaggttgtggctgctaggggccggaagggcactggcagatttgaacaggttgagcagcttactttcttaacgaaggttgcgaagacagctgcacagaagctggaaattctgttcagtgtggtttctgcccagtttgatgttaatccagggctcaatgggcacatgcccataaatgtatggaaaaaatgtgtgcaaaacatgcttgtcattcttgatattctagtgcagcatccaaacatagtggttgatgattcggtggaaccagatgagaatgagactcagaaaggggttgactataatgggccgattcgggtttggggtaacttggttgctttcttagaaagaattgatgttgaatttttcaagagcttgcagtgcatagatcctcatacccgggactatgttgagagactcagggatgagcccttgtttctggttcttgcccagaatgttcaggaatatcttgaaagagttggaaatttcaaagctgcatctaaggtggccttgaggagggttgagctcatttactacaaaccacaagaggtttatgttgcaatgaaaaaattgactgagctgacagaggatggagataatggagtggaggcaagtgaggagaaaggatttgaggaatcaagaattcccactgcatttgttgctaccccagaggttgtggcccggaagcccaccttccctgagaatagcaggaccataatggatgtattggtatcattgatatacaagtacggcgatgagcgaactaaagcacgtgcaatgctctgtgatatataccaccatgctcttcttgatgaattctcaattgcccgtgatctgctgcttatgagtcatctgcaagatagtgttcaacatatggacatttcaacgcagatactttttaacagagctatgtcacagttgggtttatgtgcttttcgggttggactgatttctgaagcccatggctgcctgtctgaactgtactctggtgggagggtgaaagagttacttgcacaaggtgtgtcacaaagtcgctatcatgagaagactccagaacaggaaaggttggaaagaagacggcaaatgccttatcatatgcacatcaatcttgagctcctggagacagtacatcttgtatctgctatgctgctggaagttcctaatatggcagccaatgttcatgatgcaaaacgcaactcatatctaagactttccgtcgcttgcttgaggtgagtgacagacaaacattcactggtccaccagaaaatgtaagagatcatgttatggctgccacgaggtttcttagcaagggagacttccagaaggcttttgacattattgtgtctcttgatgtgtggaaatttgtgagaaatcgagacactgtgcttgaaatgcttaaggacaaaatcaaggaggaggcattgaggacatacctctttaccttctcttcatcttatgaatccttgagcctggatcagctcacaaaattttttgatctccctgtttcttgcactcatagcattgtcagtaggatgatgatcaatgaggagcttcatgcaagctgggaccagccaactgggtgcattcttttccaagatgttgaacactctaggctgcaggccttggcattccagttgacagagaaattatctatccttgcagagagtaatgaaagagcaacagaggcaaggataggtggtggtggattggatctgcctctaaggcgcagagatggccaggactatgccgctgccgctgctggtagtggaacagcctcgtcaggtggtagatggcaagacctgtccctttctcagccaaggcaaagcagtgggcgtgcaggatatgttggtggtggtggaaggccaatggcattaggccaagggagtggctattccagggatcgatcgggacgaggatcaggtgctggctatcagagtggacgatatcaggggggttcagcattgaggggaccccatggcgatgtatctacacgcatggttagccttaagggtgttcgtgcttagagaagttcaaaattatcttctgtacgccagttttgataatttgactaaatgcactatagcatttctggttttcatttctgtaacattttacttctggattttgtctaaatttgcattgaaatgtatgatcggagcttgtggattt

SEQ ID NO: 12809 - DNA, 1215 bp, Glycine max
  Clone ID: 701212767_FLI
aattatacctaggtttcaggttcatcaagcattttcttattcctttgtagtgcattggaatggaagatcagggtcagcagcagcagcagcagcatcaagtggaggcaaagagtccaaggcaaggcaccgagaggagtgaagcggttcggtcaaggtggactccaaagccagaacaaatcctcatactcgagtccatcttcaacagtggcatggttaaccctccaaaggacgaaaccgtcagaataaggaagcttctcgagaaattcggcgccgtcggcgacgccaacgtcttctactggttccagaaccgccgctccagatcccgccgccgccagcgccagatgatgcaacagcaggctactgccaccgccaccgccaccgtcaccacctttgatcaccctcagcctcagactcagactcttgttaatgttggtggtgcaattccacatgatcaccacaccttgggaaaccttgttgttgcaactgaaagtagtgctacttcaaccatgggttttggttgttcttctcaatcttcttatggttttcttggttcctcttcttcttcttcttcttgtggtggtggtgtaattggtggccaacaacaaggcatggatggtttcttctcatcggtttcttctcatcaaatgggtttccctgatcaccaccacacttcacctgcttcatcagctttgtaccctcctcttgatccaaatttgacctaccaggctggatatgggggccctaatatttcaggattcattacagtgtttatcaatggaattgcaactgaacttccaaaggggccaatagacctcaaaaccgtgtttggagaagatgtaatgttagttcattcctctggagttccaattcccaccaatgaatttgggttcttgatgcataaccttcaacatggcgatagctactttctggtatcaaagccaacataagtatgaaaacatcaacctagcatcaatggaagcttccgtttagtgtttctctgattgcctttgtctgctcagcatgtccttttaactatttcttcgtaatttcatgtgtctcaaacaatagacataatatctattgtgtgattatagaagtcaatatctatatatgtaccttagcaaatatatatactgtaccttcttatctttgtttttagcacaaacatgtttttttcaaactctatattatcatcaagttgtgtaaattaagcat

SEQ ID NO: 12810 - DNA, 997 bp, Glycine max
  Clone ID: 701212768_FLI
ctctgagcgtgagaaagagaaggggaagaaagagagagagtgatgggaaggggaagagtggagttgaagagaattgagaacaagatcaacaggcaagtgacctttgcaaaacgaaggaacgggcttttgaagaaagcttatgagctttccgttctttgtgatgccgaggttgctctcatcatcttctccaatagaggaaagcagtacgagttttgcagcggttcaagcatgctcaaaacgctggagaggtaccagaaatgcaactatggagcgcctgaggacaatgtggcaacaaaggaagccttggagttaagcagtcaacaagaatacttgaggctgaaagcacgttatgaagctctacaacgttctcaaaggaaccttatgggagaagatcttggccctctaagcagcaaagagcttgaatcacttgaaaggcagctagattcgtctttgaagcaaatcagatcaataaggacccaattcatgctggatcagctttctgatctacaacgtaaggaacactttctaggtgagtcaaacagagatctcagacaaaggttggaagagtttcaaataaatccactccaactgaatcccagtgctgaagatatggggtatggacgccatccaggtcagccccaaggccatgctctctttcaaccattggagtgtgagccaaccttgcaaattggatatcatcctgatccagtatcagtggtgacagaaggcccaagcatgaataattacatggcaggatggttaccatgaaagagtgtcaaatgtggagcataattaaagatcctgccgtttaatttcaaatttatttgaagttaaggaaaacggaaatttgtaatagcacgtaatggacttacactagactctaccttctaattaagctaggaacaatataagcagtgattttgtgtgtgagctttcataaacagtacctagctagcctcttccttgtttcaataatcacttcttccttttcctaatt

SEQ ID NO: 12811 - DNA, 2608 bp, Glycine max
  Clone ID: 701212811_FLI
ctcctccatttctcagaaaccctctcgaatgactgagtcaatgcccgccgtggaaccgtcgccggagcctccggcgtccgatatcgtgttcgatgacttctccaccgacttcagcgccttccccatcccctccatggactcgctcttcaacactactgatgggctccccttcccctccgatctcgaattcggcatggatttcaacaacaacaacggagaattcgaaatcaccttcgacgacctcgatgacatctacatcccctccgacgccgaggatttcctcctccccgacgcctgtaaccctaattacgcctccgtttcgccgcccatcgacgattcctccgcgaagaattccgattccgacgcatccgcggtttccggcgacggcgtttccaggtttttcaattcgcaagtgtcggaatctgattccgccgataatgttagggttccgagcgttccttcgccggaggctgaattctgcgaacgggaggagtcttccaacggaccggtttcgtcgcagggttccggcaacggcggatcgggtgtatacgaggccatgcactcgccctcacctgattctggcccttacgagagagacataacatcgtttcatgcacatgcagctacaaacaatggtgtgaaaatggaggaagttccagcttttgatctgaagaggaagaaagggagttgcgagggaagtgctaccaagcacagaaggttctcttcctctgtggagaataataataataataagactgagaaacagtttcaatctgatttgaatggaattgaagacgaggatgagaagaggaaggcgaggttgatgaggaacagggaaagtgcacagctttctaggcagaggaagaagcattacgtggaggagcttgaagagaaagttagatcattgaattccatcattgctgatatgagtagtaagatgtcgtatatggtggctgagattgctactcttagacagcaagtgggtgctgctgctggtgtgatgtgtcctcctcctcctcctcctgctcctgggatgtaccctcatcatcctccaatggcacccatgccttatccatggatgccatgtgctccttatgttgttaagcctcaagggtctcaggttcctttggttcccattcctaggttgaagcctcagcaacctgcttcagcccccaagagtaaaaagagtgagagtaagaagagtgaggggaaaactaagaaggttgctagtattagtttgttgggtttgtttttctttatcatgctttttggtgggcttgttcctgttgttgattttaggtttgggggtttagtggacaatgttcccggtactggtagttctaattatgttagtgatagggtgtatggtcatggtggagggaaggtttggtctttgaatggtcctaggaatgggtctggaagagatggggatgtaggattttctaatgggaggtttagtgtttctgacagagtgaagaattatgagaagagaggccggaatttaagagaagaaaggcatgatcggaaaggcccagatgattccagtcgtcagggcaatgctagtgagccccttgttgcttctctgtatgttcctaggaatgataagatggtgaagattgatgggaacttgattatccattccattatggccagtgagaaagccatggcatctcaaactgctgaggcaaagaaggacaagagggaaactgggttggccattcctaaggatttggattctgcattggctattcctggagttggaagaagcagagatcaacatccacatgtgtatagggtttctcctgaacagaggaaggctcttggctctggttcaaccaaagctttgaaggaccatatgaagtcctctgcaactgatggtaaaatgcaacagtggttccgtgaaggtcttgcagggccaatgttaagttctggcatgtgcactgaagttttccagtttgatgcttctccaagtcctggagcaatagttcctgcaacatcagtagccaatgtttccaccgaaaaccatcagaatgctaccagtgttaagaagaccaggaatagaagaacccttcatgagctcccagagccgcttaatgggtctagtctgaacataactgaagaacaagtgaaaaatttgcagaaagaccacttccatggtaacaagtcttctatggtggtttcagtccttgttgatcccagagaggctggtgatggtgatgttgatgttgatggcatgatgaggccaaagtcactctctcggatttttgtggttgtgctaattgatagtgtcaagtatgtcacttactcgtgtggtctgcctcgtgcttctcctcatttagtgactggttatgtatgacaatccatccttcggtaaaaagttttgatgcagccgaagcatctaacctgagttgttctagtttctgtaacaaaggatgtgggggactgggaaggaaagaaactcatctccagttttgtacatattaacatatttaaagtagcagtcttaaaaatgtacctgagagaatttagaagctgggcttgaccaactgcgtgtactgagttgagacctttcttagaaacttaataatatatgcccaccttaagtttt

SEQ ID NO: 12812 - DNA, 1024 bp, Glycine max
  Clone ID: 701212864_FLI
cggaggcatacgcttaggaataacgcagccatcgcaaaataagcgcacggatcaatgacatggcaataaatttaaattcccgcctaaacccctgacctccccttgatttcatttcgtttgcaattgaatttcaatttccctaggggcttaatatctccgctcacttgtgcctagccttatgtcatagtattatcattcattcgcatctttctctcttctctctccacccaaaccctaactcccgaccctgttcccctctcgtatccgtcatgaaaggaggaaagtccaagaccgaatctaagagagccgatcccaaacttgctgtgaataagaagggagccgccaccaaggctaggaaacccgccggcaaggggaaggcagcgaaagaccctaacaagccaaagaggcctccaagtgctttcttcgttttcatggaggagttcaggaaggtattcaacaaagaacatcctgaaaacaaagcagtgtctgctgtgggcaaagctgctggagcaaaatggaagaccatgtctgatgctgaaaaagcaccttatgtggcaaagtctgagaaaaggaaagtggagtacgagaagaacatgagagcctataacaagaaacaggcggaaggtcctactggtggggatgaagaagaatctgagaagtctgtatctgaggtgaatgatgaagatgatgatgaggaaggcagtggcgaggaagaggatgacgattagagaatggactgataattgcatttatgtaggttctgatgattttgatcatctgttgtaggtggtctggtcatttcctgataaacatatttcttgcttccaaaaaatatttccctgctccctccgtaaattggttgtctttccaaaacgtgaatagtttaaagaagggagttctttatttgtacttctaaatccaactgtttagttaaggggtgtttatctcttgtagagcttttagtttgatttagagttttcttgttgaaatctggttaagtttgtatcaatataattggcttatc

SEQ ID NO: 12813 - DNA, 1029 bp, Glycine max
  Clone ID: 701212931_FLI
caaatttcttggctccaatctcaactctcgcgacccctccgtcacccccttccttcatgagctccaggcaaggatcatccgccaccacaaccaggctgatgctgaccccaaccccaaccccaacgacgccatcaagattcttcccttcgagttcgtttccctcgaggcctgtctggaggctgcttgtagcgtcttggaaaacgaggctaaaaccttggagcaggaggctcatcccgccttggacaagctcacctccaagatcagtactctcaatttggaacgcgttcgtcaaattaagagccgattagtcgccatcaccggtcgtgttcagaaggtcagggatgaattggagcacctgctcgatgacgacgaagatatggctgagatgtatctctctgaaaagctagccgaacaacaggtcttggatggcgacgtcgtcgtcgtcgacgacgacgatgacgacgacgatacctcttctgccgacaacggcgatcttcttcaacctcacaggaccgctcctgaattatcgttcgacaatgttctcggtagggacagcgcctccttcagtgccgtcaccaagcaacttgatgtcgaggagcttgagatgctcttggaggcttactttgtccagattgatggcaccttgaacaagctctctacgctgagggagtacgttgatgacacagaggattacatcaacatcatgctggatgacaaacagaaccatctcctccaaatgggagtcatgttgaccacagcaactctggtagtgagcgcctttgttgttgtggcgggtatttttggcatgaatattcacattgagctatttgatgaccagaaagcggggatgacgcaattcctctggactgttggtggtagcactgcagggaccatattcttgtatgtggttgccattgcctggtgtaagcacaaacgcttgctagagtaaccaggcatcaaatagtgtttcataaacaaatgtaatttaatttggaaatcactttttattcatatgctataaattttaat

SEQ ID NO: 12814 - DNA, 1987 bp, Glycine max
  Clone ID: 701213003_FLI
ggacgtaatcatgggtgtttcttcatcatcgacacaaaaattagtctttatttttttgcttttacagaaggtgggattttgactagctgggtgtttggctgttgagtttatggagggccaagttccttgttgaacagtgtttgtgttgcctttatctgcagcttttaattgaaccaatcctaccctctttgtttccatatgaaaagatcggttttttgtgattcctccgctcattgttgttgaagggtctcgtgaaatcaatctagttttgagacctgtttactggcagaggtgacggagtttcagttttgtaagtgcatgatcataataataaggtttttatagaaaagaaaagttgagaataagatgggggaagatggtaattcttggattaggaggacaaatttttcacacacagtgtgccatcgtttggatcctgctagattaggctctattcctatcagtgttcagtcagagcagaaatcaaggccttcctcaaaggctcagagacaccctatgacatacaagcagagatctttgtcaccattgcctgagacttatctttctgaggccttcagggaagctagacttgaacagaaaaggttctccacaccgaatccccggagggaaaagaggattatggggaagttgttgaacaaggattctcgggagactaaggaatcaagttcaaagtcaccttcgcgtagtccaaataggcaagtgaagtcaaagaaccgcaaggattcagcatggactaagcttttggacaatggtggaggaaagattactgctgtggaaacagctgaagagtggaatgttgacatgtctcagttgttttttggcctaaagtttgctcatggtgcacatagtcgactttaccatggtgtatataaggatgaggctgttgctgttaaaatcattatggtacccgaggatgatggaaatggagctttggcttctcgattagagaaacagttcattagagaagtcacccttttatctcgtcttcaccatcaaaatgttataaagttctcagcagcatgtagaaagccaccggtttattgtattatcacagaatatctggcggaaggatccttgagggcatatttgcataaattggaacaccaaactatttctctacaaaagctaatagcttttgctctggatattgctcgtggaatggaatatatacattctcaaggtgtcattcatcgagaccttaaaccagagaatatccttatcaacgaagacaatcaccttaaaattgccgattttggcattgcatgtgaggaagcatcttgtgacttattggctgatgaccctggcacctaccgttggatggcacctgagatgatcaaaaggaaatcctacgggaaaaaggttgatgtctacagttttgggcttatcttatgggagatgttgactggaacaataccatatgaggatatgaatccaatacaggctgcttttgcagtagtaaataagaattcaagaccgattattccatcaaactgccctcctgcaatgcgagctctaattgagcaatgttggagcttgcaaccagacaagaggcctgagttctggcaggttgttaagatattagagcaatttgaatcttcacttgccagtgatggaaccctgagcctggtgccaaatccttgttgggatcataagaaagggcttcttcattggattcaaaagcttggtcccttgcaccaaaatagtggccccgtgcctaaacccaaattcacatgaatctttcaagtgtcctggcttttattgtaacaccaggtccattgtaattaaaaatgaaaggtttgttttttcaggttctctggttgtagtcactttatgaaatttctatattgatttttaggcttgcaagtaaaggtgaaagcatcctttttttgcgcagtgtgcatacaaaacttatgaaactctggcttcatgtgtagttggttgtagttgacacttcatcccaaaattt

SEQ ID NO: 12815 - DNA, 1642 bp, Glycine max
  Clone ID: 701213026_FLI
ctcacttcaaagttcaaagttccaagttccaagttccaagtttcaagttccattacacaacacacctattttagttgtagacaaagccacataaatagacccaagaggtttaacttaggcaacgacgagacgcctctcttatcctccacttccagtttcaaccatgtcctgccggaaaagacaaaagacttcgccggacaaaacctccgacgacttcttcgactctctccccgacgaccttgtcctctctatcctctgcaagctcagctccaccgcaacttccccctccgatttcattagtgtcttaataacgtgcaagagactaaactccttaggccttcactctcttgtgttatcaaaagcttcccacaaaacattctcagtcaaagccaaaaactggtgcgactctcttcaccgtttcctcaaacattgtgcagatgccggaaacattgaagcctgttacactctcggcatggttagttaataggagttacttaatctcacttctttttttttgttgaaataatattatcttttttaaatgttgaccaaaagtttgagtctttgcctcttggggctattattatttgtttgcagattcggttttactgcttgcaaaacagagggagcggcgcgtcgctgatggcgaaggcggcgatgaactctcacgcgccggcgctgtactcgctcgcggtgatacagttcaacggaagcggcggcaccaaaaacgacaaggaccttcgagcgggtgtggcgctttgcgcacgcgctgcgttcctcggtcatatcgacgcgctgcgtgagcttggtcattgcttgcaagacggttacggcgttaagctaaacgtaacggagggacgacggtttttggtgcaagcaaacgctcgtgaactcgccgccgtgctctccgccgggaataccaagcgcccctggctgacctggagccaccaccctgtcacccacccgcggctccggtcgggttgcccgttgatgagtgattacgggtgcaatgttccggcgccggatgctcacccggcgagtcagtttatgtcggagtggtttgatatccggggcgggtttccgggtccggatatgaggctttgttctcattcgggttgcgggcgacccgagacaaggaggcacgagtttcgaaggtgttcggtttgcggtttggtgaattattgctcacgcgcttgtcaggcgcttgattggaagttccggcacaaggcggaatgtgctaccgttgagaggtggctcgatgacgacggcgaaggcgtcgccggtgagaatgacggcggcggagatgacggggtaatgatggttaatagttagaagactagactatttttacaaacgttaacggtaaatgaagtctgcttggaagtttcaacgggtatgaatttattttttacatggggtaaaagaaaaaaatctcattttttgccgtggttatgcgaagtgcaaacttcaatgacagtgttttgcttcgacctctgttccttttactttttctgttactgttgtatagaaccgtaaatgaattctcctgaaaaacaaaatgaaggagatagtttttgttatagagcaactatcatccttgattaattgttaattctggtaaattatagtgtatgaacttttt

SEQ ID NO: 12816 - DNA, 2447 bp, Glycine max
  Clone ID: 701213039_FLI
gtccattctctctctcaatctcatttctctgtctctgcttcctcttcttcgatctcaccctgaattccctggacaatcatcatggctgacaaaggaggaaaatcatgtcccatatgcactgaggagatggacctgactgatcagcagctgaagccatgcaaatgtggttatgagatttgtgtctggtgttggcatcacataatggaaatggcacagaaggatgaaactgagagccgttgtcctgcctgtcgttcaccttatgacaaagaacgtattgtgacaatggcagcaaactgtcaaagattggtagctgaaatgaattcacagcataaaaagaaaatgcagaaattgaatttgaagcctaaatcagtggatggaaggaaacatcttagtgatgttagagtcattcaacgtaacctagtgtacataattgggctgcctctaaaccttgcagatgaagaactacttcagcgcagggaatactttggcaggtatggaaaggttatgaaagtgtcaatatctcgaacagcaaatggcataatccaacattctgcaaacagcagctgttgtgtgtatataacatactctaaagaatctgaagcagttcaatgtattcaatcagtgcattgttttgtattagaaggtagacccttgagggcttgttttggaaccacaaagtattgccatgcatggttgagaaatgtgccttgcagcaatagagattgtttatatctacatgatcatggttctcacgaggatagctttaccaaagatgaactagttttagcatttgctaggagtagagtccaacaaatcattggtgctacaaataatttgcatcggcgttcagggaatgttttacctccaccagtagataatcctaaacatatgtcatcagccaccaaactagtgtcccaaagtcctttagataaatgtgagaaccagattaaaggatttgcttcaggtattggggctgtcacttcaactgtgcttcctgctgtgacctcttgggttaggtgtgtgtctggcaatcttccacatgatacaagttcatcatgttctggtaatctggcaaatagaaagattgaggcatctaatgatccacaagcccttgtgtccggagttgcttccactgaaaggtctattaatataagaaaatcaggggaagctgaaaatagctctgatgtgtgttccaatggtgccttcgtaccttcagagacgaacaaccataatagtggtggaaattctaaaacatcttttatggacaatgatcaagatactgtagcaccttctgtgagcacaggcttcctggagctctccaggcaacatgatttcaatattgatactgcagttggcattaattcaaatggggatgttcatggcttatgttcagggttatcatctattagcattaatattcatctagaagattcatatttaactcctgattcagacggattaccttttactcgtaactcaatcgattcctctctagggcagcatttacagcaagataatgagtattcaacagaacattcatccacaccagcattttgggaagatatcattgtggatgacgtactaaacatagactctaaacaacaaaaattcagcaaaggcatcaattattcgtcatcatctgggctccattctagttgtctaactcagaatgtaaaccactcaagccatcaaccatttcagcaagatcaaatttgtcaccagaatcatttcagaaaaccttctactgagtcttttaatgaacacttggagacaggacatgttaaatatggggagagtaaagataatggtgcaggtgttgatagtatggttgcttcagacatgggagagaacaacattatatctgatattttgtctttagaattagatgcatgggaaggttcattagttaatttgttgggtgagagtgatgaactgtacagaccctttaaagcacctattttgcggaaagtccaagacaaaaatcagtcaaggttttcctttgcaagacaggatgatttcatgaatggggcatctaatttgctgcaatcatttgcggttactggacgggatcctgaagggaacttttcatcaggtgctttaatgggaaacaaagatacactcactggaaaatacccacatgtcttcccatctggcaattctgtaccatcagataaacttgttggaagtcagtctttggtgccatctaatttttcctgtgagtgctgattaatgacatgattaagtgctcctttttgtgagtgtgggggatagaggtccatttctttcaggtttttgttgttatcatgattggttatacttatctgagtctgtatacacaattcttgccgatatatttcgtgtttggtgttctaatttctatttctctggtttggcattcttatttactgtgatattctgtttgttctattagtattacttggttgttc

SEQ ID NO: 12817 - DNA, 1076 bp, Glycine max
  Clone ID: 701213070_FLI
caacaaccttagcagttaattagcacaacacaaaaggagagagagagagagagagagagagagagagagagagagagagagatggggagaagcccttgttgttcaaaggagggtttgaatagaggtgcttggacagctcatgaagacaaaatcctgagagaatatattagagtccatggtgaaggaagatggagaaaccttcccaaaagagcaggtttgaaaagatgcgggaaaagttgtagacttcgatggttgaattatctcagaccagatattaagagaggcaatatatccccagatgaagaagagctcatcatcaggctccacaagctcctcggaaacagatggtctttaatagctgggaggcttccaggacgaacagacaacgaaataaagaattattggaacaccaatttagggaaaaaggtgaaagatggtcaccaaacaaccactggaaacaacacacagaatccaatgcccaacccatcaccctccctatctcctcctaaactagattcccatgttgtccgtacaaaggctaccaagtgctccaagttgttattcctaaacccaccccctcacccatcaatgcagaacaagttcaagactgaggcagaagaagaagaagaagaagcaaggcttgtgaatggtgtaattagaaaccaaatggaacacactacatacgacaacgggttcctgtcgtttccggatgaagaaaaagaactctcaacagatttgctcatagatttcaacgtgggggatttctgcttgtctgattttctcaactcagatttctcaaactcgtacaatttcagctgcaatattaataatgttaacaaccacgagcagttatcgccttgttcggaccaacctgatcctatgttctctgatgaagttctcaaggactggacacacagcaattttgcagacgaagcgaatgcttccaacaatcttcgttctttcatttcgttccttgagtccactgaggaaagattaggagaatgataatggcaacaaatattgtacttttgcacgtactaatatgcgttcaccaataaaattcaccaattcgatcg

SEQ ID NO: 12818 - DNA, 1426 bp, Glycine max
  Clone ID: 701213140_FLI
gcctctggaagcacttgatcaagactcaagagtgaacaaaaaaaaatgatgggtacccttaaggtgtccaacagtagtttatacatattttcgaagttcctagtaatttgtatggtgatgatgatatctttggttgattcaagttattccttgtgtgattttgaggcaatcttcaattttggtgattcgaattcagatacgggtgggtttcatacaagctttcctgcacagcctgctccctatggaatgacttacttcaaaaaaccagtggggcgtgcttctgatggaaggcttattgttgattttctcgctcagggtcttggattgccatatttgagcccatatctgcaatcaattggatcagactatactcatggggctaactttgcgtcttcagcctccactgtgattccgcccacaacttccttctctgtcagtgggctaagtccattttccctctctgttcaactcaggcaaatggagcaattcaaagccaaagttgatgaatttcatcaaacaggaacaaggatatcatctggaacgaaaatcccttctccagatatatttggaaaggccctttacacgttctatattgggcaaaatgacttcacttccaaaatagcagccactggtagtattgatggagtgaggggcagccttcctcacatcgtttcacaaatcaatgctgctatcaaggagctatatgcacaaggggggcgtgcatttatggtattcaatcttggtcctgtgggatgctatcctggatacttggtggagcttcctcatgctactcccgactatgatgagtttggatgcattgtttctcacaacaatgctgtaaatgattataacaaactgttgagggatacattgactcaaaccggagaaagtttagtagatgcttcccttatttatgcggacacacactctgctctcttggagctctttcaccaccccacattctatggactaaagtataataccagaacatgttgtgggtatggaggcggtgtctacaactttaaccctaaaattttgtgcggccatatgctagcaagtgcttgtgatgaaccccagaactatgtgagctgggatggcatccatttcacagaagcagcaaacaagattgttgcacatgccattctaaatggttctcttttttatcctcctttccctcttcataaacactgtgatctccaacctattggttgatccagtgcttgcagctaggggtctttcgtatttaccgattaagctattttgaaatgctcagctatcatattgttaaataatgttttggtttgtgggtgtccggtgccactttcatgcttgtgtgtaatagtttgaacaaaaacatgttacttcttggtatcattactatttgatgaaaaagaaaaaaaaaatcaaatacaagttaagctttgat

SEQ ID NO: 12819 - DNA, 854 bp, Glycine max
  Clone ID: 701213194_FLI
gttttcttgcttattcttcttttctcctttctgatcactaccatggctagaaagaagctgaatcttacatacataaccaatgacccgaagaggaagacaacattgaagaaaagaaagaatggtttgatgaagaagatgaatgaaattagcactctttgtgggattgaatcatgtgctataatatatagtccaaatgatcctcagccagaggtttggccatctgactcaggagtccaaagggtgctttccaggttcatggaaatgtcagaagtgaaacaaagcagaaagatgttgaatcaggagaacttgttgaggcaaatgatcaacaaaggccaacagcagttgacaagacaaaggaatcaaaacaggaagaaagaaatgaccaatcttatgtttcaatacctgactgctgggaagatttttggcaaccctagcttggtggatttgaatgatctctcatggttgattgatcagaacctcaatgaaatagaaaagaagatcaccatgctccaaatccaagaagtgactccagtgatagaaaatggagaacaggaacacatgcatcatgttcaagggctagagagcaacatggacaccaagcaaaagaaacattgatccatggaatttatcaatggtggtattggggatgggatgctcccattggagatgttaaatgtccaaaatagtccttggcctaaagcatctctcctttaaaaaagtatgttcttttaagtgtttcagttgtctttcccatttaaatcagtgatgcttaattttattgtctttctttgaaagtgtctgtgaatacaatagccgtatgtcatagtttggaaaatagtcaaatcttcttgttt

SEQ ID NO: 12820 - DNA, 1542 bp, Glycine max
  Clone ID: 701213230_FLI
agctcacaaagtggaggcctctcaaaaaacaaacaaaagtgacatcaaaatccccttctccttcctcttattctcttataccccacccccacttcttagcttcatccctctctctctctctccttctcaacaattacttgcaagtcttgagttttctcctccctgttctctggttttggaattgagacaggctttatttataattttaaaaacttgtttccctccctcccttatttttgggttttctcaacttgttcttgtcatcttgtaaaacatgggaactgctatagacatgtacaacagcagcaacatcgtagcggatttcctagatccgtatagtgaagagctgatgaaagcacttaagccttttatgaaaagtgattatttctctgcctcttcttcttcttcactcgaatcacagccttgttctttttcatctaattctctccccacttcttacccctcttccaaccaaatcaagctcaaccaactcaccccagaccaaattgttcagattcaggcccaaatccacattcagcagcagcagcagcacgtggcccaaacccaaacccacctgggccccaaacgcgtccccatgaagcacgctggcacggccgcgaaacccacgaagctctaccgcggggtgcggcaacggcattggggcaagtgggtcgctgaaatcagactcccaaagaaccgcacgcgcctctggctaggaacattcgacaccgcagaggaagcagcattagcgtacgacaacgcagcgtttaagctcagaggcgagttcgcgcgtctcaattttcctcatctaagacaccacggagccttcgttttcggcgagttcggagattacaagcctctaccttcttccgtggattccaaactgcaagctatttgcgaaagcttagcgaaacaagaggaaaagccgtgttgctccgtcgaagacgtgaagcccgtgatacacgctgctgagctggcagaggtcgagtctgacgtggcaaaatcgaacgctgaatatgtttatcccgagttcgaggattttaaggtcgagcacgagaacccaatgttttctggtgaatcttcttcgcctgaatccagtgttactttcttggatttctcggacttctcggattctaataatcagtgggatgaaatggagaattttgggttggagaagttcccttctgtggagattgattgggaagctatatgatgactcggtgaattttcgttatgtcaaatggttggtttggttttgctctgcttttgggttttagtatgtacttattatgttttgtaattttttaggtttatgtttcgctagtgtctttggctgcttctgcaatggattttttgacatttgcggatgttttgctgagacacgagggttgcaaattttaggcagtgaaatcagagggtcgtagtgatctttttgtggtctgctcgtgttttttgttacttgcatgaccttgggggcttctacttgtgtcttggctagctacttcttgttcaactgtaattaaagtgcccttccaatatatg

SEQ ID NO: 12821 - DNA, 1472 bp, Glycine max
  Clone ID: 701213327_FLI
taagaattgaaaggcacatgagtataatactaacagtggacaaattgaaaaagcaacacacacagaacagacacaactgcgaattagttcatcctttcccaagccagccaagcgaggcatgctctcaatttttgaaattacttgcatagatagagcatcatggccatgatgaaacgtgctgcttcctcttcggttcgctcgctactttcctcatcctccaccttcaccagaaaccttcatgcctcaggtgaaaagaagaaaattgtgggggtgttctacaaagggaatgagtatgctaaattgaaccccaatttcgtggggtgtgttgaaggagcattgggtatacgtgagtggctggaatcacagggtcatcagtacattgtcactgatgacaaagaaggaccagattctgaacttgagaaacacattccagatgcccatgtcatcatatctactccatttcaccccgcctatgtcaccgcggaaagaataaagaaagcgcaaaaattggagctgcttttgactgctggcattggttctgatcacgttgatctcaaagctgcagctgctgctggtttaactgtggcagaggtcacgggaagcaatgtcgtgtcggttgcggaggatgaactcatgagaatcctcattctaatgaggaatttcttgcctgggtaccatcaggctgttaagggtgaatggaatgttgctggcattgcacatagagcttatgatcttgaaggcaagacagtaggaaccgttggcgcgggacgaattgggaagcttttactccagaggttgaaaccttttaactgtaatcttctgtattttgatcgacttaggatcgatcctgaattggagaaagagattggagcaaaatttgaggaggaccttgatgcaatgcttccaaagtgtgatgtaattgttatcaacacccctctcactgagcagacaaggggattgtttgacaaaaatagaattgcgaagtgcaagaaaggtgtcttgattgttaacaatgctcgaggggcaattgcggacacccaagcaattgcagatgcttgctccagtggccacgttgcaggttatagtggtgatgtttggttcccacagccagctccaaaggatcatccatggcgttacatgccaaaccatgccatgactcctcatatttctggcaccaccatagatgcacagttacgttatgctgctggggtcaaagacatgcttgataggcacttcaagggtgaagactttccagaacaaaactacattgtcaaggagggtcaacttgcaagccaataccggtgaagtagtgtgtgtcaatgtggcctttgaatcttccatttttaaggccaatcgatgagcaaataaatatctagaaggcactttaattatgtaatgtacttgctttgttgtgtctgaactcgtttaattgatctcagaaataaaattttaaggaacactctccatgttcc

SEQ ID NO: 12822 - DNA, 1431 bp, Glycine max
  Clone ID: 701213354_FLI
taaaggtagaaacaagaagaaagggataagaacaaacaaaatccaagagagagagaatgaaaatggtggtgttagtctatgaacagtcaccctgacctgagtaaaatttccatttccagaacctcaaatcaaactcttctattcctttctctcatcaatcaattcagttctctcccactcaggaatgggaatatatctcagcagtccaaaaactgaaaagttttctgaagatggtgaaaatgactgtcttagatatggtttatcgtccatgcaagggtggcgtgcaacaatggaagatgctcatgctgcatatactgatctggatgagtccacttcattttttggtgtctatgatggtcatggaggtaaggtggttgcaaagttttgtgccaagtttcttcatcaacaggtgctcaaaagtgagacatacttaactggagatataggaacctcccttcagaaagcctttttaagaatggatgaaatgatgcgtggtcaaaagggatggagggaattatcaatattgggggataagataaacaagtttactgggatgatagaagggttgatttggtctccacgaagcagtgatggtaattgccaagttgatgattggggtcttgaggaggggcctcattctgattttgctggaccaacttcgggaagcactgcctgtgttgccgttattagaaacaaccaacttgttgttgcaaatgctggtgattcgcgttgtgtgatatctcggaagggccaggcatacaatttgtctagagaccacaaacctgatcttgagattgagaaggacagaatcttaaaagctggtggttttattcatgcaggacgagttaatggaagtttaaatcttgcaagagctattggtgacatggaatttaaacagaataagtttcttcctgctgaaaaacaaattgtaactgccaatccagacataaacactgttgagctttgtgacgaagatgaatttgtggtgttagcttgtgatggcatatgggattgcatgtcaagtcaacaactggtagattttgttcgtgaacaattgcacttgaaaacgaaactttctgcagtgtgcgaaagcgtacttgaccggtgtttggcaccatcaactgctggtggtgaaggatgtgacaatatgaccatgatcgtggtgcagttcaaaagacctgctcagtccagtgcaccagcagaagagcaatcctcttcttcaaacggacaagctgaacctgaaacaaaactagagagaagtgaaagttagtattattcctcagtgacagttcaaatattgatcatatgtatgtagtgtgcaacagtgattagaatgcgtccgcatggtcattttcctttcatcccacattatacaccactgctatattccaattaccataaagaataccagtttttctcccgtttcttctc

SEQ ID NO: 12823 - DNA, 1734 bp, Glycine max
  Clone ID: 701213438_FLI
cttcactctctctctttcttccctttgcttgctactcttgtcgagtgcatgctttgctattagctccagcaagctcaacgagtgccaactcaacaacctcaacgcgttggaacccgaccaccgcgttgagtccgaaggtggtttgattcaaacatggaactctcaacaccctgagctgaaatgcgccggtgtcactgtttccaaactcaccctcaaccgcaatggcctccacttgccatcttactcaccttatccccggatgatcatcatcgcccaagggaaaggagcacttggagttgcaattccaggatgtcctgagacgtttgaggagccacaagaacaatcaaacagaagaggctcaaggtcgcagaagcagcagctacaggacagtcaccagaagattcgtcacttcaatgaaggagacgtactcgtgattcctcctggtgttccttactggacctataacactggcgatgaaccagttgttgccatcagtcttcttgacacctctaacttcaataaccagcttgatcaaacccctagggtattttaccttgctgggaacccagatatagagtacccagagaccatgcaacaacaacaacagcagaaaagtcatggtggacgcaagcaggggcaacaccagcaggaggaagaggaagaaggtggcagcgtgctcagtggcttcagcaaacacttcttggcacaatccttcaacaccaacgaggacatagctgagaaacttcagtctccagacgacgaaaggaagcagatcgtgacagtggaaggaggtctcagcgttatcagccccaagtggcaagaacaacaagatgaagatgaagatgaagacgaagatgatgaagatgaacaaattccctctcaccctcctcgccgaccaagccatggaaagcgtgaacaagacgaggacgaggacgaagatgaagataaacctcgtcctagtcgaccaagccaaggaaagcgtgaacaagaccaggaccaggacgaggacgaagatgaagatgaagatcaacctcgcaagagccgcgaatggagatcgaaaaagacacaacccagaagacctagacaagaagaaccacgtgaaagaggatgcgagacaagaaacggggttgaggaaaatatctgcaccttgaagcttcacgagaacattgctcgcccttcacgcgctgacttctacaaccctaaagctggtcgcattagtaccctcaacagcctcaccctcccagccctccgccaattccaactcagtgcccaatatgttgtcctctacaagaatggaatttactctccacattggaatctgaatgcaaacagtgtgatctatgtgactcgaggacaaggaaaggttagagttgtgaactgccaagggaatgcagtgttcgacggtgagcttaggaggggacaattgctggtggtaccacagaacttcgtggtggcggagcaagccggagaacaaggattcgaatacatagtattcaagacacaccacaacgcagtcactagctacttgaaggatgtgtttagggcaattccctcagaggttcttgcccattcttacaaccttcgacagagtcaagtgtctgagcttaagtatgaaggaaattggggtcctttggtcaaccctgagtctcaacaaggctcaccccgtgttaaagtcgcataaatgacaagcatgatggtgtgaggatgaggccatcttatgaaataataacaaat

SEQ ID NO: 12824 - DNA, 776 bp, Glycine max
  Clone ID: 701213472_FLI
ttcagcaagtgcgttttggaagcagagaccgaaatacttcgagatggcccgtacaaagcaaactgctcgtaagtcaactggaggaaaagctcccaggaagcagcttgcaaccaaggctgcacgtaagtctgcaccaacaactggtggtgtgaagaagcctcatcgttatcgccctggaactgttgctcttcgtgagattaggaaataccagaagagcactgagctcctaatcaggaagcttcctttccagaggttggttcgtgaaattgcccaggatttcaagactgatctgcgtttccagagccatgctgtgcttgcattgcaagaggctgctgaggcataccttgttgggctctttgaggacactaacttgtgtgccattcacgccaagcgtgtgactattatgcccaaggatattcagctggcaagaaggattcgtggtgagcgtgcttgagttggtgcgttctgtgtttgtgaagatggattgttggtggctgcggatggtgttttgttactaagttttctttttgttgaagcctataggttattagggaaaaataggtgtttacttggtagtcatattaattgtcattggcaaatactgcctaagacactgtgaaggtctggttgttagaaatttggcatgtatttgatttttttggatcctttatttctcgttttatttctggttgtgcagccactttgggaattgtattggacaactttctgttgccatctaatctagttgaagctagcttatcgtgtctgtttgttct

SEQ ID NO: 12825 - DNA, 113 bp, Glycine max
  Clone ID: 701213491_FLI
tgctgctggtgctggagtttagggatgagggtttattttattggcagggttacatgagtttgtgatgatgtgttattgtgtttctttaggtttgaataaatgatatttacttt

SEQ ID NO: 12826 - DNA, 1368 bp, Glycine max
  Clone ID: 701213520_FLI
gtcttcaaaggggttcttacatggagatgtctttcttttatccagtgaagcttaggatcaaatcatttagagtgcccgagctttttatcgagattccagaaactgcaaccgttgggtccttgaagaggacagtgatggaggcagtgactgctgtacttggaggcggattgcgtgtgggtgtgattctccatggaaagaaggttagagatgacagtaaaactctacttcagactggaatttctcatgataaccacctggatgctttgggcttcgccttggagcctaattgttcacgaaaccgaccatctgcatgtgctacaacagattctctccacattcctagtgcagatatgcctcagcctttaatagggtacccttcaagtcctgctgtaattcatcagaggattcagggcttttctaacatgttagccaagcatcaagcaaccagttcaggtaaccttgttgaaagtgatcatgattcagcaccttctcctatcaacacatccggtgaaaaatatttgtcagattcaaaagaactaattactgttcctgaaatgggtatggaggcactagctgtgctacctgtgcatcagaagtcaaaacgaactgagatcgcacagcgccgaattcgtaggcctttttctgttactgaagtggaagcactggttcaagcagttgagaaacttggaactggaaggtggcgcgatgttaaacttcgtgcatttgacaatgcaaagcatcggacatacgtggatttgaagtgcaggataaatggaaaacactggtgcacacagcaagaatatcagctcagcaaaggaggggagagcctgttccccaagaacttttggacagggtcctaactgctcacgcatattggtcccagcaacagactaagcaacagcttaagcaccactcaacaaaaccttgccttctcctttagtaaggacttgacaccaccacgtgccttcatagatggcttgttaaaagtgtcatttatcatttttttcttcctgtatttatgacaaagtgtgtttatcactttgattttcagtactatgtcacactttatctatcatgttaaaattagaacaaggtgatgcctatagagaatttgcgtcacaagttggttgttaactctaaagtcaaggttcggtgtgtaactggagaggaggggcacgtgttgatgatagaagtttatctgcaaattcaattatggacccacaggagctaataatgttaatgagtgtagctagagcttatccatgagctaatcgctgtataagtctaaatgataatattaaatgaataatagtaatacacatattggcatacttaaagtagttgagataagaaattttactttctttt

SEQ ID NO: 12827 - DNA, 1446 bp, Glycine max
  Clone ID: 701213550_FLI
ggaagggtctttggtcaccagaagaagatgaaaaacttctgaggcatattacgaagtacggtcatggatgttggagctcagttcctaagcaagcaggtttgcagaggtgcggcaagagctgcaggcttaggtggatcaattacttaaggcctgatttgaagagaggtacattctcacaagaggaggaaactctcatcattgaacttcatgcagtgctagggaacagatggtctcaaattgcagctcaattgccagggaggaccgacaatgaaataaagaatctgtggaattcttgcctaaagaagaaactgaggcaaagaggaatagaccctgtgacacataagccactgtcagaggttgagaatggggaagaggacaaaacaagaagccaagagttatccaatgaattgaacctcctgaattcagagagcttcaagtcagatgaagggtcctatgagcagagagcatcatcatcaattgcccccaaagcctatgagatggaaggctcttgcagctccaagattaacaccaccaaaaatgacaccaacttgatgtccaattgttccaacaaagacatgttcttagacagctacaccactagttgccaaccctcagatttgatgggaaattaccctcttcaaatcactgacactctcccaaccaattcaaactcttgccattggttcagccaaactgcaagaccctttgatatgaactctgagtttacaatcacttccaatgttatgtccattcttccacctacaacaacctcatttctcccaagcacttctttttgctacaagccatcacttggtgtcccttcagaagatatttcaacagcatcttttgctttgaatggtcccaattactgggaagccagtgcctccaacaacagcaatggaagcaacaacacaagtgatggcagcagagagttgacaactacaagtagcaagaacagtgtactctcttcttggggattgacagaagaaacaaagtggtctgagtacctccaaaacccaatgctaatgctggcagctcctgaatcattgtgcaaccaaattaggccagccacacatttggtacctgataacactttagggtcaataatagtgcctgattccaaggaccaacaacaacaacaacaatctcaaaattctagcatcttctccaaggacacgcagaagctaacagcagcctttggacatatatagcaccaggctttgacacaatgaaatactattttagaagggctccaagggatttatttgtgttcttagtacaggtgtgtgaaacaacagattaattttgctcttgtatatagataaggtctgtaaaaaaaaaaaaaacattttggtaatacatttgtgagccaaatcatttgttttttttaccttctcgggtgtgggtggaatagaattgcagaataaggattgctctgctttgttc

SEQ ID NO: 12828 - DNA, 1498 bp, Glycine max
  Clone ID: 701213564_FLI
atttggagccagagagtgtgaagttcatggcaagagagatacttgttttgaggaggcttgatcaccccaatgttgtgaagcttgagggtttggttacttctagaatgtcgtgtagtctctatttggtgtttgagtatatggagcatgatcttgcagggcttgctgctggtcaaggtgtcaagttcactgaacctcaggttaaatgctttatgaagcaattactctctggtcttgagcattgtcacagccggggggtgttgcaccgtgatatcaagggctccaatctgcttattgacaatgaaggaatccttaaaattgcagattttggactggcaactttttatgatcctaagataaaacaggcaatgacaagcagagttgtgaccctttggtatcgtccccctgagctgcttctaggggctacagtttatggtgttggtattgatctttggagtgctggttgcattttggcagagctgcttgctggaaagccaataatgcctggccgaacagaggttgaacaactgcacaaaatatttaagttgtgcggctctccatctgaggaatactggaggaagtatagattgccaaatgctactatctttaagccacagcagccatataaacgttgcatcttagaaacatacaaggattttcctccatcttcactacctctaattgaaacccttcttgcaatagatcctgatgatcgttgcactgcctcagcagcactaaatagtgaattctttaccacagagccctatgcttgtgaaccatcaagtttgccaaagtatcctcccagcaaagaattggatgtaaaactgagagatgaggaagcaagaaggcaaaaggctttaaatgggaaagctagtgcagttgatggtgccaaaaaagtcagagtacgtgagcgtggcagggctgttccggcccctgaagccaatgcagagatccaaacaaacttagataggtggagagttgtgacccatgcaaatgcaaaaagcaagagtgagaaatttccacctcctcatcaagatggagctgttggatacccacaagatgcatcaaataaaggacctgtttcatttggcgcccctgacacttccttttcttcagggatatttaattcgaaaccttctggaacggttaggaatcatggtgctgcagggcttcacagagggaggaaaactaagaaagatgagtcccagatggcgtcatcatggaaattcatgcgtccattcaagccatcaacagttggactttccatggatttattatttaggagcaaataatcaatcagtttcttttgattttggcatcctagaatgaggatagtgatgatttaggccttgatacatcttttttgcatttcgaaatggttttcatttattttttttcgtgtcagttcctattttttgtatttcatttggcataaagttgttgtataatctacaacggggatccttacatttgtatatttagaggattaaattctctgctg

SEQ ID NO: 12829 - DNA, 1259 bp, Glycine max
  Clone ID: 701213870_FLI
attcccctttctgcttcctctttctttcgccaaatgggtcatcatctccttctcccataacacaatcttcttcaccttttctttcttcttcgcttcccttcggtggggtttcaagtttcaccataggaataggatgttttctaggttgattcatccccatgaaggccaggaagacatgcagggtggttccaaccacgctcacctcggagacccttgtcttgttctcacctctgatcccaaacctcgtcttcgttggaccgctgaccttcacgaacgctttgttgatgctgtcactcaacttgggggtgccagtaaagccactccaaaagcgataatgaggaccatgaatgtcaagggtttgacgctctatcatttgaagagtcatcttcagaagtacaggcttggtaagcaatcaggaaaagattctgatgagggactcaaagatgcttcatatcttcaagaaagccctggtactgataactcttctccaaagttaccagcttctgatgctaacgagggtcatgaagtcaaggaggcattaagagctcagatggaagtgcaaagtaaactacacttactagtggaggcagagaaacacttgcagattcgccaggatgcagagcggagatacatgggcatgcttgagcgagcgtgtaagatgttggcagatcaatttattggggatgtaattatcgacagggatggccaaaaatttcaaggactggaaaacaaaacatcaagaagtcccctagttgatcatggaggcttttttcccgcagcgtgtactgaggtgggtggaatgcatgtttcagaagtaccacccattctccagcctcaaggggctgagtgctccagtgaaagttgcctaaaatcacttgagagtctgggagggttgacactagaaggatctcccggcggatcaaagaagaggatgctgaacttggactcaatggtagcacctttgatctggagcgaagccaacaccagaactcaaggaatccatttagcccaagttaatcctccaggaatgactaggtatggcatgtaggtaggatagggaaggctagttcctcatgaagagagttgaggacattgtgctttgttccaagcttttaggatgaagtaccgagttagattcttatctgttcttgcccatcaagttggtgggaatcaacttgtctcacatctttgtgtaaattgaaaatactatgtggcttaacttggactatcactactaaaggttggcgctgaccattgac

SEQ ID NO: 12830 - DNA, 867 bp, Glycine max
  Clone ID: 701213889_FLI
gaataagtttgtgctggtactatttactgtttcctgggtccttctctttggtttgctagatggtaaacctcccataggcagtggtcgagtaatatgggacactggtggccaacagctgttcgcatcttatgcatactacattacggcaaggcatcctgatttaggcagtggtggcctcaaactcatcaagactggaaactcaacttgcccaaatactattttgcaatattttcccaagtacacccatggcctgccaatgtatttgctcatatctgtaataagcaatttcatcgtctatgaaggtaccccactggctatttttatggcaaagaagccaaattgtgttgaatcgttggttcctgatcctatgaagggatctccggatccaccaagtccattgaatcccccaaactcctctagattgttggtgtttgtggacaattcaatccacaagacatgtgtgggtactgctggtcctgaagctcatccaggcctactaacgtatagtggcacttttcacattgagatcctagaaaacgttcgatttggatacagctcttacaagcttgtgttttgtttcgatggctcagactaccaaaattgttcctatattgggacctatgataatggtgagggtggaagacgtttgattctcactgagactaatcccttcttattttcttttgttcatgcacttaaatttgatgggactattaagtccgtaggttgaatgatatatctcaagactagattagattaagattagatggtcttgagtgaatgtaatcacatactttgttgttttgatctgcattaactctgctccaaataaaacctcaatgcaaacattgaataagtgaaatgaat

SEQ ID NO: 12831 - DNA, 1117 bp, Glycine max
  Clone ID: 701213890_FLI
cgtgtttctaacgtcgtgttcgtatccgatcgaggacgacgtactctaccaccactactacgaggcctgcccttacttgaagttcgcgcatttcactgcgaaccaggctattttagaagccttcaacggccatgattgtgtccacgtgattacttcaacctcatgcaggggctccagtggcccgcgctgattcaggccctggcgcttcggcccggtgggcctccgctgttgaggctcacgggaattgggcttccctcgtccgacaaccgcgacacgctccgcgaaattgggctcaggctcgctgagctggcgcggtccgtgaatgttaggtttgcatttcgtggcgtggcggcgtggcgccttgaagacgtgaagccgtggatgctgcaggtgaatccgaacgaagccgtggcggttaactccatcatgcagttgcatcggcttcttgcttcggactccgatccagcaggttcgggcatcgaaaccgtgctgggttggatccgaagcttgaacccgaagattatttccgttgtagaacaggaggcgaatcataacgaggacatgttcttggagcggttcacggaagcgttacattactactcgaccgttttcgactcgcttgaagcgtgtccggtcgaaccggacaaggcgcttgcggagatgtacctgcagagggagatatgcaacgtggtgtgctgcgagggaccggcgcgagtcgagaggcacgagccgctggataagtggaggaagcggctcgggaaagccggcttcaagccgctgcatttggggtccaacgcgtacaagcaggccagcatgttgttgactcttttctcggctgaagggtattgcgtggaagagaatcaaggatgcttgactttggggtggcatagccgccctctcattgcggcttcggcttggcatgccgcgccggtgcaggacagggaaacgctgcgtttcgagcagtgagtcatgggtttgaagaaacggaaaatttgtttatttattgtagtaactagtaaacaaaaagagtggtgtataatgtaaatttttctatctttctttattttctctttctttttttttcttttctgtttttttttaaatggtcatttttgcg

SEQ ID NO: 12832 - DNA, 1395 bp, Glycine max
  Clone ID: 701213893_FLI
gttctctgttactccttgatctggttctaaagttataatttacaggaaaagcaaagggcatcatattactatgaaggcactaattcttgttggagggtttggaacaaggttgaggccattgacactcagtgttcccaagcctcttgttgattttgctaacaagcccatgattctgcatcagatagaagctctcaaggccattggcgtcaatgaagtggtactagctatcaattaccaaccagaggtcatgttgaatttcttgaaggagtttgaggcaaaacttggtatcaaaatcacttgttctcaagaaactgaaccgctaggtactgcaggccccttggctcttgcgagggataagctaatagatgactctggagagccattttttgttctcaacagtgatgttatcagtgagtacccacttaaagaaatgattgaattccacaaaacccatggaggagaggctaccataatggtgacaaaggtcgatgagccatcaaaatatggtgtggttgtgatggaggagactaccgggcaggttgagagatttgtagagaaaccaaagttgtttgttggcaacaaaatcaatgctggaatctacctattgaacccctcagttttggatcgaattgaactgaggcccacttctatcgagaaagaggtgtttccaaagattgcagcagagaaaaagctatatgcaatggtcctgccaggattctggatggacattggacaaccaaaggactatatttctggcctgacactttacctggactcgctgaggaaaaagtctccttctaaactggccagtggtcctcactttgtggggaatgtcattgtgcatgaaactgccactattggcgagggatgtctcgttggacctgatgttgcaatcggtcctggctgtgttgttgagtcaggtgtcaggctttcacgctgcacagttatgcgaggagttcggattaaaaagcatacttgcatatctaacagtatcattgggtggcattccactgttgggcaatgggcccgtgtggagaatatgactatccttggagaagatgtccatgtttgtgatgaagtttatagcaatggtggtgtagttttgccccacaaggagatcaagtcaaacattctaaagccagagattgtcatgtgaggttactgtcttaaattcatagcatgtgattaggaagctctaagtttgtgtctgaaatgtgtttgtttgtttcatttgtttttcctttttttttccgcatcccaatccgtttctctttgttacgtattgtacaagtcaatttcgtttagtttagaatgagtgatgccataatttacaatgttgaaaggtctgtgtctttgtaaagggtataaagttggtttactgttcctaagttgtgt

SEQ ID NO: 12833 - DNA, 568 bp, Glycine max
  Clone ID: 701213935_FLI
caagattgtggaacaaggcacctttgacaaactcatggactatgccattagcttaggggcatcaattaatcagtataaggcaccaaggtgcgtcaagtttgcccccattgtggaattgttgaactcgagggtaacatccaactatttcagtcctaagtgtccaaagtgggttcctggacacaaacagtggatccatcagaattgaagaatctaaacatggcacattattatatgttttcatgcgagagtgaatctttttatgttgaatttttatgtggtcatgttttataaaaaaaaatgtatttatctctctctgtacacaaattttaattgtctcatctatttaatttttaagaagaaagagatacgcacattttttttaccagatatgatcatataaaaattaacacatgatagtttattctaatagacatgttagggaaaggttaattactctatttaggtcaaatctatgttttaacttgtgtaatgtatatagtgcgtgattaatcgtgacctttatcttagccactgtaaaattttatccatttcaatagctttttttttt

SEQ ID NO: 12834 - DNA, 1040 bp, Glycine max
  Clone ID: 701213946_FLI
ggtcaagagattgcaggaatctcaatattcagagaaagaatttctgtctgagatgaatatactagggtctgtcaaacatcgtaacttggttcctcttttaggtttttgtgtggctaaaaaggagaggcttttggtctataaaaatatgccaaatggtaccctccatgatcaactacatcctgatgctggtgcatgcaccatggattggcctctaaggctcaaaattgcaattggagcggccaaaggattagcatggcttcatcatagctgcaatccccgcattatccaccgaaacataagctctaagtgcatcttgttggatgctgattttgagcccacaatttctgattttggccttgctagattgatgaacccgattgatacacatttgagtacttttgtgaatggggagtttggggatttaggttatgttgctcctgaatatacaaaaactttggtggctactcctaaaggggatatttatagcttcgggaccgtgcttcttgaattggtgacaggtgaaagacctacccatgtggctaaagctccagaaacttttaaaggaaatttggtagagtggattcaacagcaatctagcaatgcaaaactccatgaagtcattgatgaatcactagttgggaagggtgtagaccaggagcttttccaatttctgaaggttgcaagcaactgtgttacagcaatgccaaaggagaggcctaccatgtttgaagtataccagtttctaaaagccattgggattaattacaatttcacaattgaggatgagatcatgctccctatagacactggtgatgctgataacttagaagaacttattgtagctcgagagggacataattgaaaaggtatgcgagatataattagggcatgtaatcaattttaatatgtaagtatctcttgccttgtggtcctaaaataaatgttagtgctatatataggttttatggtccagatccatttgtgtgctatcaatattgaaacatcaatttaatatcatcaaccatgaatgcccattatat

SEQ ID NO: 12835 - DNA, 1872 bp, Glycine max; identical to SEQ ID NO: 11908
  Clone ID: 701213972_FLI

SEQ ID NO: 12836 - DNA, 1558 bp, Glycine max
  Clone ID: 701213977_FLI
ctaactttcgcatattcgaaaaccaaaagcatgggtcagggaacaccgggcggtctgaaccggcagggtcttccgggggaccggaagccggacggcggcgacaagaaggagaagaagttcgagccggcggcgccgccggcccgcgtgggccgtaagcagcgtaagcagaagggcccggaggcggcggcgcggctgccgacggtgacgccgctgtcgaagtgcaagctaaggctgctgaagctggagcgcataaaggactacctcttgatggaggaggagttcgtggcgaaccaggagaggctgaagccgcaggaggagaaggccgaggaagacagatccaaggtcgatgatctccgaggttctcctatgagcgttggtaacctagaggaactcattgacgagagtcatgccatagtttcgtcctcggtggggcccgagtactatgttggtatcttgtctttcgtcgataaggatcagctcgagcctggatgcgctattttgatgcataacaaggttctctctgttgttgggcttcttcaagatgaagttgatccaatggtctctgttatgaaggttgaaaaggcacctttggaatcatatgctgatattggtggtttagatgctcagatacaggaaattaaagaagcagtcgaacttcccctgacgcatcctgaactgtatgaagacattggtatcaagcctcctaagggagtcattttatacggcgaacctggaactgggaagacgttgctagctaaggctgtggcaaactcgacatcagcaacctttttacgtgttgttggtagtgaattaatacaaaaatacttgggagatggtccaaaacttgtaagggaacttttccgagttgctgatgatctttccccatctattgtcttcattgatgaaattgatgccgttggtacaaagaggtatgatgcccactcaggtggagaacgtgaaattcagaggactatgttggagttgctgaaccagttagatggtttcgattcaagaggtgatgttaaagtgattcttgcaaccaacagaattgaaagccttgatccagccctgctgcgacctggtcgaattgacaggaagattgaatttcctctccctgatatcaaaacaagaagacgcattttccagatacatacttcaaggatgacattagctgatgatgtcaacttagaagaatttgttatgactaaggatgagttctctggagctgatataaaagcaatatgtactgaagctggcttacttgctttacgagaacgccggatgaaggtgacgcatgccgacttcaagaaggcaaaggataaggttatgtttaagaagaaagaaggggtgccagaaggactgtatatgtgaagcatcttcatcatttaccccggccttctttctttattacagtctttttgttgttctgtgaacggatgtttgtattttgatttgtggtcgtttatgggtctacattatcacgggatttaatctcaactatagttacatagctttctttgatttaaaaaaatcgggaaaattttcctgccatttcttc

SEQ ID NO: 12837 - DNA, 1335 bp, Glycine max
  Clone ID: 701214015_FLI
gaattcggctcgtggttcagtaagaatctgattagaattgaaagttaaaggttaattgtgatcactagctactatttggtgcactgtgaaaaataaacacatgttgatgaacttgaaaagagccccttgttcactataaattagttgtggtagtttccactgccttagctgcaaactaaaccaattttcttcgtctgtgtaacaaacacttcaacaatctactctatacccgatttacaagatgagttcatttagccaaaatccctatgttttagttctgttcctcgttctcactgtgtggatatcccgtgtaatgtctcgcgggctcattacatctgagagacatgagaaatggatggcacaatatggtaaggtttacaaggatgctgcagagaaggagaaacgtttccaagtattcaaaaacaatgtgcagttcattgagtcattcaatgctgctggggacaaacctttcaaccttagcattaaccaatttgcggaccttcatgatgaagaatttaaggctttactaaacaatgttcagaaaaaggcaagtagggtggagacagcaacagaaacatcgtttaggtatgagaatgtaactaagattccttctaccatggactggaggaaaagaggtgctgtcactccaatcaaggaccaaggctacacatgtggaagttgttgggcatttgcaactgtggctactgtcgagagtctccatcaaataactacaggtgaattggtgtccctatcagagcaagaactagtagattgtgttagaggtgacagtgaaggttgccgtggtggttatgtggaaaatgcctttgaatttattgctaataaaggtggaataacaagtgaagcatactatccttacaaaggaaaagatagaagttgtaaggttaagaaggagactcatggtgtggcacggattatagggtatgagagtgttccttctaatagtgaaaaggcactcctaaaagctgtggcaaatcaaccagtttcagtttatattgatgcaggagcaattgctttcaaattttactcaagtgggatttttgaagcaagaaattgtggaactcatctagaccatgctgttgcagttgttggttatggtaaacttcgtgatggtacaaagtattggctagtaaaaaattcatggagcactgcatggggtgagaaagggtacatgaggatcaagcgagacatacgtgccaagaaaggcttatgtggaattgcttcaaatgcctcttatccaatcgcttaataagtgttcttgataattcatataaatctgaaaaggtcattataatcgtatatatgcacgcatctacc

SEQ ID NO: 12838 - DNA, 836 bp, Glycine max
  Clone ID: 701214019_FLI
gtgatttcagtgagtgatcggtgttcacttgatctcatcataatcgtcagcgtcaattgaagaagatgccgatcagaaacatcgccgtcggaaggcctgaagaggcgactcaccccgacacgttgaaggcggctttggctgagttcatctcaaccttcatcttcgtgttcgccggctcaggctccggcatcgcctacaacaagctcaccgacaacggcgctgccacccctgccggcctcatctccgcctccatcgcccatgcattcgccctcttcgtcgccgtctccgtcggcgccaacatctccggcggccacgtcaaccccgccgtcaccttcggcgccttcgtcggcggcaacatcaccttcctccgcggcatcgtctacgtcatcgcccagctcctcggctccatcgtcgcctccctcctcctggccttcgtcaccgcctccactgttccagcattcggactctccgctggagttggagttggcaacgccttggtgttggagatcgtgatgaccttcggtctggtgtacacggtctacgcaactgccattgaccccaagaagggtaatttgggaattattgctcccatcgccattggtttcattgtcggcgctaacattttgttgggtggggccttctctggagcggccatgaaccccgctgtgacatttgggcctgctgtcgtgagctggacctggaccaaccactggatctactgggccgggcctctcatcggtggtggaatcgctggccttgtttacgaggttgtctttatcagccacacccacgagcagcttcccaccactgactactagagggggggaaatgaaaat

SEQ ID NO: 12839 - DNA, 545 bp, Glycine max
  Clone ID: 701214047_FLI
ggaagagacaataaagatgcagatgttgcagtcaatgggcaagaaacacccatggctaagagacccacatatccaaccctgcctgaagaacccaaggttgaaagaaatctcctatgcagagttggtgttcggcttccagatggacgccgggttcagcgaaacttcttacgcactgatccaattcagctgctgtggtctttcatttctgctcaactaggggaagatgaaacaaattcatttagattaacacatgcaattcctggagcatctaaaattctggactatgaaattaattcaaccttccaggaatcaggccttgccaactctatgatttcggtgacttgggactgagttcgggttcattactgggtgaaatttgcagactgagaacttcagattggtcccatctatatgatcccgtttttcatcttttcatgaggttgtttatgttcaaagaaaaggttattgaaacttttttgtgtatagactacaaatccgaacgatgggttaagcgatgttaatggaaatatattgatgttattaat

SEQ ID NO: 12840 - DNA, 1720 bp, Glycine max
  Clone ID: 701214153_FLI
ttagttcttttccatggctctattattcttctactttttggttcttatttcctttgccttcacaaccattatagtacaaaaaataagaaagaaacccaagaaaactgatgacacaacttgtaaaataccccatggtcctagaaagctacctattataggaaatatatacaatctgctatgctctcaaccccatagaaaattaagagacctggccataaaatatggacccgtgatgcatcttcaacttggacaggtttcaactattgtcatttcatcccctgagtgtgctagggaagtgatgaaaacccatgacattaactttgccacaaggcctaaagttctagctattgaaataatgtcttacaattccacaagtatagcttttgctggctatggaaattattggaggcagctaagaaaaatatgcacattggagcttttaagcctaaaacgcgtcaactcattccagccaattagagaagatgagctcttcaatcttgtcaaatggattgattcaaagaaaggatcccccatcaacctcactgaagcagtacttacatcaatttacacaattgcttcaagggctgcctttggcaagaattgcaaagaccaagaaaaatttatatcagtggttaaaaaaacatcaaaacttgctgcaggttttggcattgaagatttgtttccttctgttacttggcttcaacatgtcactggcttgagggctaagcttgagaggttgcatcaacaggctgatcagataatggaaaacatcatcaatgagcataaagaggcaaattcgaaagccaaggatgaccaaagtgaagcagaagaagatcttgtggatgttctcatacaatatgaggatgggagcaagaaggatttttccttaactagaaacaagatcaaggccataattctggacatttttgctgctggaggtgagacaacagcaacaaccatagattgggcaatggctgaaatggtaaagaatccaacagtaatgaagaaagcacaatctgaggtgagagaggtatgcaatatgaaagcaagggttgatgaaaattgcatcaatgaacttcaatatttgaaactaattgtgaaagagaccttgaggttgcaccctccagctcctcttttgctgccaagagaatgtggtcaaacatgtgagatacatggttatcacataccagccaaaaccaaggtcatagtcaatgcctgggcaattggaagagatccaaactattggactgaatcagagaggttttatcctgagaggttcattgatagcactattgactacaaagggagtaattttgagttcattccttttggtgctggaagaaggatatgcgcaggaagcacatttgctttgagagctgcggaactagcccttgcaatgttgttgtatcactttgattggaagcttccaagtggaatgagaagtggagaactggacatgagtgaggattttggagtcacaactataagaaaagataatctattcttggttccttttccatatcatcctttgcctgtctcatgagctcagaatgagaaactgaaacatttggtgatggctgtcacatttacttcagaataaagatcttctgttaattgaaattagactttgtgctgtgattggttgtaacagaagatggaaattgtgactactgcatattaaaatagcttttatatatcctcaatgttaattaactttgat

SEQ ID NO: 12841 - DNA, 836 bp, Glycine max; identical to SEQ ID NO: 12838
  Clone ID: 701214219_FLI

SEQ ID NO: 12842 - DNA, 840 bp, Glycine max
  Clone ID: 701214254_FLI
gtgcgaaggctaatattcacgtcctcagccggaaccctcaacgttattgagcgccaaaagcccgttttcgacgacacatgctggagtgacgttgagttttgccgtagagttaagatgactggttggatgtattttgtttctaaaacactggcggagaaagaagcatggaaatttgccaaagagcagggcctggacttcatcactatcattccacctcttgttgtcggtccctttctgatgccaaccatgccacctagcctaatcacggctctatcgccaatcacaggaaatgaggaccattactcgatcataaagcaaggtcaattcgtccacttagatgatctctgtcttgctcacatatttctgtttgaggaaccagaagtggaagggaggtacatatgcagtgcatgtgacgctaccattcatgacattgccaaattaattaaccaaaaataccctgagtacaaggtccccaccaagttcaagaatattccagatcaattggagcttgtgagattttcttccaagaagatcacagacttgggattcaaatttaaatacagcttagaggacatgtacactggagcaattgacacatgcagagacaaagggcttcttccgaaacctgcagaaaaagggctttttactaaacctgcagaaactccagtgaatgccatcatgcataaataggcattcatatctttgtatctgtgtgatggctgtgcaacttgcttttcttattccgtttcttgattaacgtttctgttttatgaaaaattagaaatgtgagtggcttgtaaggccaggttatcttcaataagttaataaaaaccatcttct

SEQ ID NO: 12843 - DNA, 1022 bp, Glycine max
  Clone ID: 701214263_FLI
cttggctgcagcaatcatgtctctcagctactcaaccattgcatgggtggcttccgtggacaaaagagttcataatcacgtagatgtggctgttgagtatggctacaaagccagcacttcagcaggaaacgttttcaattttttcaatgccttaggagatgttgcttttgcctacgctggacacaacgtggtgttggagattcaagcaaccatcccttcctccccagagaagccatcaaaaggtcccatgtggaggggggtgctaatagcatatttagttgtggccttgtgctacttccctgttgctctcattggctattgggtgtttggtaattccgttgatgacaacatcctcatcaccctaaacaaacccacttggctcatagtaactgccaacatgtttgttgtcatccatgtcattggaagctaccagctatatgcaatgccggtttttgacatgatcgagaccgtgatggttaaacaattgcgcttcaagccaacttggcagctacgatttgttgtgcgcaatgtttatgttgcatttacaatgtttgtgggcattacgttccctttctttggtgccctcctcggattttttggaggatttgcatttgcgccaacaacatactttctcccctgtattatctggcttgctatttacaaacctaagaagttcagcttatcctggatcaccaactggatctgcattatatttggcctcctactcatgattctgtcaccaattggtggattaaggagtatcatactcaatgccaagaattatgggttttaccaatgagggagaatgtgttgaaagaaaggtgttaatgcgtgtgatacaagcacttttctaacacttaattgaattcattctccgcaagaaccatagttcaactttcattttataaatactataaacatgcatgaatataaatgtgagactatctttgccagttcctactttatttttctgcaaaacaagggatcaaaaagtatgtttgaaataataaaaaattgaaatc

SEQ ID NO: 12844 - DNA, 1004 bp, Glycine max
  Clone ID: 701214276_FLI
atcaagcttttgatgcaacctcaccccaattgtgatggcgatggagataaaagtttgtgttattcccatagtgggtattggaggcttagggaagaccacacttgcaaagttggtgttcaatgataataggatggatgaacttttcccattgaagatgtgggtgtgtatctccgacgaatttgacattaggcagattataattaaaattatcaactccgcttctgcttcagctccaattattgctctttctcaccaagaaaacattaatagcttcaatattgagcagttacaaagtcgtcttagacacaacctttctggaaagaagtatttactagtcaatggattcaaggagctgcagacactttagggacattgttaattttaaattgtcatagtttttagattcttcctgagtggctgacaacaatgactcatcttaagatactccatattgctaactgtcctcagctgctgtatctcccaagtggcatgcatcgcctcagcgccctagaagaattaagcatagatggttgtcctgaattgtgtcgaaaatgtcaaccacaatgtggtgagtactggtccttcatcactcacatcaaacgcctttccattggagaaacaagagaagggcaactcatttttcgaatgttgtcgcgtctacagttaagattgcacgattagtaaagctaaaatgcacaccatggagaccgcaatttaaattctgatcatgaatgaaatattattttgcttctaaaattttcaatttattaaaaacaaaattggcatggggcaaaagaagttaacggttcatcatttgtatagccattgtaggcatttgcatttctagcgtttgtctcttgaatacttcaagtattagttttagaaagaaaaagcatcattttatataaattctcatgatgacagaggggcacttcacagaatcctccaccttcagcttttgtaatctgtccactagtttgagctaaatctattttcttttcatc

SEQ ID NO: 12845 - DNA, 467 bp, Glycine max
  Clone ID: 701214323_FLI
gtggaaggtcacgattgttcggtttgtttgatcgagttccaagagaatgaaaacttgagattgttgccaaaatgcaaccatgcttttcatctcccttgcattgatacttggctcaagtctcatgctacttgccctttgtgtcgttcttctgtcaccgcttgtccaaatccgaatccaaattcttccatggaacccccaccaagagtcattgttaatgccttgggacaccaacttaggagtaaccatgttgttgttgttgagagttctgaggaacaacagaaagatggttagttttgatgctcatactttgaatgacagtgaagggtatcatacataggggaagctaatatttggggaacagatctgcttcaacaagtacacagagatccatgttcacaaggcatatactatacatatatagtaagtgaatgaattctgttcttccaattatttatttgcatctaatc

SEQ ID NO: 12846 - DNA, 761 bp, Glycine max
  Clone ID: 701214368_FLI
cttccacacttaataggaaaagaaaaaaaaaaaaaaaaagtaagcccagctttgttctgcttcaattctctaacaatggcgatggctttcaaaatggcgactactgggatgtgggttacggatgagtgcaagaactcattcatggaaatgaagtggaagaaggtgcacagatacatagtcttcaagatcgatgagaagtcaaggcttgtcaccgttgataaggtcggtggtcccggcgagagctatggtgatctcgctgcctccttgcccgacgatgattgcagatatgctgttttcgactttgattttgtcaccgttgataactgccgcaagagcaagatcttcttcattgcatggtctccaacagcatcaaggataagagcaaagatgctctacgcaacatcgaaggatgggctgagaagagctctggatggaataagctatgaagttcaggccactgatccaaccgagatgggattcgatgtaattcaagacagagccaaatagatggatgccccctttttttaaagtgggaatccaactccttatttatgtgctgagctaatcaattaatctgtcaatcttactctctctctctctttatttgctatatataaattaagtaaccatatatagtccaatgactgtatgacatgtgctatctcttcttctttcttgtttttatgctagtttaattgtgtttgatgtaagtggggcatctaatcttcaatccttactcataataataagttatgtgtaat

SEQ ID NO: 12847 - DNA, 2780 bp, Glycine max
  Clone ID: 701214418_FLI
gtgatcaggtggttgaagacaggagtggcgaattagaatcagagagaaagaagcggtttttatatttctcgcgcgattcgtttcaggcaagtgcagtgcagagtcgaaacgacgtcgttcattgtgcgatgaaagtagctcaacaagtgttgaatctctgaactctttgggattcgaatcttgagtcgttgatcgtttccggcaatggattcgtggctcaaagccgctgaaggtttatttgaagttgtagatcgacgagcgaaggctgttgccagtgacttatcagaggagcagggtgattctaagtctccagcatcaaatgggcaaggatctcagggcaagaggacaaaatcaaaaccaaaggctcaaaaggcactatccgactcaccaactataattagtgatactactcacgagaaaagtggatctccatcagcacctgtggacatagcaacttcaatagacaaagttgatcctgaaattgatgtgagcgcttccacgtctacaaaccaaccaaaggagccacaacctagcgatgcaacatcacccttgttaggctcttcattatcaaaaattctaggcgatgatgttggtaaacatgacacagatgatgcggaagcattagtaaatgatgctgatattggagttgccacaattgctggtaatggtgatcctgtccaagagagtgcttcagacatttgtgagatggatcctcctccagctcccaaaggaattgagggctccagtgatgaacccactagtactggccaaattatcaaatctagagatttagatgccagtaaaaatgtggatatagagaaatctgattctgtggcttctgacacagctcctaaaaatgatcctatactcaaagattctgatgtaaaagttgaatctgttgtggacgagaaaagccaagaggatcacaaagctgacatctcccccgaaaaagtacaggatcaacttgatgaggctcaaggattgcttaaaacaacaaaatctactggtcagtctaaagaggctaggttagctcgggtctgtgctggattgtcatcccgtcttcaagaatacaaatctgaaaatgcacagttggaggaacttctcacttcagagagagagctgagtaaatcatatgaagctagcataaaacagctacagaaggatctgtctgaaagtaaaagggaagtgacaagagttgaatcaaatatggttgaggctttggcagcaaaaaatgctgaaattgaggcacttttaagttctatggatgctgttaagaggcaggctgcattgtcagaaggaaatctagcttccctgcaggcaagtatggaatcaatgatgagaaatcgagaactaagcgaaacaaggatgatgcaagctctaagagaggagctagcatctgctgagcgaagagcagaagaggagcgtgtcgcacataatgctaccaaaatggctgctatggaaagagaagtggaattggagcacagagcagttgagtcatccactgcacttgcaaggatacaggtaatagagtagcagatgagaggacagcaaaagccacagaacttgagcagaaggtggcacttctcgaggttgaatgtgcatctttaaatcaagaactacaagatatggaagcccgtgtgcgccgggaacaaaaaaaggcaccagaagaggcaaatcaagtaattcagaagcaggcatggcaggaagaattggagcgtgcacgtcaaggtcagagggaagctgaaaacaagctatcttccttggaggctgaaatgcaaaaaatgagagttgaaatggctgccatgaagagggatgctgagcattactcacgtcaggagcatatggagttagagaaacgctatcgggaactgacagaccttttgtactacaaacaaactcaattagaaaccatggtcagtgaaaaggctgccacagagtttcaattggaaaaggaaattaagcgtcttcaggaagcaaaggcagaggctgaaagaagtagagtttctcgtcgagcatcatcatcttgggaagacgagactgaaataaaatcccttgagcctcttcctatgcatcaccgtcatttggtcggtgcaagtattcagttgcaaaaagcagtgaaactattagattcaggggctgtcagggccacaagatttctctggcgatatccaacagctcgagttattttatttttctacttggtttttgtacatctcttcttgatgtatctcttgcatcgccttcaggcacaagctgacacattggctgctagagaagttgcagaatctatgggactttctaaccagaatttaccgtgacttatcaaaaatattccatctagggcatgtgtcaggtgttaataatatcttcctggctacatatattttcaagtgtacatttccaatgccactgcttagggtggcttgataatggtccagcaaatgactcgagcattgcaaaccaaaagaggaacttacgtacaggcatcttatgtctcaagttgatcttttgagaaactgctgcaagatggagttgggaagattggaatttgctttagccaataattaatgaatgggtggcagcttctgtttcttgtgtagactgttctgaaaattgaattggttgattatatgtttattcgttttttcttctctgaaaatgtatttcgagtggaacgatgtagataacaatatattttgtgatatcctttttcttcgttccaagggcaattgccaaaactaaagaatacacagcgcttgaatgaagaaaagttaggtact

SEQ ID NO: 12848 - DNA, 771 bp, Glycine max
  Clone ID: 701214455_FLI
ggaacagcttatgcaatatcgttctgatgttcagaaagtggaggattggctgaagcctaatgcagtgttgggagcatttgaagctagggctgctaagaaggtggttgcttgtgctcaaaatctcagcaagtttaccaatcccgaagaaggtttccaagaactctcagtcgatctagttgaggcagctgttgctcattgccagttaattgttgtttccaaatttattgagaagttgcagcaagatatccctggaaagggagtgaaacagcaattagaacttctttgtagcatttacgctttgtttcttcttcacaagcatttgggtgattttcttgcaactggctgcatcactcccaaacagggttcccttgcaaatgagctgctgaggtccttgtattcacaggttcgtcctaatgcaattgcacttgttgatgcgtttaactacactgatcactaccttggttcggttcttggtcgctatgatggagatgtgtatccaaagctgtacgaggaggcatggaaggatccattgaatgattcagttgtgccagatggcttccaagaatatattcgaccaatgctaaagcaacaacttcgtaatgctagactctaaattacttttttataactgcactgttgatactggagaaagttatgtattgctttcaatttaaaagacagtaataaagttctacgaaagggaaacaaatttgacatcaactttgacaaaattgattatgaatagaattgattttggttaaagttgatttt

SEQ ID NO: 12849 - DNA, 1737 bp, Glycine max
  Clone ID: 701214664_FLI
gggaaatcaaggaggcactgtgattgctctttttctgggttttatcttgagattaattatggctcaacccacaacaagaataggccttgctggattggctgttatgggccaaaatctggcactcaatattgctgagaaaggctttcccatttctgtttacaaccgaaccacttccaaggttgatgagacagtagaacgagcaaaacaagaaggaaatcttccagtttatggctaccatgaccctgaagcttttgttcattccattcaaaagcctagggtgataataatgcttgttaaggctggggcacctgttgaccagaccattaagaccctatctgcgtacatggaaaaaggtgactgtataattgatggtggtaacgaatggtatgagaacactgaaagaagagagaaagaggtggctgaattgggtctgctctaccttgggatgggagtttctggtggtgaggaaggtgctcgtaatggtccctctttgatgcctggtggttcgtttgaggctttcaaatacatagaagatattcttctcaaggtggcagctcaagtacctgacagtggtccttgcgtgacttatattggtaaaggtggttctggtaattttgtgaagatgatccacaatggcattgagtatggtgacatgcagctgattgcagaggcctatgatgtgctgaaatcagttggaaagttgtcaaatgaggaactacaaagtgtcttctcagaatggaacaagggagaacttctgagtttcctgattgaaatcactgcagatatatttggaattaaggatgataagggagatggatatcttgttgacaaggtcctagacaagactggcatgaagggcactggtaagtggactgttcagcaagctgctgaattatcaattgctgctcccactattgaagcatcattggatgcaaggttcctgagtgggttgaaggaggaaagagttgaagctgcaaaggtctttaaatcaggtggcattggtgatattgtgactgatcaacctgtagacaagcagaagttgattgatgatgttaggaaggctctttatgcagccaaaatctgtagttatgcacagggaatgaatttgatccgtgcaaagagtattgaaaagggttgggatttgaagttgggtgaactggcccggatttggaaagggggttgcattattagagcaatattcttagacagaatcaagcaggcatatgaaagaaaccctaatctggcaaaccttcttgtggatccagagtttgcaaaggaaataattgattaccaatctgcctggaggagagttgtttgccttgctatcaattctggtattagcactccaggtatgtctgctagtcttgcttattttgacacttacagaagggaaaggttgccagctaatttggtgcaagctcaacgagactactttggtgctcatacatatgaaagggttgacatagaggggtcttaccatactgagtggttcaagcttgccaaacagtcaagaaattagattactgtatttgagccaatcaggattttcctaataaatgtaatattttctgctcagactgtatgctgagttgagtttgcatatccacaatgtggtgaagttttattatattatttccaactgaattgcttggcagtttgttttccaacaactatgttgtatctttgctgatcatgcttggtgcttgatacaaaattcccagttcatggtgccttttt

SEQ ID NO: 12850 - DNA, 1346 bp, Glycine max
  Clone ID: 701214791_FLI
gttgatccagaagtatatgaggctcacaaggtataaagcattggcatgttaaattgataagtatgcagatctttacaaaatttgtgatataataatgcacaatttatattttgggtgatggcacaataaacatgaaatgtatagctaaataaataagtttctttgtagaaaagtaataaatgcactgatattttctttctatgaatctatgcactacaacaacaacatcaaaagccttgtcctagtaagtgagtctggctacatggattacccaatgttattttgctcggtcaaagactaaaaatttagaaatattatttaccatgagatctatcccaaccaattcctccgaagtccttattggcctccctcttctcttcttcactgggctataatcatacagtccattattctcattggtgcttcccttggccttctttgcatatgtccaaaccaccttaatctactttttgtcatcttttcttctattggtgctacaccattcaccaaccacttcccatatacaatcattttgtatcttgtcttttattgtatgtccacacatccatcttaacattctcatttctgtcactccgatctttttctcttgtgcatgttatatcaacatttgtaagaaagtattatagattttttgctatgctagttaattgaacctgtttacttgttccagcttatttactgatgtttaatgcttctttcatatgttgtatattataaatcccgactatgattttagcataatcaagtactactacattttgtttgtgcagcacaaattagaacctgatctagccaaaagagcagagcattatttctctgagaatatgcgagttttgaaaggagttgaggcttgggcgatgggcaggttaaaagattttggaatgcttattacagcttctggtcggagttccattcaaaattatgaatgtggttgtgaaccactgattcaactgtatgagatccttttgagggctcccggtgtattgggagcgcgcttcagtggtgctgggtttagagggtgttgccttgcatttgtggaggctgaccttgcaactgaagctgcatcatttgtcaggagtgaatatctcaaggtacagccagagttagcaagccaaataagcaaagacacagcagttttgatatgtgaatctggtgattgtgcacgtgtaatttaaacagcattgttgccgttaatacttctatttcatcatcgttcttataaatagcaatcgcagctgtcaatatcattgtaattcatcaaatcttttagttctgtccttgtatttcatggcctggaataaactcacgttacattattagatttg

SEQ ID NO: 12851 - DNA, 1191 bp, Glycine max
  Clone ID: 701214851_FLI
gtgttcagttaagagtttccgcgtgagagtggccatgggaagagctccttgttgtgacaaagcaaacgttaagagagggccatggtctccagaagaagatgctacactcaaaaattatgtagagactcatggcactggtggaaattggattgcattgcccaaaaaagctggccttagacggtgtggcaagagttgccggctacggtggctcaattatctgaggccagacatcaaacatggaggctttactgaagaagaggacaacatcatttgtaccctctatgctgagatgggaagcagatggtctgccatagcctctaaacttcctggcagaaccgacaatgatgtgaaaaactactggaacacgaaactgaagaagaagatcatggcagggaaagttaccctcaaaacattgactgacaatgacacgcttccttcaatttcaaccccatcactaaccaacaaccaaaatgtcaagactagtcaaaattcacctttcccttcttcacaaaatcaaaattctccacccttagatgctaataatacattcagcattagtgaaaaaagcattattagttttgaccaaactcatcatgggttgtatagtccacaagtcatggatgttgtgtcacaaattggtgcaaattcaaggattcccaactacaacaacaataataatcctgtggtgtcattgtctcaagaaggttcaagcagcatttcggattcctcttcaattgcaatgaacaacaagaatgtgtcacagccagaacaacatgctaatgatgattatgaatctatggaaatgttgatggattttggctttggatttccctatgattttgccaatggtcctaactgccattatgagagagttggtgaattggctccaagttcgtatccagagtgggttgattttagctatgctgacattaagccacattgaccgaatcaaaatgttatatagttagctagttatacaatattgtataaccatgggattttctgtaagaaaaaacaatgccaaaacgtatgtgaagggaagacttagctgagatttaatttttctagtttgttgatctaatatagtattaattagtagtacttgtgtgttgtgttcatagataggaactgcatagtttaattaggtcaaattttgaattaagcaaataaaaacgattaaagattattgat

SEQ ID NO: 12852 - DNA, 1757 bp, Glycine max
  Clone ID: 701214918_FLI
tgaatgcttaaaggaattagaaaaggcaacaaagaagaccactatgcttttatcataatctttataagcgcataaacactggcgcaaatgatttatcatcctaattaaacaaacaacttttcacacatgaccatgctacctcattcattaactatgattgcaacactaataatcatttttcttgcacaaacacttgtgggggtgagttcacttcctgaagctgataaaataaccaatttgccggggcagccacgggtcgaatttcagcaatattctggttatgtcaccgtggatgatcaaaatcaaagagctttgttttactactttgttgaggctgaagaaaacccttcttccaagccattagtcctatggttgaatggagggcccggttgttcatcgattggagttggagcttttgctgagcatggtcctttcagaccaagtgacaacaatgttcttgagataaatgataaaagttggaacaaagtggcaaatgtgctatacttggaatcaccagctggtgttggattctcttactctagcaatgaatctttttatgccttagtgacagatgaaatcacagctagggataatcttgttttcctacagcgttggttcactaaattccctgagtactcaaataacgacttcttcatttcaggggagagctatggaggtcactatgttccacaacttgcacaacttattgttcaaaccaagaccaacttcaatctcaagggaatagcaatagggaatcctcttcttgagtttaatactgatttcaactcaagatctgagtacctttggtcccacggactgatatcagattcaacatacgaagtcttaactagagtctgcaacttttcctcaattaggagacaaatgcaaaatgggaatcttagaggggtttgtggaaaagcaaataagctattggatagtgagattagcaactatgtagatgaatatgatgtcactcttgatgtttgtttgtcatcagtaaatcaacaggcttatgtgctgaatcaactgcaagagacacagaagatagatgtttgtatcggtgataaaacaactacatacttgaacactaaagaagtccaagaagctctgcatgctaatcttgttggagtcgccaaatggtcaacttgcagctcagttctgcattatgattatcagaatctagaaataccaacaattcctattctagggtcacttgttaactctggcatcagggtcctagtgtacagtggagatcaagattcagtgcttccattattaggttcgcgatctctagttaacggattagccaaggaaattggacttgatacaaccgtggcctatagagcctggtttgagggaaaacaggtggcaggatggacacaagtatatgggaacatcttatcatatgccaccataagaggagcatctcatgaagctcccttttctcaaccacagagatcactcgggctacttaaagcctttttggaaggaaagccactacctggtgttaaataaaatacgaatagatttaattaacgctaggcgttcttatttgctgcaataaatagaaatgcttccaaaatccacacagaagcttattattgctataggattacgattatcttatgattgttatgttcgtgctctacatttctatgctttgctttctttccgaacaatgtgctaaaggtgcacaggatgaagggaagtacaaggattaaaaattacaatcagccaaaaataaactaaatccagat

SEQ ID NO: 12853 - DNA, 1712 bp, Glycine max
  Clone ID: 701215045_FLI
ggctattccttcactaataaaccagccacaaagaacaccctctctcacattctccttcctcctctttctcgctatctgcaccccattggatgctgctcacaccgacttcgcaggttcagcctgcctcaaagtttcccctagccacttcgccggctcggtcaccgaagtcatcgctgccatacgtcaactcgcttcgatcctctcacgcttcggctctcccttggccaacttccgcctcagcaccgccatcgccgactgcctggacttgctcgacctctcctccgacgtcctctcctgggccctctcggcctctcagaaccccaaagggaagcataacagtacggggaacctgagttcggatttgaggacatggctaagtgcggcgcttgcgcatccagagacgtgcatggagggattcgaagggacaaacagcattgtgaagggtttggtctcggcaggcatcgggcaagttgtgtcgttggtggagcagcttcttgcgcaagttcttcccgcacaggatcaatttgacgccgccagcagcaaggggcaatttccttcttggattaagcccaaggaaaggaagctgctgcaagcaattgcagtcactcctgatgtcactgtagctttagatgggagtgggaactacgctaagatcatggatgcggtgcttgcggctcctgattatagcatgaagcgttttgtgattttggtaaagaagggtgtttatgttgagaacgtggagatcaagaagaagaagtggaatattatgattcttggacaggggatggatgccaccgtcatctccggtaaccggagtgtcgtcgacggctggaccaccttccgctcagctacattcgctgtgagtggcagagggttcatagcaagagacatatcctttcagaacacagcagggcccgagaagcaccaagcagtggcactaagatcagactctgacctttccgtgttcttccgatgtgggattttcggttaccaagacagtctctacacccacacaatgcgccaattcttcagagactgcacaatcagcggcacagttgattacatcttcggtgacgccactgcagtgttccaaaactgcttcctaagagtaaaaaaaggcttaccaaaccaaaagaacacaatcacagcacacggtagaaaagacccaaatgaaccaaccggtttctcattccagttctgcaacataactgcagattctgatcttataccttctgttggaaccgcacaaacgtacctggggagaccctggaagagttactcacgaaccgttttcatgcaatcgtacatgagtgaggtgataggggcagaagggtggttggagtggaatggaaactttgcattggacacattgtactatgctgagtacatgaacactggagcaggtgctggagttgctaaccgtgtgaagtggccagggtaccatgcattgaatgattcgagccaggctagtaacttcaccgtgtctcaatttattgaggggaatctatggttgccttcaactggagtaaccttcactgcgggactcacagtttaacagaaataaactactgccacgccttggcactctcttgtacttaattatataaagttattatatatttatagtttatatcataggaagaaaaaaaaggtattataagaaagaggtgaatgggtccgtgttcactttaattaattggtacttgattatt

SEQ ID NO: 12854 - DNA, 906 bp, Glycine max
  Clone ID: 701215245_FLI
tgtaatctccgcattaggtgcagaacagatcgatgatcaagtgaagatcatagcagcaataaaagaagccggaaacatcaagaggctcctcccatcggaatttgggcacgacgtggatcatcacaatgcagtggaaccagtgagtagcttcttcgagaaaaaagtgaaaatccgaagggcaattgaagctgaaggaattccatacacttacatcagttcaaattcctttgctggacacttcctacctaacttgttacaacaaaatgtcacagctcctcccagggatgaggttgtcattctaggagatggaaacatcaaaggagtttatgttatcgaggaagatgttgcgacttataccataaaagcagtggatgacccaagaaccttgaacaaaactctgtacctgagaccccatgccaatgttttgaccttcaacgagctcgtgtccttgtgggagaacaagattaagagcacccttgacaaaatctacgttccagaagatcaacttctgaagagcatccaggagtcttctttccctgccaatttcatgctagcattaggccactcaatgctggtaaagggagattgtaactatgagattgacccttctttcggtgtggaagcttctaaactttatcctgaggtgaaatacactactgtcgacaactatttgaatgcgtttgtctgaaatcaagggaatgcgtcattgccaataaactgctccatccaaaatcttgtgtattgctcgagcatttgtaccgtgtcatctttctattaagtagttacctgttgttgttgtcttgtcgtcaaaagactcctcccatcttaaattctactgttgttcttgttcacttagcatggtgttgcttgaaagttcttctaatgtagtattacgattattttgcc

SEQ ID NO: 12855 - DNA, 950 bp, Arabidopsis thaliana
  Clone ID: ARABL1-01-Q1-B2-F1_FLI
caacgaagaagaagacctaaaagatcgggacttgaaactatgatcaaatcagaagcagatctctccgatgtgatcgtgattcgtgacgtttgggcttataatctcgagtcagagtttgacctaatcagaggaatcgtcgaagattacccattcatctcaatggatacagaatttcccggcgtgatttacaaggcggatctcgacgttctccgccgtggaaaccctaattatctctacaatcttctcaaatccaacgttgacgctttaagtttgatccaagtcggtcttactctctccgacgccgacggaaacctcccagatctcggcggtcaaaaaaaccgtcgatacatctgggaattcaatttccgtgacttcgacgtggagcgtgatccacacgctcctgattcgatcgagctactccgtcgtcacgggatcgatttcgagcggaaccgtcgcgaaggtgttgaatcggagaggttcgcggagctgatgatgtcatcggggttgatctgtaacgagtctgtgagctgggtgacgtttcacagcgcgtatgattttggttaccttgtgaagattctcacgcgccggcagcttccggtggcgttgcgtgagtttttagggttgcttagagctttcttcggtgatagggtttatgatgtgaaacatattatgaggttttgtgagcagagattgtatggtggtttggaccgggttgctcggtctcttgaagttaaccgggcggttgggaaatgtcatcaagccggttcggatagtttgctgacgtggcaggcgtttcagaggatgagggatttgtatttcgttgaggatggggcggagaaacacgccggagttttgtatggtttagaggttttttgagggatttataattaattaatttaattaatctttgttaatcatttatacagtcgaaatcgaaattatcttattca

SEQ ID NO: 12856 - DNA, 1570 bp, Arabidopsis thaliana
  Clone ID: ARABL1-032-Q1-E1-B3_FLI
agaaaatctcagaaatcagagacaaagcagtagcaaatcgtaacaagtatgttggcctctcatcaacgggaataacatataaatctggttcctcagcttcatttggtggtagttttcaaagtggttcaagcaattttgacagctacaaggatagagattccagagaagacaagaatgactacgagtcttttcaaaagtcaagacgtggtgttaaaactgaggagcaaagctacacttctaagaagagtttttcacgctatggcagcacggaccatgacaatctatccagtggtaaaaagtcacccgattctgccaaacataggtcatatgtatctgcagctccttcaaacaacgatgatgattttgatgattttgatccacggggaacttccagtaataagccatccacaggcagtgccaaccaagtggacctttttggaggagatctgattggtgacttcttggattctgggccaacagaaacatcttccaccaacaacaacgagaactttcaagaggcggacttgtttgctgatgcagcttttgtatcagcctcggctcagggagctgaatttgggtcacagacacagaaacaagttgatcttttctctgcgtctgaaccttctgtcacagtttcttcagctcctccgacggttgatctctttgcatcttctgaatcagttgtaagcccagaagccaagatatcaatacctgagtctatggctactcccaacattgttgacccatttgctgcagttcctatggataattttgatggatcagatccttttggtgccttcacttcccactcggcttcagtttctacaggtccacaagctccaagtgtacatgggagtgcaacaaacaccacaagcccgctgtctttcgcagactcgaagccacaacatttgcaaaagaaagatcctttccaggtgaaatcaggaatttgggcagattcgctgagccgtggactgattgatctcaatataactgctcccaaaaaagcttctctagctgatgtgggtgttgtgggggatctgagcaatgaagatgggaacaaagcatctgctgcatcgtactactcaggctggtccatgggtgcaggatccgggcttggtaaaactggcctatacagtacacagcagcagcagcaacaacaacaacaacaacaagcacctgatatctcagacgatttcttctccagcctcagtaaccaaaggtaccaatctggtggctttaagcagtgaaattgtctgtgatttggtgttgagatgaaaaggcatatcaagtttgattctacattccatactggaaatgtaagtttttttaatgggtttgttgttcttgcacttcattcatgggacaatctggtcggtgactgatgtgccattgttgttgtggcgtttactttgggtttaaatgagagagagaagaattgtctttatgttttttttgataagagagtacttttattattggtttaaagtttcgatttgttcatagaacaaaagtatatgtatctcttcccactcaacaaatattttttttatcgcgtgtgattcttaatccg

SEQ ID NO: 12857 - DNA, 616 bp, Arabidopsis thaliana
  Clone ID: ARABL1-033-F4_FLI
tggtgattcaatacaaacgaaaacaagagtttcctatggtgaaagaaggaatggtcatgaccgagaagccaaagaggaatctcataagctctaatgagaagcgatacaaaggaataaggatgaggaagtggggcaagtgggtggctgagataagagagcctaataaacgatcacggatctggcttggttcatacaaaaccgccgttgccgcggcacgggcctacgataccgctgtgttttacttacgtggtccttcggcgagactcaatttccctgaagaggtctttaaggatggaaacggcggtgaaggcttaggaggagatatgtctccgacgttgatacggaagaaggcggctgaggtgggagctagagtcgacgcagagttgcggttagagaataggatggttgagaacttagacatgaataagttgccggaggcatatggattgtaatttatagtttggtagtttataggttggagattgcccggagacagagtcaaacagaggttctctgactcatatgaggcataatatagttaatatagtaatttttgttttgagcatagtaattatgtcataacatggatcctgaaaaaacaaacaaataacgaaac

SEQ ID NO: 12858 - DNA, 1032 bp, Arabidopsis thaliana
  Clone ID: ARABL1-033-G2_FLI
cacagctttaaaaagaaccaaacctttataagtgttttttagacattgggagagatgggaaaagatattgagctcccgggttttaggttccacccgactgaggaagagcttcttgatttctacctcaagaacatggtttacggtaagagatcgagtgtcgaagtcattggtttccttaacatataccgtcatgatccatgggacttacctggtttatcgagaatcggggagagggaatggtacttctttgtaccaagggaaaggaagcatgggaacggtgggaggccaagcaggacaactgaaaaaggatattggaaagcaactggatccgatcgtaaaatcataagcttgtctgagccaaaacgtgttatagggctcaagaagacgcttgtgttctatagaggaagagcaccaggaggaagcaagactgattgggtgatgaacgagtttcggatgcccgataattgctccttaccaaaggatgttgtgctttgtaagatatatagaaaagctacttcattgaaagtattggagcaaagggcagagatggaagctaagatgaatcaaacatgtcctaactctcctctttcgtcttccgagacgatttctttcgttggtaaagaagaaaacatgatgacttcgttccgtgctcctcaagtaatagctatggaagaagcaaacaagatccaaatgcatcaagaaaacgcgaaaaccgaagagaaacaaagagaagcagagaccaaagaaccttcttcatcactgaagctaccgtttggaagtttaccagagctacaattaccaaaaccaggagtagaatgggaccagttgttgagtataagcccatggctccagaatcttacaccaatagttaacatatattggtaggatatgtaaagaacaaatacatttaaatattcttactctcgtaaaaaacagagcttgtaccaaatagtatttactaaacttttatgtatcttttgtaattttgtaacataagaaaatttgtaacactatttatagtcatatttgacg

SEQ ID NO: 12859 - DNA, 968 bp, Arabidopsis thaliana
  Clone ID: ARABL1-038-Q1-B1-G10_FLI
attccctcctcctcttcatctcttttgcagatatggatggttattattctctgtctcccatctctgtcctccaccggattaaagattccttccatttcgccgtctctgcccttctcgccaacctcttctccgctctcttcaccttcttcttcgctttagtggggactttgctgggagcattgacaggggctttgatcggccaagaaacagagagcggtttcatcagaggagccgccgttggtgctatctcaggcgccgtcttctccatcgaagtctttgaatcttccctcctcctttggcaatccgatgagtctggaattggatgccttctctacttgattgatgtcattgctagccttttgagcgggaggcttgttcgtgagcgtatcggtcctgcaatgctaagtgccgtccagagtcaggtacaactaccatttcttttctttgatgcatcattcattatccttctcaacttttgtattaataataaacagatgggagctgtggagtcccagttccaagatcatacagacatctttgacactgccatttcaaagggtctcactggggactctctcaacaggatccctaaggtccgaatcacagacacctctccggagattgtctcttgctctgtctgccttcaggactttcaggtgggagagacagttagaagtttgccgcactgccatcatatgttccacctaccatgcatcgacaaatggcttcgcaggcatgcttcttgtcccttgtgcagaagacatctttgaattgattttgaactcttctttcttctcttctttgtacatgaggtataggcatacacacacacacatatatacacactagtagtcttccttgattttttttagattacacgttacacagattttgatgcaccaatcattgtaacttcactcatctcttggagatcctgtttatttatgctacttattcttggcttcatc

SEQ ID NO: 12860 - DNA, 713 bp, Arabidopsis thaliana
  Clone ID: ARABL1-043-B10_FLI
ctaaattaagtaaacaaatcctaaacacaaacactctcacattgtcaccatacacaaaaatttcaaaacacttaagaaaaaacaaatttaaacagaagaatatatatcacaaaaccaaataaacattcagtctttaaatttcccacggcggagataaacaatctccgatactcttttcatcaatgccgatagcgaaaccgatcaaccaaaacactactgttccatatccaccacaacattacagtaaaccgcctctagtcataatcctaaccgtgatcctcctcgtcgtctttttcatcggttttttcgctatctatttctgtaaatgtttctaccacactctcaccgaagcttggaaccaccattaccacaacggattgcccgaaaatcaaatccaagcacaacaagaacccgttcaaccaccggttaaccctggtctagagccacacatcatccaatcctaccctttgtttccattctcatccgtcaaagatctcagggaagacaaatacggtctcgaatgcgcgatttgtctacttgaattcgaagaagaacacatcctcctacgactcttgacaacttgttaccatgtttttcatcaagaatgcatcgatcaatggcttgaatctaacaaaacatgcccggataaattctcgagatcgaaaacgacaggtcattcaattgtgaggaataaaccggaggaagaagatcgg

SEQ ID NO: 12861 - DNA, 2205 bp, Arabidopsis thaliana
  Clone ID: ARABL1-045-Q1-B1-E8_FLI
cgcttctttcttatataactgtctcttcatattctcactccttctcctccctcttctcctttttctctcttaagttctataaatgttcatatttgtttctagctaagaagtttgtataaggcagtggacatggctcctgtttcaatgcctccaggtttccggtttcatccaacagacgaagagcttgtcatatactacctcaagcgaaagattaatggtcggactattgagttagagataatacccgagattgatctttacaaatgcgaaccttgggatttacctgggaagtccttgctgccaagtaaagacctagaatggttctttttcagtcctcgagaccggaaatatccaaacggatcaagaacaaaccgggcgaccaaagcaggttactggaaagccaccgggaaagatcgtaaagtgacttcacattcacggatggttggaacaaagaaaacattagtttattaccgaggaagagcgcctcatggctctcgtaccgattgggtcatgcacgagtaccgtcttgaagaacaagaatgtgactctaaatccggtatacaggatgcctatgcactttgtcgagtatttaagaagagtgctttagccaacaaaattgaagaacaacaccatggtacgaagaagaacaaaggaacgactaatagtgaacaatctacttctagtacttgtttgtattctgatggaatgtatgaaaacctcgaaaactcggggtatccagtctcacctgagacaggaggcttaactcaactcggtaataattcgtcgtcggatatggaaacgatagagaataaatggagtcagtttatgtcgcatgacacgtccttcaacttcccacctcagtctcaatatggaacaatctcatatcctccctcgaaggttgatatagcgttagagtgtgcaagactacaaaatcgtatgttgccaccagtaccaccactttacgtagaaggtctcacacacaatgaatattttggaaacaatgtagctaacgatacagatgaaatgttgagcaagattatagcattggctcaagcctcacatgagccacgaaacagtctagactcatgggacggtggttctgcttccgggaacttccatggagactttaactattccggagaaaaagtctcatgcctagaggcgaacgtggaggctgtagatatgcaagaacaccatgtgaattttaaggaagaaagacttgttgaaaacttgagatgggtaggagtatcaagcaaggaacttgaaaagagcttcgttgaagaacactcaacggtaattcctatagaagatatttggagatatcataatgataatcaagaacaagaacatcatgatcaagatggtatggacgttaacaacaacaatggagatgtggatgatgctttcacactcgagttttcggaaaacgaacataacgagaatcttttggacaagaacgatcatgagacaacgagttcctcatgttttgaggtggtaaaaaaagttgaggttagccatggattgtttgtcacaactcgtcaggtaaccaacacattcttccaacagatagtaccatcgcaaaccgttatagtttatataaatccgacggatggcaatgagtgttgtcatagtatgacatcaaaagaggaggttcatgtccgtaaaaagataaatccgcgaatcaacggagtaagctcaacagttcttggacaatggagaaaattcgcgcatgttattggcttcattcctatgcttctattgatgcgttgtgttcatcgaggtaactctaacaaaaacagaggcagtgaaggttactcgaggcagcctacgagaggagattgtaacaatcggggaacaatactcatgatggaaaatgctgtcgtgagaagaaaaatttggaagaagaagaaagagaaaaatatggttgacgaacaaggttttcggtttcaagatagtttcgtattgaagaagttggggctttctcttgctatcatcttagctgtttctaccataagtcttatttgaatactgaggttcaatatatcatatatggcttttcacttttctattgtactcccatttgcctaggtcgtatttactctcatttgctttttccatttctctaaagtcgtctaaacaaaactagatttggttattttctgtttatgtattaagtgatatgatctctccgcgggttgaacgatc

SEQ ID NO: 12862 - DNA, 429 bp, Arabidopsis thaliana
  Clone ID: ARABL1-046-F3_FLI
ctcgagccgttcagtgttctcttcttctccactaattcagatcacattcaagaatcttcttcactcacatctctgaaaaaatggcgagcaacatggaagttttctgcgagatcttaatcgcgatccttcttccacctcttggagtttgtctcaaacgtggctgttgcactgtagagttcttgatttgcttggtgctgacaatcttaggatacatcccagggataatttatgcactatacgtgatcgtgtttcaaaaccgtgaaggctctaccgaacttggagctccacttaactcagcttgatctgttttggtccattacacggatcaatatgttgttgaaactgttttacttatcatgtaccaaataataagttgctttgcaatttttatgtattgaagatttgagaacattgtcgcgttattgatac

SEQ ID NO: 12863 - DNA, 375 bp, Lycopersicon esculentum
  Clone ID: CC-ESFLCLEL15J17_FLI
aaagaattcggcaccagagcaaatgagaaggcagtggaattatttattagtgagagaattagctacttggatattttcaagattgtggagttaacatgcgcgaagcaccgggaagagttggtgtcttctccatcgctggaggaaattatacattacgatttgtgggctcgagactacgcagccagtttggaaccatcatctggtttgagtccagctcttgtatgatttgttttttcggttagcacccaacatgtttacccagtaaaaggaaattgttaaaagggtggggaaatatgcaaatatgtatgtgtaatatgattaggttacatgtactacatcatcaccctttttgagtaaattcattccttttttgat

SEQ ID NO: 12864 - DNA, 1834 bp, Lycopersicon esculentum
  Clone ID: CC-ESFLCLEL16K02_FLI
aaagaattcggcaccagaaggatcatcctgccacgacagcactgtttcggtttcttcttctcaactctttcttttttagacataaaaatgttcataaaatagcagaggtgtcaaagaaatggagtgcagcagcagaacttccaattttccttctgatttggagtaccaaacaggatttgggaatcatttttcatctgaagctatagttggagctctacctcaaggtcaaaatagtcctcttatttgcccctttggactttatgctgagcagatctctggcacctcttttacttcccctcgcaaacttaatcaacgcagttggctatatcgtattaagccatcggttacacatgaaccgtttagaccaagaatgccgagacatgaaaagcttgtgagtgaattcaaccagtcaaacagttctgctacaccaactcaactaaggtggaagcctgttgagataccagaaacaccgactgatttcattgatggtttgtatactatatgcggggctggcagctcatatctccgacatggttttgcaattcacatgtatactgccaacaaatcaatggagaactctgccttctgcaatgctgatggcgactttctgattgttcctcaaaaaggaaggctgtggattactactgaatgcggaagattgcaggtttgtcctggtgaaattgtgattttgcctcaaggatataggtttgctgttgaccttccggatggaccttcacgtggttatgtcgctgaaacttttggaactcatcttcaacttcctgatctggggccaataggcgcaaatggtctagctgctccaagggattttcttgttcctgttgcctggtacggagatggctcccgtccaggttacactattgtgcagaagtatggtggtgaactcttcactgcgaagcaggacttctctccttttaatgtggtcgcttggcatggcaattatgttccttataagtatgatttaagcaagttctgcccttacaatactgtattgatggaccacagtgatccttcaattaacacagttttgacagcaccaacagataaacctggtgtggcgttgcttgactttgtcattttccctccccggtggttggttgctgaacacaccttccgtcctccatattatcatcgcaattgtatgagcgaatttatgggtctaatctatggcggatacgaggcaaaagctgatggttttcaccctggcggggcaagccttcacagctgcatgactcctcatggtcctgataccaaaacatttgaggcaaccattgcacttggaaatgaagctggtccacatagaatagctgataccatggctttcatgtttgagtcttgcctagtaccccgagtctgtccgtgggctcttgaatctccgtttatggatcacgattattaccaatgctggattggcttgaagtctcacttctcaggactatctatgaacgaagacaacgtcgatttgcagaaaggaaaacccatagaaaggtgaaatgctcattgttcagctagctcctgtagttcctcctaaagtgacttaaacttgtacataaggagtcacaggcatgtaaaacatgaaataaaccctatgttagtatcagattgaaagtttagggtggcgatccaagcgcggatatagtggtaagatgaaaccaatgttctatgaaattgcgacgcaagtaaaaatgtgttaccgtgatgatgttgcatgtagacttgtagtttatggtgcattttgtatatatataaagatggaactatcatataaatacttgttgcaattacaagagcaatgaattaagtaatgatttatggc

SEQ ID NO: 12865 - DNA, 1473 bp, Lycopersicon esculentum
  Clone ID: CC-ESFLCLEL23O18_FLI
aaagaattcggcacgagcacagatacaaccggcgctaccttcaagctagttggcttcaataatttcatccgtgctaatccccgttccgatttcttctccgtaaaacgcttccaccatatcgaattctggtgcggcgatgcaaccaatacatctcgtcgtttctcttggtctcttggcatgccgattacagcaaaatcagacctctccaccggaaattcagttcatgcgtcgtatctcctccgttctgtttcaggcgaacttcaatttgttttcactgctccttattcgccgtcaatttcagtaccgtcaacggcaggtatacctagtttttccacccctacttatcgggattttacggcgaagcatggtcttggtgttcgtgctgttgcgttggaggtggagaacgcttacctggcgttctccgctagtgtggctcgtggggcgaaaccccggtttgaacctgtaacgattgatgagcatgtggctgttgctgaagttcatctatatggcgatgtcgttttgcggtttgtgagtcttgttaaagatgcggataccctcattttcctaccaggttttgaggccatggatgaaacatcatcattcaaggaactggattatgggattcaccgactggaccatgccgttgggaatgtgccggagttgggtcctgtagtggactacatcaaggcatttacggggtttcatgaatttgcggagtttacagctgaagatgttggaactgctgagagcgggctgaactcagttgtgttggcaaacaatgacgagacagtattgcttccgttgaatgagccggtatatggaactaaaaggaagagtcaaattcagacttatttagagcataatgaaggggcaggagtgcaacatttagctttggttactgaggatatattcagaacattgagggaaatgtggaaaaggagtggagttgggggatttgaattcatgcctgcacctccgcctacttattataagaatttgagaagtagggccggggatgtactcagtgacgaacaaatccaggcgtgtgaagaattggggatcttggttgacagggatgatcaggggactctgcttcagatatttaccaagcctgtgggagacaggccaacaatatttatagaaataattcagagaatcgggtgcatgctcaaagatgaaaaaggacaagtctatcagaagggcggttgtggaggcttcggtaagggaaacttctctgagctgtttagatcgatcgaggaatacgagaagatgcttgaagccaaacatgttaatcaagtagctgctgtcgaatgaatatatacgagcattagcttgcaatctaattgaaatttgaaaggggcatctaagcttccatttgatctttctacaattaattatgaaataaaaaatagctgttgtgtaaatagcatggagggaaacaaagtcaagtaatttaagtataatgttgatcat

SEQ ID NO: 12866 - DNA, 1483 bp, Lycopersicon esculentum
  Clone ID: CC-ESFLCLEL39C24_FLI
aaagaattgctctcaaaactttcatcggcctccgtcaatcctcgccggaaaacaactctattaaaatctctaaatccctccctaccaaccacacccaccgtaggctacgtatcaatgcttcgaagtccagcccaagagtcaccggcagaaaccttcgcgttgcggtgattggtggtggtcctgctggtggcgccgctgcagagacgctcgctaagggtggaattgagacctttttgatagaacgcaagatggacaactgcaaaccctgcggtggtgccatcccactctgcatggtgggcgaattcgatctacctctcgatatcatcgatcggaaagttaccaagatgaagatgatttccccatccaacgtcgccgtcgatatcggacagactctgaagcctcacgagtatatcggtatggtgcgccgcgaagtactcgatgcctacctccgggaccgtgctgctgaagccggagcttctgttctcaacggcttgtttctcagaatggacatgccaaaagccccaaattcaccatacgtcctacactacacatcttacgattccaaaactaacggcgccggtgagaagtgcaccctggaagttgacgccgttatcggcgcagacggcgcaaattcccgtgtcgcaaaatccatcaacgctggggactacgagtacgccattgccttccaggaacgaattagaatttccgatgataaaatgaagtactacgagaatttagctgaaatgtatgtcggcgatgacgtatcccctgatttttacggttgggttttccctaaatgtgaccacgttgccgtcggcacaggcaccgttacccacaaagcagacattaagaaattccagctagccacaagactgagagccgattccaaaatcaccggcggaaaaatcatccgagttgaggctcatccaattccagaacacccaaggccaagaagattacaagacagagtcgcattagttggggatgcagcaggatacgtgacgaaatgttcaggcgaagggatctacttcgcggcgaagagtggacgtatgtgtgctgaagcaattgttgaaggatcagaaaatgggaagagaatggtggacgagagtgatttgaggaagtacttggagaaatgggacaagacttactggccaacatacaaggtgcttgatatcttgcagaaggtattttacaggtcgaatccagcaagagaagctttcgtggagatgtgcgctgatgagtatgtgcagaagatgacattcgacagctatttgtacaagaaagttgcaccaggaaaccccattgaagacttgaagcttgctgtgaataccattggaagtttggtgagggctaatgcactaagaagggaaatggacaaactcagtgtataagaagaggataaaatttcatagtagctaatattttgtaaacttgatttgtaattgaagtatttatgccttttatcgaatttcatgttacttgc

SEQ ID NO: 12867 - DNA, 960 bp, Zea mays
  Clone ID: CC-ZMLE18900030B01_FLI
gctcccgtcttcttcctcgaccgctaaccttaccggtccccaaatgtcgcctctcgtgctgctgctcctcgcgcacctactcgccacggccactgcagcgggagcagcgccgaccagggacgacgggcctcctgctccgtcgtcgtcgtccccgcgggtgccggcgacgacgccgccgtggccggaccagttccacgcggtggtggtcacgaacctgagcgcgcgcggcggcgggctgcagctgatcgacctgtactacgactggccgcgagggcgcgacctgaacatcgtccgcgaccagctgtccggcgagcggcgctggagctggaacgtggagtggagcaacggcaccgccttcctgttcgactccgcgtcctgccgcacattccagttcgccgtgggcctcctgccgcccgactggaaggcccgcggcgccgcttacctggggcgcgaccgcgtcgacggcttcgactgccacgtctggtacaacttcgtcttcgcccgctactacgaggacgtcgccaccggacgccccgtcagctggaacttcaatgggctgcagcggcatgtgctgagcttcgaggcgggggcagtgctgctggactcctccaagtggcaggcgccggcttactgcttcaccaacaccaatggcagcagtgccaacgccgccgcttcgtcttcctgagatcacgtcgctgggcctccggagtccggtgtccgggctccacctgcagctggacgctgcatgtcatttggcagtcggctctcatcttgatggttgactcaggagaggcttttactattagtcagtactgattctcgcgtcgcgtgggctagaatcttaagacataattattactagttactaatctctgtaccaaaaagatgtaactacaggttacattacatctttaaaaaaatatgagaagcctcaacactaggcaaaacacccttagtctt

SEQ ID NO: 12868 - DNA, 1757 bp, Zea mays
  Clone ID: CC-ZMLE18900031H12_FLI
gcgccaagaacgcactgagtccattcctcctcttcccctcctatcgcctctctctgcccctctcctccccggagattcctgctcctcccgactcccaagggttatcctattcactctgcctgctgccaaggccaactaggatatcaactaggaggagttgaggaggaatggctgttggcggaactcaaccggtcctcaggaagtacctaggtgccctcaaggacacaacgactgtgagcctggcaaaagtgaacagtgattataaggaattggatattgcaattgtcaaggccacaaaccatgttgagcgtccatcaaaggagaagtacataagagaaattttccattccatttctgctgctaggccacgggcagatgtagcttattgcattcatgcccttgctagacgtctttcgaagacgcgcaattgggcggttgcgctaaagacattgatcgtcattcatcgtgcccttcgggaagttgatcccacttttcgtgaagagcttcttaattatggcagatctaggtcacatatgttgaacatggcctactttaaggatgactctagtgcagaagcttgggactattctgcatgggtgcgcatttatgctttatatttagaggagagactcgaatgtttccgagtgttgaagtatgatgtagaaacagatcctccgaggactaaggatcttgatactgttgatttgcttgatcatctgccacaattgcagcaactcctttttcgtcttcttgcttgccagccacaaggagcgtcatcttacaatgttataatccagcatgcactctcaatggttgctttagagagtgttaagatctacactgcaattagcgatggaacaatcaatctagttgacaagttcttcgagatgcaaaggaatgatgctgttagggcacttgatgtatacaaaagagcaactaaccaggctgaacgactttcagaatttcatgaagtgtgtaaaactatacacattgggcgtggtgagaaattcctgaaaatcgagcagcctccagcatcattcctgcagactatggaggactatgttagagatgctccaacaggtcaaaaacaaaagactatactagcgatagaatacaaaaaagagccagaggaggaagaaaaaccggcctcccctcctcctgctccagaacaggaaccggaacaagagcctgagccagaacccgaaccagtgaaagaggaagcaccagaagccgagccggacttgctgggtctgaacgaaccgagccctgctgcgaccgcgatagaagagcagaatgctttggcgctagcaattgtcccgatagatgatgttccgggagctgctcctacttttgagaacggagtcacaggctgggaactggccctggtgacagcaccgagttcgaccgagaccgccgttgccccaagcaagaaactggccggtggtctggacttgctgacccttgatagcctgtacgacgaggcgaaccggagagcgagccagccggcgagctacaacccctgggatgcaaccgcgtctgccccgatgatgaccaccatggcgccggcgatgcacgatccgttctacgcctcgaacgggtacgcggcgccgcacggcgtgcagatggcggcgatggctcaccaccagcagcagcagcaggttttcatgctgcagcagcagatgatggcgccggcgccggcggtccaccacccgatgcagatgcagcagaaccccgcgaaccctttcggcaaccccttc

SEQ ID NO: 12869 - DNA, 953 bp, Zea mays
  Clone ID: CC-ZMLE18900080H12_FLI
ggtcaggtatttgtgagaggcaaggcaggagaaagatttgctgttagaaactctctatgtcaggcagtggttgagggcaccggagatcattgctgtgagtacatgactggtggctgcgtagtcgtacttggcaaagctgggaggaatgttgcagctggaatgactggtggtcttgcctacattctagatgaggatgatacacttgtcccaaaggtcaacaaggaaatcgtcaaaatgcagagagtgaatgctccagctgggcagatgcagctaaagggcttgattgaggcctatgttgataaaacgggcagcgagaaaggtattgcgattttgagggaatgggaggcctatttgccgctcttctggcaactggtaccgcccagtgaagaagactcgcctgaggcttgtgcagagtttgagagagtacttgccaagcaagcaaccacccaattgtctgcgaagtgatcgaatcagactacaggaaggtggtaggtgttttctatttgacacaaagtgatctcatcttatcacttcaagaaaatcgaagaccataaccggcgctctgaggcaccgaagtgcccgtctgaagactgcaactttgtggaggctctgcccaggccatctttttgagttgagctaacagaaccgagggttcttctcgacgctcgtgcacctaggtaacccctgtaaattggtttgctgacgctaggctgcaaggggcctgccctgtttgaactgctgtactgtacatgattcttggccgttgccctgtgtaattatgttttggttagctcgtaaatttatacgcatccaatggaggcatacaatgcaagtcgcaagcgcaatagtacggtgcatgataaactgtacggccaggttggattggaatgtttgcttcgtgaatgaacgaaaccggcgtcatgcctgtggtgtgaccgctctggttggcatcc

SEQ ID NO: 12870 - DNA, 917 bp, Zea mays
  Clone ID: CC-ZMLE18900083C05_FLI
gccagggttgatgcaaatccagcatcatccttcaagatcgccccccactttgtccggtctttagatccgccattgagtcaagctgcggcgatcgcgtgcgagactgggacggcgatgctcctctgcatctccacctgccctgtcgaccgctagccgccgcctgtttcctccaattgctaagggcttaaaaagtcgaacacccaattgccaagggcttctgccccccagcggtgaaggggagtgagaagcaccgggaagatgacgagcgtgtacatcccggtgcaggggacagaggaggaggtgcaggtggcgctggaccagcttccgcacgacgcatccgatatcctcgacatcctcaaagccgaacaggcccctcttcacctctggctcatcatcgccagagaatacttcaagcaaggaaagatagagcagttccgtcagattctggaggaaggatctggccctgaaattgacgagtattatgctgatgtgaagtatgaacggatagcaatccttactgctttgggtgctttccatactttcttgggaaaggttgatagagcaccacagaaggaatcacattttaaagatgcaactcaatactataatagggcatcaaggatagatgaaactgaaccttctacatggattggaagaggttccaccgtcttttaacattttatttaaacctcttacatatgtattggtttattatagctttcctgtacacattgtcatgtggttgtaggatgaatgaccattacattggatgcacatgggggaaaataggaaatgtccttttgtagttccattttctcgaaatcgcaggagagtccttttgtagttcaaattcgctgcaacgagtagttgtcacacaacagtgcattcttaatgtgattcaacagctattcttattc

SEQ ID NO: 12871 - DNA, 1034 bp, Zea mays
  Clone ID: CC-ZMLE189033G10_FLI
caccttgcctgtatttcaagaaatagtaaaagggatggaagaaaagggtgatatgtttaattaccttgctggttgctgctgctgcctgtaaagccattccattggtagaggagtgccgaagtcaagtcagggtgcaaagttggatgaatgaactcttgaacctttttgtttgtgccattctttattaatatgggctttatcccatgtaataagacaagtaactcttacatgaaacttatgttctgccatggagtttccaagtaggttagttgctcctggtgtcataatctccaaataaccccatgagaatatctttgtttgccctgtccaccaggtatttcaagtttcaactgaaaaattatacatcctatagtttgcaaatgagcatgaattcgtggcgcatgaaaaaaaaagtatattctgcttgtgtatttcatttaatagactgtgaaccaggtattatcagcctggaaagaacagtcacattagcaacatgtttgtgttctgacaacctgaggcggtgtcgctattacaaatctatcgttggttccgtaatcaccttgtatgctgtttggttgacgatggtccaacaaaaagaaaataattctagtcgtcttcttttgatcttgttcttgtgactagcagaggccgcggcgcaacatggcgaagatcaagccgaaggccttgctcgcgcaaagcaaggtgaagaaggtccccggccaaatcagcgtggccacgatcgtcacctacatgatcctcggcgtcctggtcgtgtcctccgtttacgctgcctacaggtactgctgggcagtcacaggagcagcggaggcagtgggcgcccaggggaactgatcccccttccgactgcgtggctgatctcgctgttgttgtatcatccggttggggtaaaatttttggttgttgctgtctagcaaatggggttcatgggacatggataggttgtatgttgatacggttacaccgtagccgatgatatgtatgttgaatttcttcccttttattatcatttgacg

SEQ ID NO: 12872 - DNA, 1052 bp, Zea mays
  Clone ID: CC-ZMLE189035G12_FLI
caatgttactttatcctctcctcgtgcagccaagaccgggatgaccgccctcaccccctcggctccctgcccgtgcccgtcatcacctgggcaccatctcctcatctccatggccgcccttctcctatctcactgctcgcccctgcctttccttcattgagccgcgcctccctggtgtgtccacgccgtcggtaagtgctcgcgtgggaccctgtctcacacgtcggtgctcgccctagacactcccgtgtcctcatcccctatagtgctcggattcggtcatcgtctcacagtctcgacccacctccagccgatgcctcctccctccatcttgccctctacaggtcgtccctcacttagtcctccgccttgtctccggaccacgctactctttgtgcagcaccactggtcgtcgatctgtcaacctcgctggtcgtcgtccggtgagccccccaccattcttgccatggcttgcattccttgtgcgcaattaaatgtgtgaaccggtgaatattgtagttcttgtggatgtcgagtcgaattaatagctatggttatatgtgtttttgtgtgtgaggttggaggagataaatccctggttgtcatgtggagaaggctttagtgcggagctcaccgtgtgtttgacgtaatgcttaactaggactcatcgtcgattttgcggattcgagtcaggtcttgtagggagaaacagtttcggctgaagctgtccgcatgtgatgaccgaaggttcctcagtatgaagcttcggaattacaaaccgacttaagagtagaatgaccttacagtccataaatgtttgagtcgttgttgtaattccttataagggacataattgtaattcctcacaggctgtgtcccgtgcctataaatagtgaacagtattcctttactgttcacgcattcctgtaattgcaatcgcatcattcgggaatcaatctttgtcaaggcaaaggtataattgtattcaacatttaaacacattaaatcgatataataagaaagtaatataattcatttataatttgtttacc

SEQ ID NO: 12873 - DNA, 978 bp, Zea mays
  Clone ID: CC-ZMLE189036D03_FLI
gcgcatccgcagcttccccagccagctagggtttgcagatgacgaccgcggcgcgccccacctgggcgccggccaagggcggcaacgagcaggggggcacccgcatcttcggcccctcccagaagttctcctcccgcgacctcgccgcgcacacctccctcaagccaagaaaagacggtcaacagacccaagaggagttacagaagaggaatctcagggaggaacttgaggaacgtgagcgcaagcactactcttccaaggataagtcctatgccgaagaaagagaccggcggaaaagctctagccatctactcttagaaggttcaaagagagagacagaggataagatagttccacgagaaatcgatgctgatgactccgatgtggagcctaaaagcgatgacgagagcgatgaagatgatgatgatgacgacactgaagctctaatggcagagcttgagaggattaagaaagaaagagccgaggagaagcttagaaaggagcggcaacaagcagaagaggaggccaagatgaaggaggctgaactgatgcggggaaacccgttgattaatatcaacaatgctggctccttcagtgttaagagaaggtgggacgacgacgtggtattcaagaatcaagcacgaggagagaccaagacaccgaaacggttcatcaacgacaccatcaggagtgatttccaccgtaaatttcttcagaggtacatgaagtgacgcttccgtcgttcacaattcagcctggagcccctcatcgttatcatgtttgtgtatgagcgaaagatcattattgtgttgctgtatgaaacaagcgtgtaaacatatgtctactacttaacaaagttatgctgagcaatgcatatcctagttgaatgtgacaatgcaatgttttctatattttgacgttatttggttgtaatcatatttaagtttgactaggaaagatgagctcagagagcagcac

SEQ ID NO: 12874 - DNA, 406 bp, Zea mays
  Clone ID: CC-ZMLE189044A09_FLI
gttactggtcatgtagaaaataagggctggactatccggcatgtggactacaaggacacctcggagaaggaagaggtcgggatccgtgggttcaagttcgacaagtctgagcagctagaggtgaactacaccgggccaggaaagcatagcttgagtgcgtcaaaagaaaacactcttgacttgcatgcttgacctgactagcttcgtacaaaaatagaaatagctcacatctgggtcgcctcccagattctgggagggaggccattgccagcgtagctgaaaccgttcttctctttcccccacgtacaacaagaagcaaagtgcttcaccgatcactcaacattcttttatgtatatctttacttgtacagaaccctcgttcgtagccagacattttctcctcttc

SEQ ID NO: 12875 - DNA, 983 bp, Zea mays
  Clone ID: CC-ZMLE189061E08_FLI
ggtggacagaccatggagctctgcgtctctacacccccatctccgtccgcgccaccgccgcgcccatatccttcgccccgccccgacgtggcgcgtctgcctccaccgccgttccgccccaccgccgcatcccaactcgaggctggcgctgcgccagcgcggccgtgcctggcccggtgccctccgaagagccggcatccgcctcctacgccgtcgtcgtctcggacaagcccgatacgcctgccgacgacaaggccgaggaggttagcgccgcgcctagtggctccgcggaggcgcctatggcagagctagtgccgtcagaggcgtccccgtccccagatgatggcggcctggatgagattctaagcaagttgaacattgaagtgtctccaactttaatcctcactggatttggtgcttttattgctttatggatcctatcttctgttgttgctgcagttgattcagtccccctgctcccaaaattgctggaattaataggaactgcttacacaatttggttcatcgcacggtatctccttttcaaggaaagcagagatgacctgtttgcaaagttcgaagatctcaaacagaggattatttgatctatcgtcgaccttttgccacgtgtttaggctttacagccagcttattattaggtttttttctccctttcgtttgaatattactggatgggtaaagaaggtcatgtatctaaattgtctcctcagggcttgttcggttctactccaatctatatggattgaggggattgagatggtttcaatcactagtaagtcaaaatctctccaatccgtatcaatcccttccaatccatatggattgaaaataaccgaacaagccctcatggggtctgactagtgcgcttcttgaggtcactatgaatttttttactcaatcctatgtgtatattgtagagtaaacctttgaaatggtgaatacggttagtatcttcccactcc

SEQ ID NO: 12876 - DNA, 178 bp, Zea mays
  Clone ID: CC-ZMLE189061G05_FLI
gatagatagttcatagctagactgctagactagataattccatctccgtcgtgacgacgcaaggcctcatgatgattgagctcgagcatggctggcatggcagcacttcctgcttgactgcgtctgcgtggtcagattaagcctttgataattgtaagacgatctgaaaatctgagtg

SEQ ID NO: 12877 - DNA, 980 bp, Zea mays
  Clone ID: CC-ZMLE189062C02_FLI
caccaccccaacaacccacacaccgcaaccatggtcttcaccatcgatctctccggcaagacgattgtcgtctcgggcggcaaccgcggcatcggactggccatgtccgaggcctgcgccaacgccggcgccaacgtggccattctcttccactcgcaccccaaggcgcacgaggcggccgagaacgtggccaagcagttcaacgtcaagtgcaaggcgtaccagtgcgacgtcggcgacgccaagctcgtcaaggacacggtggcgcagatcgagggcgacctcggcacgcccatccacggcctctgcgccaacgccggtgtctcggtcgtcaagcctgctctggagctcaccaccgaggacttccacaaggtcttcaacgcaaacgtcctcggcgccttcaacacgtgccaggccctcgcgcagcactgggtcgagaagggctacaagacgggctccatcgtcatcaccagctccatgtcgtcgagcctgtacaaccagaagggcctcaacgaccctctgacgcagatcttctacaacgcctccaagggcgccgtgacgaacatggtcaagggtcttgccaccgagtgggtcaagcacggcatccgcgtcaacgccctcgagccgggcttctgcgagacggagcagacgagcggcatggaccccaagattcgcgagtggcaggccgcctcggtgcccatgggccgcttcagccagccgcacgagcaggccgacccggccatcctgctgctgtccgacaaggcgtcgtacatcaccggcacgcagctgcggcccgacggcggcttcagcgcctactaagcgctgcgccgcgacatgtactgcgcacgctccggcctcgatacctgtctactccgggccgggagctgcgcagcagaagggacatacacgcacacacacacacacacgcacaaccgttttgtagttgagcgcaacctgatgaactcacgatactagcacct

SEQ ID NO: 12878 - DNA, 932 bp, Zea mays
  Clone ID: CC-ZMLE189066E12_FLI
cagcattcaaaaacacaccaagcgaagcgcactagcaacgacctaacaccaatggctaccaagatattagccctccttgcgcttcttgcccttttagtgagcgcaacaaatgcgttcattattccacagtgctcacttgctcctagtgccattattccacagttcctcccaccagttacttcaatgggcttcgaacatccagccgtgcaagcctacaggctacaactagcgcttgcggcgagcgccttacaacaaccaattgcccaattgcaacaacaatccttggcacatctaaccctacaaaccattgcaacgcaacaacaacaacaacagtttctgccatcactgagccacctagccgtggtgaaccctgtcacctacttgcaacagcagctgcttgcatccaacccacttgctctggcgaacgtagctgcataccagcaacaacaacagctgcaacagtttatgccagtgctcagtcaactagccatggtgaaccctgccgtctacctacaactactttcatctagcccgctcgcggtgggcaatgcacctacgtacctacaacaacagttgctgcaacaaattgtaccagctctgactcagctagctgtggcaaaccctgctgcctacttacaacagttgcttccattcaaccaactggctgtgtcaaactctgctgcgtacctacaacagcgacaacagttacttaatccattggcagtggctaacccattggtcgctaccttcctgcagcagcaacaacaattgctgccatacaaccagttctctttgatgaaccctgccttgcagcaacccatcgttggaggtgccatcttttagattacatatgagatgtactcgacaatggtgccctcataccgacatgtgtttcctagaaataatcaatatattgattgagatttatctcg

SEQ ID NO: 12879 - DNA, 654 bp, Zea mays
  Clone ID: CC-ZMLE189070A07_FLI
ccccgaggacccatcacctgccgctggcggcggggagggcggcgggatgatggacgatgaagagagggtgggccatgcggagatcccgaccagtttcggtcccgagctgcgcgcctgcctccgatgccgcctcgtcaagacctacgaccagttcagggagaacggctgcgaaaactgcccgtttctagagatggacagagagcacgacaacgtcgtcaactgcaccacccccaacttcactggaattatctctctgatggaccccagtaggagctgggcagcccgttggttgagaattggcaggttcattcctgggtgctatacacttgctgtctcggaggagcttccagaagagtatcaagggatttgtcaagacaacaacgtgcagtatgtgccgcccaagcgtgtctaagtatcaagacggcggcaatgatggtgtcttggtcctgaagcagtatagataattaggtagaagtatctgtgcttgccaagggaactgctcctcttatgctttgtatccgagtgctaaggcagtctatttcatgttagtgataaggctgtttatttaggtggtgaaccggcgggtgattgaatcttatccaataaccttgatgcctgttcttgaaatctgtgacaacgcggttcatgtgcttc

SEQ ID NO: 12880 - DNA, 987 bp, Zea mays
  Clone ID: CC-ZMLE189070F11_FLI
caagtttcgtgggtagaggaggcactagatactgtgccagatcggggtctggtagtggcagttgggtgattacgacggagtgggatgggcctcctcgacaagctgtgggacgacaccgtcgcgggcccgcgcccggacaccggcctcagccgcctccgcaagcagcccgcgcgccccgccgccgttaagatcagtgatccggccggggacgctgcagcgctcgtgccgccctcgccggcttcgggtagcgaggagacgccggtgaaggtgacgcgcagcatcatgatcaagcgccccgcggggtacccgtcttcgccgaggagcgcggcaagcacgccgccggcctctccacttgggactaccccgcccatctcgccgtttgccggcgctggtggtcgattcagaaggaaatcatcatccgacgcatatgagagggcaacccctccagggacgaccagccaccctcctcccttcgaagtgtgaaccggctgcaccctcacacttgttttgctccttgacaagcatctcttcacctataataaggtagaggcagggaggagagaagacgaaatcaagaggggaacggggatgagttgcgggtttacctctgctgtgatatattgtaggtgccactatgtgtattgttcccccctatctactacgtggcataggttgtattctagtatgttgaaagctcatggtgccgtgctgtatcaataaggtgttatgcgcatagagtggctcaggaccagggctgcgtttgcgctttgccactggctgtgttgtatgtttcttctgctgctatgccattagggtttagggatggtgtgtggatggcgtcgtgcttgtagtgttagctgggtttgaagcggactacatgtaggtttgttcaatgtctggtatctattagctgaaggtgtttgcctgtaagttgtaactctctgtgaactgtgatgcgggataatgctaagaatagatgatcgttct

SEQ ID NO: 12881 - DNA, 964 bp, Zea mays
  Clone ID: CC-ZMLE189072C06_FLI
gctcctttcgttcttaaggttaagatctccaacatgtcaggcatgacatgagcttcacaaggaggaggcaacactagaaacttaggccctgtcaaatggttatggtttattaaataaacacaaaataatggtgatatgtttaaataatagtggttgactaaataatatcagactttttattgtaatttcaatcagttgaataatagtttagcttttttattattgtgctcttttgcagatgagtggagctacattgttcaacctttcactgctaacatctgacatgtgggcagtcgccattcgagttttattctatcagcaagagataaacaggttgtactacctagcattcacagttgtggccattggattaatcatctattcgttgaatgatagatcttcagatgatgaaacagctggaagtacagaagcaccagcccaatatcagcaacttccaattgaagacaattcaacaagaattggttctagttcaggaaaatgtttaattggctcaagaagctaagcaagatgaggaagagaatcagaattaattttctttacaagtcagtccagcagattattcacaagagcagaaccattgctgaaggctcccgcatcagtgagatctaaggaagggataatacatcgggttaaaatgatctttgactagggattgtgaacaatcacagctggtctgcaaagcataatagcaacagtatgaacatgtaaagggagttactagtcactaaagctctttcaagaattgcctatgaaggaaaaaagatatttttagatagcatatggatagcttacatgctttactggaatgcagagtgctaaagcgccacaatattttcttgttaggagaattatgatttaatgatattttctatattactcattgtaaaattctatgagaagtatcatgccccgtgaattggaagctaaggggtaagtgaaaaat

SEQ ID NO: 12882 - DNA, 1102 bp, Zea mays
  Clone ID: CC-ZMLE189097C07_FLI
cccacaccgggcacaccccccgagctcagcttagctccactccagctccaatcacagtcgtgaccagagcgcgagagctagctagagggccgtgaaaatgccgatcaataggatcgccctggggagccaccaggaggtgtaccacccgggcgccctcaaggcggcgttcgctgagttcatctccaccctcatcttcgtcttcgccggccagggctccggcatggccttcagcaagctgaccggcggcggcccgacgaccccggcgggcctgatcgcggcggcggtggcgcacgcgttcgcgctgttcgtggcggtgtcggtgggcgcgaacatctccggcgggcacgtgaacccggccgtgaccttcggcgccttcgtgggcggcaacatcaccctgttccgagggctcctgtactgggtggcgcagctgctggggtccaccgtggcgtgcttcctgctccgcttctcgacgggcgggcaggccacgggcaccttcgggctgacgggcgtgtcggtgtgggaggcgctggtgctggagatcgtgatgaccttcgggctggtgtacacggtgtacgcgacggcggtggacccgaagaagggcagcctgggcaccatcgcccccattgccatcggcttcatcgtgggggccaacatcctggtgggcggcgccttcgacggcgcgtccatgaaccccgccgtgtccttcggccccgccctcgtcagctgggagtggggctaccagtgggtgtactgggtcggccccctcatcggcggcggcctcgccggcgtcatctacgagctgctcttcatctcccacacccacgagcagctcccctccaccgactactaaaagccgaagccgaccgacccaggggtgcgcagcgcagcgcagctagcatccagcgctctctccccgctcgccgccgtttagtttctctcgtgcacgtgcatgcatcgtagactgtctcaggccgccgctgcgccggcgccgctcgcatcgtttgcttccttggaccagcagtcgtcgccgtcaggctgaactgcttgtaaccgtgaattccggacccgtttgcttctgtaagatttgtgcatttgcctgagt

SEQ ID NO: 12883 - DNA, 1673 bp, Zea mays
  Clone ID: CC-ZMLE189101G07_FLI
gtgttcttgcgcgtacgcgtacacagccccgatccgaatcgtcctcctcgcgagcctcgccgatcccccactcccctcccctcgcttcaagatgcagatctttgtgaagaccctcaccggcaagactatcaccctcgaggtggagtcttctgacaccattgacaatgtcaaggctaagatccaggacaaggagggcatccctcctgaccagcagcgccttatcttcgccggcaagcagcttgaggacggccgcacacttgctgactacaacatccagaaggagtcaacccttcatttggtgctgcgccttaggggaggcatgcagatctttgtcaagaccttgactggcaagacaatcacccttgaggtggagtcctcagacaccattgacaatgtcaaggctaagatccaggacaaggagggcatccctcctgaccagcagcggcttatcttcgccggcaagcagcttgaggacggacgcacacttgctgactacaacatccagaaggagtcaaccctccacttggtgctgcgccttaggggaggcatgcagatctttgtcaagaccttgactggcaagacaatcacccttgaggtggagtcctcagacaccattgacaatgtcaaggcaaagatccaggacaaggaaggcatcccaccggaccagcaacgtctcatctttgccggcaagcagttggaggatgggaggacccttgctgactacaacatccagaaggagagcaccctccacttggtgctgcgtcttaggggtggcatgcagatctttgtgaaaacccttactggcaagaccatcactcttgaggtggagtcttcagataccattgacaatgtcaaggccaagatccaggacaaggagggcatcccgccggaccagcagcgtcttatctttgccggcaagcagctggaggatggacgcacccttgcggattacaacattcagaaggagagcaccctccacctggtgctgcgcctcaggggaggaatgcagatcttcgtgaagacattgacaggcaagaccatcaccttggaggttgagagctccgacaccattgataatgtgaaggccaaaatccaggacaaggagggtatccccccggaccagcagcggctgatcttcgccggcaagcagctggaggatggtcgcaccttggctgactacaacatccagaaggagagcaccctccatctggtgctccgcctgaggggtggtatgcagatctttgtgaagaccttgactggcaagaccataaccctggaggttgagagctctgacaccatcgacaacgtgaaggctaagatccaggacaaggaggggattcccccagaccagcagcgtctgatcttcgccggcaagcagctggaggatggtcgcacccttgcagactacaatatccagaaggagagcaccctccacctggtgctccgtcttcgcggtggttattaagccatcagtcgttgaagctgctgctgtatctgggttatccagtgtctctgccattgcccatggatggtactgtctttcaaagtatttgtatggtttgtgtcgtgagtcgtgactgagctggtttcatggaccagttgtgttctcgttacccaaaactatcgtgcggcagcatatggcttaatcatgaataaatgtggtgtttgaattt

SEQ ID NO: 12884 - DNA, 381 bp, Zea mays
  Clone ID: CC-ZMLE189109C09_FLI
ggaactgtgaacagaggaagcgaggtcattgctgcaggcatgacagtgaacgactggactgccttttgtggctcggacacgacagccaccgagctctcagtcatcgaaagcgtcttcaagctgagagaagggcagcccactgcgattgtggaggacatgaggaagtctctgatagacagttacgtgtaactggggggccagcagatgtgggtcagagtttgcctttgctaaaagatgtattgcaagctatagtcgaattatcagtagcacaacataaccctctgatatgttcgtggtttatccgtggtttctgaattgtagacttctgcgttgaagctcgtgctactgtttgttttccattgtttgttcacaccaacagct

SEQ ID NO: 12885 - DNA, 484 bp, Zea mays
  Clone ID: CC-ZMPO148016G05_FLI
gcgtgccggccgcctccgctcatcgtcgtgcaccatgccaactccgagaagacgatcttgcaaggaaagcgcatgcaagaacgtcgtcacatatatagaggagtagcagccagcaggaggtggaatcgacggcttgatcccgagaccgagcgagaccagctgcaaaagctcctagcgcattggccgccggagtgggctgcagtgcaagtgtggatcgcatgcgaggaggatgcgagtgctggaggaggacctgtacccgtcgacgccggggaaggtgaaggtggagcgggcgggggcgatgagccgatacctgcaccgttgcttcgcgtccacggggaccatgttcctgtgggcgctcttcctggtggccatgacggccacgtacctgagcgtccactccatcgtggacacctcctcccgctacttcgcggcgtcgtggggcgggctgcactgggagcggcagatccgggcgtcggcgtcgccg

SEQ ID NO: 12886 - DNA, 981 bp, Zea mays
  Clone ID: CC-ZMPO148024B07_FLI
tgcgttgattcctcgggtcgaaccaacgcgcggcgcggggtcccggtcgcggccatggcgcagctgccgcccaagatccccaccgtggcgccggcgtggccggagttcgggggcgggcaccagcagcagcgcagcccctccgtgggcacgttcctcgccgccgcgcccatgcagccgtcgtgggtggacgagttcctcgacttctccgccgccaagcgcggcgcgcaccgccgctccgtcagcgactccgtggccttcctcgagcccgtccgaccacaacagcatcaacgacgagaagacggataggggcgacgccgaggaggcacagagcaagtgccacggcgccgccgcggccaccgcggtggatcctaagcgcgtcaagaggatcctggcgaaccggcagtccgcgcagcggtcgcgcgtgcgcaagctgcagtacatctcggagctggagcgcagcgtcacgtcgctccagacggaggtgtcggcgctgtccccgcgcgtggcgttcctcgaccaccagcgctcgctgctgacgctggggaacagccacctgaggcagcggatcgcggcgctcgcgcaggacaagatcttcaaagatgctcatcaggaggcactgaggaaggagatcgagaggctgaggcaaatctaccagcagcagagcctgaagagcggcagggagcccgacgcggccccgtcggtccgcgacgacaaggacatgatcggcagcgaggggaccgccgcgcccggcccgccctcgtgatgaggaggaggtggtggggcgacacgtccagacatccgagtcggtcgctgtagtcggggatggccctgtcgcccgccctgcagcccatcacagcgaggttgccgctgccgctgctaggattggtgtgtgtgtgccgtgtgcgtgtccgtgtgtgcattctttgggggtgtgtaacgtgatgtgatgtaaagagaagaggaactgcatcggttcggttt

SEQ ID NO: 12887 - DNA, 1107 bp, Zea mays
  Clone ID: CC-ZMPO148032B07_FLI
ctacctcccctctccatctctgcgtgatggacgcccgcctcgtcttcctcctcctcctcgccgccgcggcgtccgcgccgctggcctccgcgcagctctcggcggatttctacaagacgtcgtgccccgacgccgagaagatcatcttcgacgtcgtccagaagcggttcaaagctgaccccggcaccgccgccggcctcctccgcctcgtcttccacgactgcttcgcaaatggctgcgacgcgtccatcctgatcgacccgatgtcgaaccaggcctccgagaaggaggccggccccaacgtctccgtgaagggctacgacgtgatcgaggagatcaagacggagctggagaagaagtgcccgaacgtggtgtcgtgcgcggacatcatctcggtgagcgcccgcgactcggtgaagctgacgggcgggcccgagtacgcggtgcccctggggcggcgcgactcgctcgtgtccaaccgcgaggacgccgacaacctgccgggcccggacatcgcggtgcccaagctcatcgacgagttcgacaagcagggcttcaacgtcgaggagatggtcgcgatgctgggcggcggccacagcatcggcgtctgcaggtgcttcttcatcgagaccgacgcggcgcccatcgaccccaagtacaagaagacgatcagcgacgcgtgcgacggcaaggactcgggctccgtccccatggactccacctcgcccaacgacctggacgggagctacttcggcctggtgctggagaagaagatgccgctcaccatcgaccgcctgatggggatggacaagaagacggagcccatagtgaaggccatgtcggacaagaccaccgacttcgtcccgatcttcgccaaggccatggagaagctcagcgtgctcaaggtgctcacggggaaggaaggcgagatcaggaagacgtgctccgagttcaacaacccgcagaacagcagcggcagcacgtcggtgatacggatcagctccatcgaccccgaccagatggccgggctgtcgcagccagggtcgtcgtccaggaaggtgggccctcctcccgtcgaggaggaaacacccgccatggtggcgaccg

SEQ ID NO: 12888 - DNA, 1277 bp, Zea mays
  Clone ID: CC-ZMPO148032D08_FLI
cgaatcgcgcgcagcgcgcccgcgcagcgattgccggcgatggcgagcctcaccctgccgccggcgccccccaacccacggcaggacgccatcgacctccaaaaggccttcaaagggtttggctgtgacagtacaacagtgataaacatacttactcatcgcgattcagtgcagcgtggactcattcaacaggaatacagggctatgtatcatgaggaactctcccatcgcatttcatctgaactcaatggaaaccacaagaaagctatgttgctgtggattcttgatcctgctggacgtgatgcaactgttttgagagaagctctaagtgttgacactatggatctgagagcagccactgatattatatgttccaggacgccatcacagttgcaaataatgaaacagacttattatgctagatttggtacttatcttgagcatgacattggtcaccacacatctggcgatcaccagaagcttttacttgcctatgtggggattccacgctacgaaggtcctgaggttgatcctaccattgtgacacatgatgcaaaggatttgtacaaagctggtgagaaaaggctgggtacggatgagaagacctttatccgcgttttcactgaacgcagttgggcacacttggcatctgtttcgtctgcctaccatcatatgtatgaccggaaattagagaaggttatcaagagcgaaacatctggaaactttgaattcgcacttttagctatcctcagatgcgcggaaaacccagcaaagtattttgcaaagctcttacgaaaggccatgaaaggtctaggcactgatgacaagacacttataagggttgtggtgacgaggactgaaattgatatgcaatatatcaaggcagagtacttcaagaagtataagaagccattagctgaggctatccactccgaaacatcaggaaactatcggacattccttctttcacttgttggtcctggacattaggttatgtttcgaccatgggacatgatattccatccatccaccctaaatgcagcgacctacctggaaaacttatgatgttgccatttgtcagtggtgactcgtggattcgtctaacttccacatatgcggtatctagtatgcttgactaaagtattcgtgtttaaatttgtatctgggtttcttgttggaaaattctgtgcgggggcacaacagctgttgttggtcacgctaggcttgacttgtgtctccatgacatcaataatattatgtcatgttcgtgtgtggtc

SEQ ID NO: 12889 - DNA, 463 bp, Zea mays
  Clone ID: CC-ZMPO148032H11_FLI
caggaaagcaagcaagaatcatcggaataatggcccgtgcatgcgtgttcctcgtcgtgctcctcctggccgccatcgcggtggcaccgttcgcgggcgccgcacgcgtggacgttgtggagggtaggtccatggcatccgccgatgcaccggaggcggcggccgatgctcccgctcctagccccgactccgcctcatccccagactcgtcatcggaggcgccctctagcagcagttcctccgactagacgcaaaaacctcttcattctctggaataactaacagtatatacgttgcaccctgatgatatagaaacatgtacgtgcatcagtgtatggaatgcgagtggcaaacacatggaatgtgcttgcctaattattgtttatttctttatttattatatgtctctctcgtttgttttttatttttcttaatgcaagtaatataatttgttatacccaat

SEQ ID NO: 12890 - DNA, 1062 bp, Zea mays
  Clone ID: CC-ZMPO148038C03_FLI
gttcgaataacacagttgagcgcgacgatgggatccctcgctaataacatcatggtcgtgggtgtcgtccttgcagcgctcgtcgccggcgggtcatgcgggcccccgaaggtgccgcccggtcccaacatcaccaccaactacaacggcaagtggctcaccgccagggccacctggtacggtcagcccaacggtgccggcgctcctgacaacggcggtgcgtgcgggatcaagaacgtgaacctgccaccctacagcggcatgacggcgtgcggcaacgtccccatcttcaaggacggcaagggctgcggctcatgctacgaggtgagatgcaaggaaaaacctgagtgctcgggcaatccagtcacggtgtacatcactgacatgaactacgagcctatcgctccctaccacttcgacttgagcggcaaggccttcggctccctggcaaagcccgggctcaacgacaagattcgccactgcggcatcatggacgtcgagttcagaagggtgcgatgcaagtaccccgccgggcagaagatcgtgttccacatcgagaagggctgcaaccccaactacctggccgtgctggtgaagtatgtggcggacgacggcgacatcgtgctgatggaaatccaggacaagttgtcggctgagtggaagcccatgaagctctcttggggcgccatctggaggatggacactgccaaggcgctcaagggccccttctccatccgcctcaccagcgagtccggcaagaaggtcatcgccaaagacgtcatcccgccgaactggagacccgatgccgtctacacttccaacgtccaattctactagactttgaattcccttcgattcatccggcgcggtgggctatggacctgcagcagcaagctaattaagtttatatatattgcatgagagagcatgcaccgctaaccatatatactactgagacttctgaattctagtatatgtaatccttttgtttgggtttaggaggcaattctaatcatgtatgccgaattccaaagagtggaaaacaagcaaaatgttaaatat

SEQ ID NO: 12891 - DNA, 795 bp, Zea mays
  Clone ID: CC-ZMPO148038E03_FLI
ctgaaaacagccgagcgatctcctctccctctccctctccgatccattctccagcgcagcgaagtaaacatgtctgaccgggcaaagatgtcgtggcaggcgtacgtggacgagcacctgatgtgcgagatcgagggccaccacctcgcggcggcggccatcgtcggccacgacggtgccgcctgggcgcagagcacggcgttccccgagttcaagaccgaggacatggccaacatcatgaaggacttcgacgagccagggcacctcgcgccgacaggcctgttcctcggacctaccaagtacatggtcatccaaggcgagcctggtgccgtcatccgtggcaagaagggatcaggaggcatcaccgtgaagaagacagggcaggcactcgtggttggcatctacgacgagccgatgacgcctgggcagtgcaacatggtggtggaaaggctgggcgactacctgcttgaacagggcatgtaactactacgtaccagctggaatgcatgtcgacgacgatggtttcgagtttcgacttccaataatagtaacaacaaagcaaaggccttcctcccggcgtatttgctttggctcttctcctccacgccataagatatctagcaattggtgactcgccttaattagttcgctttgcttttgaggttgactcgaccattttgctgtagcgtgaattgcatggacatgcaacgctccaatggcctttggaatgtggaatttttttttcccgtttctgtatttttcctataaaatgaagtaatgaactggttcttatat

SEQ ID NO: 12892 - DNA, 1724 bp, Zea mays
  Clone ID: CC-ZMPO148038H03_FLI
cttagaacacgaaacgtgaaggagacagaggaggaggaggaggatcaatctgccccgttcttggctgcgaggcgatctttgtgccacccaccagagcgcgaggggcttcattcacctgatcctcgcttcttcttcttccgtcccactggttcgcgttgattgcatttggaggagggggcagtcaagatgaggcttcggctcctggcctgctgctacaatgatccggagatgcggatcgatccggacaccgtctaccccatccgccccgactgccgcgacgacgcccccaagacgcgcttcaagccccggcctggcctgacccttagtccaaagagatggaagcttctccacaacgaggaaggctgcgtggacatagctggaatgatcaagagagtgcaacgtgggggagtccacccaacaatcaaaggagaagtttgggaatttttgctgggctgctatgaccctaaaagcactaccgaacagtgcaaccaattgcgacagcagcgaaggttagagtacgagcaactgaaagctaagtgccgagaaatggacacagctgttggtagtggaagggtaatcactatgcctgtagtaacagaagatggtcaacctatcgaaaaccctaacggaggggcatcaggttctgagcagaaaaatagtggggcaccactcccgaaagaagttattgattggaagcttaccctacaccagattggtctcgatgttaaccgtactgatcgtttgcttgtttattatgagagacaagagaacttggcaaggttgtgggacattcttgcagtgtattcatggattgataaagacatagggtattgtcagggaatgagtgatctttgttcaccaatatcaatcattctggaaaatgaagcagatgctttttggtgctttgagcgtctaatgcgcagggtgcgaggaaatttcaaaagtacttctacttccattggagttcgagctcaactaactaccttgtctaccataatgaaatctgttgacccaaagctgcatgaacatttagaaaatcttgatggaggggaatacttatttgccttccgaatgctgatggttcttttccgtagggaattctcatttgttgatacgatgtacctttgggaactcatgtagtctatggagtacaatcctaatctcttttcaatgttggagagtgacactggcacatccagcgcaagcacaaaggatgaaagtgttctaggacagtgtggaaagtttgagcggaaaaaattgcaagcagctaagaaagatgaccagatccctctatctgtctttgttgttgctagtgttcttgaggctagaaacaagaagttattgggtgaggcaaaaggtctagacgatgttgtcaagattttaaatgaaatcactggtagtctggatgcaaaaaaggcatgcagagaagcattgcagattcacgagaaatatcttaaaacggtaaaagcatcataaggacatgtacagcttcacttggatgggctatttatttattttttggactagagaagatataccacagaacttttgttatcctttgtttgtgtattgtgtaattctgacacatttgtaacattgcatttacacaaccaaaagaaaggacgaggatttcattcaaaaataaaaaaaaaagaaggggaaaaaggatgctgatcttgtaaagacgcgagacaaaatgtttataccataataacgtcatcatg

SEQ ID NO: 12893 - DNA, 746 bp, Zea mays
  Clone ID: CC-ZMPO148042B06_FLI
gcaaagagaagtagccacaagcatgtctggcatcatcgacaagatccaggagacgctccacatcgggggcgaccacaaggaggagcacgagcacaagaagggcgaggagcaccacaagaagggcgaggagcaccacaagaaggacgacggggagcacaaggagggcatcgtggagaagatcaaggacaagatcaccggcgagcacggcgacaagtccggcgaccacaaggacaaagaccataaggagaagaaagataagaagaagaagaaagagaagaagcacggggaaggccatgaccatggtgatggtgacggccacagcagcagcagcagcgacagcgactgatctcgcctcgccgagcgccgtacgcacaaatgcaccgcgcaggttataatacgagctgtccgccgaacaccatgcgcatatattatacagtactcgccaagattgttgttctgcaatcttcgggataaaaaggttctttttttgttttcgtttgcctgtggttttcatctttgctggatggatctgaagaacgaagtcgatgttggattcacatgtatgcattgcttggaggatactcaccggatatcggtgctgatgtgatgatgaaaaaacagtctcagagatagctagcatgtatgcgctgtttgccatgtaataattaatggtaatgcagaaatcgatctgcttgattgtgttgtgccttatgcatccatcaaagagtattgttcgtgcgtataac

SEQ ID NO: 12894 - DNA, 669 bp, Zea mays
  Clone ID: CC-ZMPO148042H08_FLI
ctccctcactgccccctcgcagacgagacgcgtggtagctagggttttggcctcgccgcgcacgcctcctgaagcttctagacgttcgaggaggaggaggggaggctcccgccgccgccgccgcagccatggcgtccaccaaggtgcagcgtatcatgacccagcccatcaacctcatcttccgtttcctccagagcaaagcgcgcatccagatctggctcttcgagcagaaggacctccggattgagggtcgcatcatcggattcgatgagtacatgaacttggtcctcgaagatgctgaggaaatcaacgtcaagaaaaacactaggaagacactgggccggatactcctcaaaggtgacaacataactttgatgatgaacagtggcaagtgaaagttcttatggcaggaacgatgtttggtgctcgcgttgagtatttctggcacgttgtactccatccattcagacttacatgtacctgctgttaatgacctgagtaaaattatgctagatgctggccacttgtgtgtgccatattggcatcttttctgtttccatgttcagcttgacctgaagttttgctctgccctctactctccgcgctaacttggcgggatcaaatcaacatgagatgtgctgaattatcaatgccgcttggttcaaggcg

SEQ ID NO: 12895 - DNA, 2217 bp, Zea mays
  Clone ID: CC-ZMPO148043A07_FLI
cgacgggcaacgaccggggcgtgaggcgatgtcgtggctccgcagcgcggtgcaccgcgccgtggaggcgagcgggggtcacagctccctccttacccgcaccgtccgcacctcccttgacaccgtcgtccaccatgccggccaggctgtcgcgggcggcgccaggctcatcaccgggagccggagttacaagagcgcgaaggtggcagcgaagaggctggaagaggaggcgctctcctgcaaaggggacgaacgggtgcagctgctgcgccggtggctcgtcgcgctcaaggagacccagcgcgcgaccacggcggtccgggagccgcaatttggggacaatccggaccagactgcgcccctgctggatttgtacatcgattacgacagcggtgcggagccgatgaactttttccatgtcttcctctacagtcaagccctcgagtgtgttgttctctccttgattagggaagccccaactgaggaagaagttccactggtctcagaagtttttggaatgtgcctttcgggagggaaggatgtgcacaatgcactcttaagtagtgtaaaggacctggcaaggttattctcaagttatagtgacgaagtgttggcaaaacgtgacgagctgcttcagtttgctcagggtgcgatctcagggctaaagataaatgctgacattgcaagattagataatgaaattactcagttgcaacagcagataaattcaatggatgcgctccatgctacatcaatcgtcaatcagaataaaaaagctcaaacagccactgagggtttcagaaaggcagtttctgaagttcggctttgctctagaatggaagaacttctattgaagaagaaatcaatacaccccggtgattcattggagactcattttgagaaggtagataaactgaaggttttgtctgaatcccttgcaaattcatctgcaaaagcagaaaagcgtatcatggaaaataggctacaaaaggaagaatctcttatcttccgggtcaccaaaacaaatgaagttagtggtatagaaaaggaattagttgctgagatctctggacttgaggagcaaaggaatcaactcgaggcagaactgaaaaaggtgaatactaaattgaaagttgctacagtgaagcttaaaaaaactagagaggaacgggaccaatttgatgaagcaagcaatcagattgtgttgcacctaaaaacaaaggaagacgaactttcaagatccatagcttcatgcaaagtagaagcaagtactgtcagtgcatggatcaactttttgaaagatacgtggaaattgcagtccttgtttgaagagctaagagaaaaacaggccaacgaagaattggatagatgtggactctgctttgcgaaattgatgaagtatcatgtttctgcatccatggaagagctaagcacttctattgaccgtatcaaaacctttgttgataacttgaaaatatttggtaacagatccgtgtcagcagaggatggagctaatggtccgtctaagcaatcaaaccctcgtagatatcttgaggaagaatatctccaaactgagaaaaaggtcgtagctgcattcagtttggttgatagtatcagagcaatatattcttcaaaccaggattactataaaacgagtttgtgcagaagggatgacactgaggtaaaaaatctgtttacctccattgacaatctgcggatcgagttcgaatccgtgccacgtccagtgcttcaaattgagattaaagaacaggcagagaaaaagaaacgatccccttccttgaaggtgtccgcgtcacctagccattcgagaagcgactctcctatcgcggctcagctcaggacacgactgccatcagagtccgaatcggagctggccaagttcgaccaggaatacaaggccgacgagatcagtgggtgggagttcgatgacctcgaagacgagccaacacctggcttcctatgatcagggtgttaatgggatttatcacagacatccagtagtcttcaatgagagccattggcacaaaatcattgggaaatgtagtatagcagagcgcagagccgtgtactccgtacgtgactttgtttctttttctgtcacgtcctgttcgctgtagatttttgctggcattgacctgtatatatgacaagtgcaagcgaacgccgtacgtatatatgcatacatttgtcttgggt

SEQ ID NO: 12896 - DNA, 846 bp, Zea mays
  Clone ID: CC-ZMPO148043A09_FLI
tctcccctcccttccctcttctggtctccgccccgctccttgcctccgatccccaattcctccttcggatctcgcattcagcgcagcgcaggtgtgaaggaagggggacgcggaggaagatggggctcgcgttcgggaagctcttcagccggctcttcgccaagaaggagatgcggatcctcatggtcggcctcgacgccgccggtaaaaccaccatcctctacaagctcaagctcggcgagatcgtcaccaccatccccaccatcggtttcaatgttgaaactgttgagtacaagaacattagcttcactgtctgggatgtcgggggtcaggacaagatcagacctctttggaggcattacttccagaacacccagggtcttatctttgttgtggacagcaatgaccgtgaccgtgttgttgaagccagagatgagctccacaggatgctgaacgaggatgagctacgtgatgctgtgctgcttgtttttgccaacaagcaagatcttcccaatgccatgaatgctgctgagattactgacaagcttggattacactccctgcgccagcgacactggtacatccagagcacttgtgccacaactggcgagggtctgtatgaaggcctggactggctgtccagcaacattgcgagcaaggcttgaggcctaccttgaatgtcaaccgcgaactgactaggagctccggatgtatcatggaaactcaggacagaatcgcagttgcaacctgttagatgtcttctaccggcactatatatattttttgtttgatgtgtaatgatgttactgttcaacgtttattaccctactatactgttggatgttc

SEQ ID NO: 12897 - DNA, 1024 bp, Zea mays
  Clone ID: CC-ZMPO148043C03_FLI
cgcgatgagcaacatcctgccggccatgaccttcgtcctggcagtgatcttcaggatggagaagctgcagatggagaaggtgaggtgccaggccaaggtcctcgggacggtggtgaccgtggccggcgcgatgctgatgacgctctacaagggcccgctgatgcagctggcgcggacgaccagcaggcacgcgtcggcgtcggcgtcggcgtcgcccgccgcggagatcaccatcagcggcagggactggttcctcggctcggtgttcgtcgtcgtcgccacgctcgcctgggcctccctcttcgtcctgcaggcgcacaccatcaagcagtactcggcgcagctgtcgctcaccacgctcgtctgcttcgtcggcacgctgcaggccgtcgtggtcaccttcgtcatggagcgccgcacctccgtctggaccatcgggttcgacatgaacctgctcgccgccgcctacgccggcatcgtgacgtcgagcatcgcgtactacgtgcagggcctggtgatccagaaggccgggccggtgttcgcctcggcgttcagcccgctcatgatgatcatcgtcgccgccatgggctcgctcatcctctccgagaagatctacctcgggggcgtcctcggcgccgcgctcatcgtggcaggcctctactccgtcctctggggcaagcacagggagacgcaggagaaggaggaggccgccgacaccaagatggcgctgccgacggcggcagcatcctccatgcaagacgctgccgctggtgtcgctgtagatggtgcggggtgcaacgtcgggaatggcctgacgaggtcatcctccaatgccgccgccggcgccgctgctaatgcagtttgattggcctcatcaggctcccaataatttgcctccggtgaatggcgcgcggcgtcatgtcatccgtgatcgaatgctgaattgttcgtctggctacgacgagcacactgtacttattagggaaatggtgcagtggtactcctactagtggagagatagtgc

SEQ ID NO: 12898 - DNA, 721 bp, Zea mays
  Clone ID: CC-ZMPO148044E03_FLI
cttaattgcgccactgctcgttatcctcctcttgcattgcattgcaggtcgtagttgagcagcagcaaccactgcacaggatgtcgtggcagacgtacgtcgatgagcacctcatgtgcgagatcgagggccaccacctgagctctgccgccatagtcggccacgacggcgccgtttgggcccagagcaccgcattcccacagttcaagccagaggagatgaccaacatcattaaggacttcgacgagcctgggtttctggccccgatcggcctcttccttggccccaccaagtacatggtcatccaaggcgagcccggcgctgtcatccgcgggaagaagggatctggaggcataactgtgaagaagaccggacaggcgctggtgatcggcatctacgacgagcccatgacccctggacagtgcaacatggtggttgagaggctcggtgactacctcgtagagcaaggcctgtgaatgcatccaaacaacgacaccaacgccaacattaattaattagtagtctccatgccctgggattgtgcgtggccgctccgttgaacaccacccatccttcgttcggcattttttccccccttgtttatataattttattgtatcgttttggcaaataattttgtgattcgaccccaaagcaagtttggttgtcttacgatttgtaaacctggaacaatatataatgtgattgaactgctttgtct

SEQ ID NO: 12899 - DNA, 796 bp, Zea mays
  Clone ID: CC-ZMPO148044G08_FLI
ctaccctcgtcgtcgtctcactcaccccgccttcacgcctccctcaccaaataaggtcccgcccttttccgacattcacaggggggacaggaaatcagcggccatggcctcgattccggcgacgaccttcgccgtcatcttatccgtcctcttctgtgccgcggctggcaccgccgtcgacaacgacctccccgactacgtcatccagggccgcgtctattgcgacacctgccgcgccgggttcgtgaccaatgtcaccgagtacatcgcgggcgccaaggtgaggctggagtgcaagcacttcggcaccggcaagctcgagcgctccatcgacggggtgaccgacgggaacggcacgtacacgatcgagctcaaggacagccacgaggaggacatctgcgaggtggtcttggtggagagcccgcgcaaggactgcgaccaggtgcaggcggacagggaccgcgccggcgtcctgctcaccaggaacgtcggcatcagcgacaacctgcgccccgccaacccgctcggctacctcaaggacgtgccgctgcccatctgcgcctcgctgctcaaacagttggactcggacgacgacgacgatcagtaatagcacatcgacgacgacgatcgatatgtaatagcacgtcgtcgacgaccgaccgcagtcgtcgcagactggctggcactaaaccacaaatcctcttcacctggattacaaatatgtaactgagaaaggaaaggaaaacaaaaatgtaactgcgtggctgtaccaaattctgagtgctggattcttgct

SEQ ID NO: 12900 - DNA, 1332 bp, Zea mays
  Clone ID: CC-ZMPO148045B04_FLI
gctggggagcggcggagagctatccacctcgtctcaggcaccctctggcgtccccctccccccgccgcgtgccggcgagccgcggagatccggggttctgacctcgcctccttctgctgagttgatgctaaacatgcttatttaactaaactagaaatttgttaccgagacttgtgaacgaggcagcatcatagttcagtttggaaacatgtcatcgaagaagatagagttggatcacaaggacatggtccatgattctgccatcgactactatggcaagcgccttgccactgcctcttcagacttcaccgtgaagatcgtcaacattggtgctgcaaatgccccatcccaggtccttgcaacgctaagtggccactatggtcctgtgtggcgtgttgcttgggcccatccaaagtatggtgcaatccttgcatcgtgcagttatgatggccgtgtcattatttggaaggaggatgcacgaggcaattggtctcaagtccacgtcttcagtgacaacaagtcatctgtcaactccattgcttgggctccgtatgaggttggcctctgccttgcctgtgcatcttctggtggaagaatatccatcttgacgatgcaagctgacgggggttgggatactgcaaccattgagcgagcacatcctgtcggtgcgactgccatatcctgggcccctgcaacagcgtcactagctggtgcaggggagcttgtttacaagcttgtctcaggagggtttgactctgttgttaaggtctggggattcaacaatggtagttggaagctggagagtgctcttatctctgacatgcacacagattgtgtgagggatgtcgcctgggcaccagttttgggattgtccaagtcgaccattgccagtggttcacaagacgggaaggttgtcatctggaccaagggaaaggatggagacaagtgggagggaaagctcatgcgtgacttcggttcccctgtctggagggtgtcgtggtccttgactggcaacatattatgcatagctgctggcgagaacaacataaccctctggaaggaagggtcagatgggcagtgggaggaggcgatgaaggttgaaccataggatgaccggcaaggtttctgaatttcttgtagatccatgtttcgacaaggacaaagcttgctactgttttactagtgtttcgacaaagtttaagtttgccattgtgttttactagtgtttcctgcggatccatgtttcgataaagacaaagcttgacattgtgtttccatagacactcaaattcacatattttagtaattcctgatgagcaattatgatcttgg

SEQ ID NO: 12901 - DNA, 488 bp, Zea mays
  Clone ID: CC-ZMPO148045B10_FLI
gcggaggaggaggaggagccgccggcgcccaagaaaggcaagatggcggcggcggcgcgcgaggacccttcttcctcttcctggctcgcgctcggcagcatgtgctccatgcacggccgctgatgagggagccagcggtggttattagtagtgcagacaagagctcgggcgcccgcccggccatgggatgggatgggaggcgttgcagcagcaatttatgtgctacctacgtactagtatttattataattgttattactaacaacaacgactggtagtatcgatcagagaccgacgctattcgatcgttggttcgtttcattgtcctttccttccttgctagctggtggtgtatcgaccatctaaatctaacaggacacgtggacctggacggcaagagatgtccagtccagcagtgtggaacgtttgttgctttgtctatcattaattgctataagtttgtttcatatatacatatatactactgt

SEQ ID NO: 12902 - DNA, 486 bp, Zea mays
  Clone ID: CC-ZMPO148045D08_FLI
caaaaacaatgctatcaacaatcaagcattgcaaaaggtaaagacaaacaaataattagtcgcagcaactcatccggtgcttaaatggagaaatatgatgacgaacaagagcagtgtgtgttcccggtcctttccaatcaggatctggtgaagtttttgcctttcatatcgaagaaattaataattcatgtagagggaggattcttccaacaatttgttttggatggagacttagatctccaaacactcgtaactatcctactaggtggtgacatcggtccccaaaaacatttatggtcatagagtctgcccttcgtttgtcagtcgggcaatttttcttgcatacaatgccttcgtttaagtatcggatgagttgctgcgactaattatttgtttgtctttaccttttgcaatgcttgattgttgatagcattgtttttgtcactggatttcttgttaatgttgcatttggtttacgcgtttgtc

SEQ ID NO: 12903 - DNA, 1447 bp, Zea mays
  Clone ID: CC-ZMPO148046B12_FLI
cctgcctgcctgcggacatgggctccagcctcaagtaccgatctggcctgtgcctcatcgtcgccgtcgtgctgatctgggtcatctctgccgaggtcacgcaggggatattcacaaagtacagacatccatttgcagttacttacttgggggcctcccttatggtcatatacctccctttgtcatttctaaaagattttatatacaattcgttgagaaggcattctagaaacactagtgcttccaaaattgcaagcaaatcttcctttggtggtagtgcccctttgaagaatggtgaatttcagaagatgttggaaatggaatcacagaaaactatagtggtaaattgccctgatgtgagcatccctgtagtggaagagacaaaaccactcatatgcggaatcactgaaatggatgatggccttttcaaggacaagcaactttccactaaggagattgcaacgtatggattgtatctttgccccttatggtttgtgacagagtatttatcgaatgcagcgcttgcaagaactagtgttgccagtaccacagtgctgtcttcaacttcaggactcttcactcttttcattggtgttttacttggccaagactccataaatgctgcgaaaattattgctgttttcattagcatggctggcgttgtaatgacaactgtgggccagacttgggcatctgatgaatcagaagcaggcaaatctggttttacacagaggactcttctaggtgatatgtttggtcttatgtcagcaatcgcctatggtctatttactgtgctgcttaaaaaattttgtggagaggaaggagaaaaggttgatgtccaaaaactgtttggttatcttgggctttttacccttgttgctctatggtggattgtctggccattaaccgcactaggcgttgagccaaagttttcaatgccccactcagctaaagtggatgaagtggtggtggcaaatagcctaatcggaagtgtattatcagactacttctgggctctttctgttgtttggactactcccttggtggccactctaggcatgtctctcacaattccaatagcaatggttgctgatatgatcattcacggccgtcactattcagcagtatatattcttggttctgtccaggtattttcaggctttgttatcgcgaaccttgcagatcgcttttctcgttctctagggctatcatagtctcataaaacagaacaggcccttattagagcgtgcatcaggaagctccaaggtcgggttggttaggccaatacttcagaaaacctggatcgggagataccaggaattattttccctttgcttctttaaacatagtggaggtgaattttgccgtggtgaatagtgaaaggcagcagatgaagaagaaaacatatgttatagcaaccctttgcaactgtaaattctcttactac

SEQ ID NO: 12904 - DNA, 973 bp, Zea mays
  Clone ID: CC-ZMPO148046E06_FLI
gtgggcgagtgcgtgcgttcgtgcagccacagacaggcgtccgggcaccatgtctttcaccggcacgcaggacaagtgcacggcgtgcgacaagaccgtccacttcatcgacctcctcacggccgacggcgccatctaccataagacatgcttcaagtgcagccactgcaaaggggtcctctcgatgtgcagctactcctccatggacggtgtgctgtactgcaagacccacttcgagcagctcttcaaggagaccgggagcttctccaagaacttcacgccaggtggcaagtcatcagacaagggtgaactgacaagggccccaagcaagctgtcgtctgcattttctggtacccaggataagtgcgcagcatgccagaaaacagtgtacccgctggagaagttaactctggaaggcgagtcctaccacaagagctgcttcaagtgctcgcacggcggctgcatcctgaccacctcctcttatgccgcgctcaacggcgtcttgtactgcaagatccacttcgcgcagctgttcatggagaaggggagctacaaccacatgaacaagaagagcccgtcccaggaggttctgccggacgtggctgacgaggagcaaccgccggaaccagcgccaccgcaagatgagaaagaagaggacaactaggatcggagcgaccaacaaccacccatgcatatatatcacgcagactgaagtctacacgtttgccatatttctttacgacgacgacgcttctttattccctcctcccttttttttcctcttaatctctctgtgaacccggtttatcatcacgctgcaatcaagtgtgccagatgccttcgttacgtctgaggctcacgacaatggaaaatctgacatggacctgtcttagcctcgcggaaaaaaattgtaactttgtaagcagagccacttctttgaatatatgatcctaacaacgctgcccttaatact

SEQ ID NO: 12905 - DNA, 633 bp, Zea mays
  Clone ID: CC-ZMPO148047E05_FLI
ccgggccccggggaaaattttgcccccagaaaccctagcgcgtcggatcagcaagggcaaaattttctgcgactccggctgaaggacgctgcggcacctatgtcggacgacactggccgcactatacccaagttcggcgaatgggacgtgaacaacccggcctctgccgacgggttcacggtgatcttcagcaaggccagggatgagaagaaagccccggcccaaggccacatcagggacaggtcggcgtcggccgacagcaaggactccaggtccagggacgagaagatgacctcctacagctccaggaccaacgcatcgaagaaatggttctgctgtgtctcgcccagtcccacacagtcttgaggaagctaatgagccgtgcagtgctgcagtttctgtgatggttatgcgtagctcttcgaattcaatcctatactgcttgccagtgacaggggctctatgtatagccattgcaaatgagaaaattactctgatgggtgtctgcttatagcgttcttagctgtgtataccatcagttcaagctgatgtctgcttgtaattttcttttctggccccttctctatggtgtaacccttcctcaacgttatcagtgaatctgagctactcctc

SEQ ID NO: 12906 - DNA, 599 bp, Zea mays
  Clone ID: CC-ZMPO148048H06_FLI
cgcggttccctcgggcgtgcaagcggtggagatatcgggggcgggcggcggtggtgccccgaggtgggtgacccacgccgacgctcccgaggcagcgggcaggcagcggtggttctcccctaagactgagtgatggcgacgctccagaggcgggcgggcaagcggcgacggcagtcccgagtcgaacgagtggcggcgtcgcaccctaggctcggtggtaacggtgattgtgcgaggcacgataggcttcggcagtgacggtggtggccatgggacacgcgggtagctccgacgggtgcgtgaggcgcggtcgtctccagcggtggtggccacatgaggcgtggttggctccggtgtccttcgatgaccaactccttcgatctgatggcctcggcggcggcgtcctccgatgacctcctccaattctttgtttatgcatgcggctgttggttgagcccatactaatttttcattaattatgatgtacggtgtaggtgtttatgcaactttatgtaacgatttatgttttgcatgatatcagccatctagcttttgtgtatttgctatgggaacgaaaataccattcaaaatttgtgtgc

SEQ ID NO: 12907 - DNA, 1828 bp, Zea mays
  Clone ID: CC-ZMPO148062H04_FLI
cgcgtgtctaggtttcctctctcaccatagcgcccgctctgtcgcccttcgttcacctctccttcctctcgtccctgcctgccagggagaggggaagtcagaggcacggagtggcgcagagcagacgcccgtgaaccattgtagctgtccctgtcgtcgtcgtcgtcaacgaacccacacaaggaaaggatggagaagaagccgaccatcctcatgaacaggtacgagctcgggcgcacgctcgggcagggcaccttcgccaaggtgtaccacggccggaacctcgcgtccggcgagagcgtggccatcaaggtcatcgacaaggagaaggtgatgcgcgtcggcatgatcgaccagatcaagcgcgagatctccgtcatgcgcctcgtccgccaccccaacgtcgtgcagctgcacgaggtgatggccagcaagagcaagatatacttcgccatggagtacgtccggggcggcgagctcttcgcccgcgtcgcccgcggccggctcaaggaggacgccgcgagaaggtacttccaccagctcgtcggcgccgtcgacttctgccacagccgcggcgtctaccaccgcgacctcaagcccgagaacctcctcgtcgacgagcacggcaacctcaaggtctccgacttcggcctcagcgcgctcagggagtgccagaagcaggacggcctgctgcacaccacctgcggcacccccgcgtacgtcgcgccggagatcatcaacaagaagggctacgacggggccaaggccgacatctggtcctgcggcgtcatcctcttcgtgctcctcgccggctacctcccgttccacgacgccaacctggtggagatgtaccgcaagatcagcagagccgacgtcaagtacccgcagtggttctcccctgagctccggcggttgatgcccaagctcctcgaaccgaacccaaacaacaggatcacgatcgagaagctggtcgagcacccctggttcaagaaggggtacaggccggccgtcatgctggcacagccgcacggctccagcagcctcaaggatgtccaggtcgccttcagcaacgccgaccacaaggacagcagcagcaaggtggaacagccggcggacagctccttgaagccggcgagcctgaacgcgttcgacatcatctcccactccagagggttcgacctgtcaagcctgttcgaggtggaccaagagcagaaggccagcaactcgcggttcatgacccagaagccggcgtcggcgatagtgtcaaagctggagcagatcgctgagacagagcgcttcatggtgaaaaaacaggacgggctggtgaagctgcaggggtccaagcaagggaggaaggggcagctcgcgatcgacgccgagatcttcgaggtgacaccggcctttcacgtcgtcgaggtgaagaagtcggcaggcgacacgctggagtatgagatgttctgcagcaagggcctaagaccttcactcagcgacatctgctggagcagccgatctgaggagaacatggctccttcagtggttcagccatcataattgaagccatcctcttagaccgtctccagcactttatccatatggtctccccctcttagtcgattgttatttaagtgcagcctcttcggagatgcaattacaatccatcctctctttctttttccctttctcaaagagctaggaccttgctcgactgagcatcaggctgtagggctctttgtgatcatcttttgccagttttcttcttgtagcagaaattgttgggcatggaactcctgttcctttcaccaatagaagcacaatgatcagcactgtg

SEQ ID NO: 12908 - DNA, 410 bp, Zea mays
  Clone ID: CC-ZMPO148063C12_FLI
cgcgcaacctgtctgtcacattgttcattctgacggcctatgtcgccgcgacggcggcaccgaccgtctgtgcggtcaaatctccggcgagcacaacgaccacaaggaaacacgaagcagccaaagaagagacggatgcgcctgccaaggcaccagctgctgcagccaccgaggggcctgctgcgggagcgcccatgacatggccggatggcgggcctgagttcgtcaagatggtcatcaagaaccccttctttaaaagcgcacctccatctggtagcgaagacggcctacccattgaccccactccagaaggcagcatgaactaaattaaataccaattacgagaccgaccagatatgcatggagcatgcaagaatgttgtcgaacgaatatatgctatgaatggttac

SEQ ID NO: 12909 - DNA, 1268 bp, Zea mays
  Clone ID: CC-ZMPO148063F08_FLI
cgatgcacaagcacgagataccagccaccatgcgcctgtccctcctcctcgtcgtcgtggccgccctctcggcgcgcaccgcggcgcagctgccgctggcgggcggcggcggcggcgccctgaagccggacttctatagccagtcgtgcccgcgcgcggagcggatcattgcggaggtgatgcagacgaagcagatggcgaacccgacgacggccgcgggcctgctccgcgtcttcttccacgactgcttcgtcagcgggtgcgacgcgtcggtgctgatcgcgtccacccagttccagaagtcggagcacgacgcggagatcaaccactccctccccggggacgccttcgacgccgtggtgcgcgccaagctggccctggagctggagtgccccggggtggtgtcctgcgccgacatcctcgcactggcgtcgggcgtgctgattaccatgaccggcgggccccggtacccggttccgctggggcgcagggactcgctgtcgtcgtcgcccacggcgcccgacgtggagctgccgcacgccaacttcaccgtggaccgcctcatccagatgttcggcgccaaggggttcacggtgcaggagctggtggcgctgtccggcgcccacacgctgggcttctcccactgcaaggagttcgccgaccgcctctacaacttccgcaaccagggcgggaagccggagcagttcgaccccagcatgaacccgtcctacgccagggggctgcaggacgtgtgcagggactacctcaaggaccccaccatcgccgcgttcaacgacatcatgacgcccggcaagttcgacaacatgtacttcgtcaacctcgagcgcggcctcggcctgctcagcaccgacgaggagctgtggacggacccacgcaccaagcccctggtgcagctctatgcatccaacgccacagccttcttcgacgacttcggccgcgccatggagaagctcagcttgttcggcgtcaagaccggcgccgacggcgaggtcaggcggcgctgcgacgcctacaacagcggccccgccgtcgccgccaccatacccaagatgtgacgacgctgcgcgtggtacgacgacgggcgcgcacgtgcttgtctgcatgcggatcgatcgacggccgagctgtctggcacgacgacggcgtgttgatcgagggcctcggctcctcctgcgacggtcacgatggtgttaagatttcgtgccgaaatgtgatatgtttcatgctcgatcaagtaatttattcct

SEQ ID NO: 12910 - DNA, 1818 bp, Zea mays
  Clone ID: CC-ZMPO148064F10_FLI
ttaaaggcgcgggggcaacaacaagaatggggggcggtggcggtggcggcaactcgcgggagcttgaccagacgccgacatgggcggtggcgtcggtgtgcggcgtgatcgtgctcatctccatcctgctggagaaggggctccaccacgtgggcgagttcttctcccaccgcaagaagaaggccatggtggaggccctggagaaggtgaaggcggagctcatggtgctgggcttcatctcgctcctcctcgtgttcggccagaactacatcatcaaggtctgcatcagcaaccacgccgccaacaccatgctcccctgcaagctcgaggccgccgccgtcgagggcaaggacggccacggcaaggaggccgccgccgtggtcgctggcaagaagaaggtcgccgtcgccgtccctggaaagaagaagaagaaggccgccgccgccgccgaccatcttggcggtgtggtggactggccgccgccctactacgcgcacaacgccaggatgctggcggaggcgagcatggcgaccaagtgccccgaggggaaagtgccgctcatctccatcaacgccctgcaccagctgcacatcttcatcttcttcctcgccgtcttccacgtctcctacagcgcaatcaccatggcgctcggcagggccaagatacgtgcatggaaagagtgggagaaagaagctgcaggacaagactacgagttctcacatgacccgacgcggttcaggttcacccacgagacttccttcgtgaggcagcatatgaatgtgctgaacaagttcccagcatcattctacatcagcaacttcttccggcagttcttcaggtccgtgaggcaggcagactactgcgcgctgcgccacagctttgtcaacgtccatctggcccctggcagcaagtttgatttccagaagtacatcaagcggtctctggaggatgacttcaaggtgatcgtggggatcagtcctcctctgtgggcttctgctctcatcttcctcttcctcaacgtcaatggatggcacaccatgctctggatctccatcatgccggtggtgatcatcctgtcggtggggacgaagctgcagggcatcatctgccgcatggcgatcgacatcacggagcgccacgccgtcatccagggcatcccgatggtgcaagtcagcgactcctacttctggttcgcacgccccaccttcgtgctcttcctcatccacttcaccctcttccagaatggcttccagatcatctacttcctctggattctgtatgagtacggcatggactcgtgcttcaacgactccgaagagttcgtctttgcacgactctgccttggcgtggttgtccaggtgctgtgcagctacgtgacgctcccgctgtacgcgctcgtctcccaaatgggctccaccatgaagcagtccatcttcgacgagcagacctccaaggcgctcaagaactggcgcgccggcgccaagaagaaggctcccaccggcggctccaagcacggcggtggtggctcccccaccgccggcggcagccccaccaaggccgacggcgacgcgtagagaggaacacgctaactttaatttctgtgtgcttaattgcctaggctcgttaagtcagaacatgcatgcatgtaacaccactgctggttttcatatagtgtcgacagatggtcaacgtactttttgcgatcccacttgtatttttttttacaatgaagcacccgtccgcgtccgtggacactgcaagtgcattgccatgtcatgcgccaagtcatgaattacatatttactatgggtttatggg

SEQ ID NO: 12911 - DNA, 1122 bp, Zea mays
  Clone ID: CC-ZMPO148065A03_FLI
gaagaaaccccgcggccaccccttcctgcctatatttctctctctgtcttgcgcgacagggagagaccagcgccaacacctccggtttcttgattgggtggtgatcggtgaaggaaggagaaattaagatgagcctcttcgggcttgggagcaagaatcagaagacgttcaggcctaagaagaatgcaccgtctggcaacaagggtgtgcagctgaagaaacacatcgatgcaaccttaggaagcgggaatttgagggatgctgtccgattgccaccaggggaggatctcaatgaatggctagctgttaacactgttgatttcttcaaccaggtgaacatcctgtatggtactctaatggagttctgcacaccagctacatgcccaacaatgtcagctggaccaaagtttgagtatagatgggccgatggggtgcagatcaagaaaccaattgaggtttcagcaccaaagtatgttgagtacttgatggattggatcgaagctcagcttgatgacgaatccatcttccctcagaaactcggaaccccttttccacaaaatttcaaggaagttgtgaagacaatctttaagcgacttttccgtgtttatgctcatatttaccactcacattttcaaaagattgtcagccttaaggaggaagcacatcttaacacttgcttcaagcattttacattgttcacttgggaattcacgttgattgacaaggctgagcttgcaccacttattgatctaattgaatccattgtttcagtttgttgacatgacatcaatgattatttggatcattttcttatttttggagagcaaggagttacaactaagtgtccagtatgagggtgtgtttccatagggataaacaaaacaagattgcgagaacaaagtggtggaaactgaaaggagatacatcaaaagtctcaagaaaagggccatcaaagaagacacttggaaggaagaagatgacataaacaacatgtggaagaagatggcaccctatatttgcgaggtgtgtggagcaactaaagggagtggatgcgaagctaaaggtacttggtagtggaagtacatggatgatttgatacttgtcaatacagtgtattagcgc

SEQ ID NO: 12912 - DNA, 1775 bp, Zea mays
  Clone ID: CC-ZMPO148067C11_FLI
tccgcggggctctccgtcgcactttctcgtgcctcggggaccccgatccgccaccgcgcgaccgatcgtcccggatgcacgggccgtacccgacggctgctgctgctgctgcttcttcttcggacgacatggcggcgaacggcatgaaggtggcgctgcaccggcaggtctcggggggctcgatgaagcagaacgcggagctccggcgccaggcgtcgctcgagtccccgcggacggggcgggccaccagccggttcctgttcgggcggcagtcgtccatggacccgaaccggaggcgcggccggagccagagccccgtgcgcgcgccggaggacctgggcgtgccggacaacctggacgccaccatgcagctgctcttcttcgcgtgccagggcgacgcgctggggatcgagggcctgctgcgcagcggcgtcgacgtcaacagcatcaacctcgacggccgcaccgcgctgcacatcgccgcgtgcgagggccaccgcgacgtcgtcagggtgttgatcagctggaaggccaacatcgacgcgcgcgaccgctggggaagcacggcagtagctgatgccaagttctacggccactccagggtctacgatctcttgaaattccatggcgcaaaggttccgagaaccaagaggacgccgatgatggtgtcggccccagccgagataccggagtacgagctgaaccccggagaggtccagttccggcgaggctgtgacgttacaccgggtgtgtaccacatcgcgaaatggaatggcacaaaggtttccgtaaaaatacttgacagagacggttgctccgatcaagaagccgcaaactctttcaggcatgaactgactgtactggagaaggtccgacaccctaacgtcgttcagttcgtcggagccgtcactcagagcatacctatgatgattgtgtctgaactccatgaagagaaagacttatcagtctgtatccagaagaaaggaaagttaaagcctcagaaggtgctaagatacggccttgatattgccaggggcatgacctacctccaccagtgcaagccggaccccatcatccactgcgacctaaagccaaaacatatcttcctggatagcggaggccagctgaagatcgcggggttcggagtgacaaggatgtccaaggtcgggaccgacaaggtgaggttgatctaccatggcgctctcgtcgacagcttcagctaccacaccgcgcctgagctgtacaggaacgacgcgttcgactcgagtgtggactcctactccttcggcttcatcctctacgagatggtcgaagggtcggtaagagcgccggaggattcagggcactcgatccggttcgagggactgcggccatccctcaagggcaggctcaagggctatcctcccgacttcaaagcgctggtggaggaatgctggcacccgcaagccatggcgcggccgacgttctcggagatcatcatccggctcgacaagatctacgcccacttcgacaagcatgggagctggaaggactcgctcaagctttggaaatgatcgatggcatggcctgcactgcacgccgccttctttgtgtacatacataccgcgctgcaaacgcgtctctttcccggggaagattgagtactggttgtaccttgtataaggtggagactggagaatcatgtggcatggtgattggttttttgttttttgctacgaattgtaacagattgtgagtaaaattgggcagaacaacacgtatacgtcccccccccc

SEQ ID NO: 12913 - DNA, 663 bp, Zea mays
  Clone ID: CC-ZMPO148067D11_FLI
cgcaaattgcaagcaagccggcaagggacggcaccaacaagagcgcgatcgacctaccaagctagctagcgaattaaccttctcctcccatggctccgacgacggccacggcggcggcggtggggacgaaggcgacggcgctgggggtggcggcgtgcgagcgcgacgtggagaagctggagttcatcgaggacaagaccaggaacttcgacgcggagcaggtccgcgtgctcgcggagatcctggcccgcaacaacggcgccgagtacctgcggcggcacggcatggaggggcgcacggaccgcctggcgttcaaggcgtgcgtgcccgtggtcacgtacgaggacctccgcccggagatcgagcgcatcgccaacggcgaccgctccaacatcatctcctcccaccccatcaccgagttcctcactagctcggggacgtcggcgggggagaggaagctaatgccgacgatcgaggacgagctcaacaggcgccagatgctctacagccttctcatgcccgtcatgaacctgtgggtgatgaaccactaatcctccgttctacgccttaatcaatttgtttcccgtcgtgtcgtcggtgtcctccctacgtcatatggatatatatactccttcgttttaatttgcctgtttggacccggcc

SEQ ID NO: 12914 - DNA, 791 bp, Zea mays
  Clone ID: CC-ZMPO148069D04_FLI
ctgaaaacagccgagcgatctcctctccctctccctctccgatccattctccagcgcagcgaagtaaacatgtctgaccgggcaaagatgtcgtggcaggcgtacgtggacgagcacctgatgtgcgagatcgagggccaccacctcgcggcggcggccatcgtcggccacgacggtgccgcctgggcgcagagcacggcgttccccgagttcaagaccgaggacatggccaacatcatgaaggacttcgacgagccagggcacctcgcgccgacaggcctgttcctcggacctaccaagtacatggtcatccaaggcgagcctggtgccgtcatccgtggcaagaagggatcaggaggcatcaccgtgaagaagacagggcaggcactcgtggttggcatctacgacgagccgatgacgcctgggcagtgcaacatggtggtggaaaggctgggcgactacctgcttgaacagggcatgtaactactacgtaccagctggaatgcatgtcgacgacgatggtttcgagtttcgacttccaataatagtaacaacaaagcaaaggccttcctcccggcgtatttgctttggctcttctcctccacgccataagatatctagcaattggtgactcgccttaattagttcgctttgcttttgaggttgactcgaccattttgctgtagcgtgaattgcatggacatgcaacgctccaatggcctttggaatgtggaatttttttcccgtttctgtaattttcctataaaatgaagtaatgaactggttcttat

SEQ ID NO: 12915 - DNA, 1232 bp, Zea mays
  Clone ID: CC-ZMPO148071F08_FLI
gagggcattcccccagaccagcagcggctcatctttgctggaaagcagcttgaggacgggcgcacgcttgccgactacaacatccagaaggagagcaccctccacttggtgctgcgcctcaggggaggcatgcagatcttcgtgaagaccctgaccggcaagactatcaccctcgaggtggagtcttcagacaccatcgacaatgtcaaggccaagatccaggacaaggagggcatcccaccggaccagcagcgtttgatcttcgctggcaagcagctggaggatggccgcacccttgcggattacaacatccagaaggagagcaccctccacctggtgctccgtctcaggggtggtatgcagatctttgtgaagacactcactggcaagacaatcacccttgaggtggagtcttcggataccattgacaatgtcaaggccaagatccaggacaaggagggcatcccacccgaccagcagcgcctcatcttcgccggcaagcagctggaggatggccgcaccctggcggattacaacatccagaaggagagcactctccacctggtgctccgcctcaggggtggcatgcagatttttgtgaagacattgactggcaagaccatcaccttggaggtggagagctctgacaccattgacaatgtgaaggccaagatccaggacaaggagggcattcccccagaccagcagcgtctgatctttgcgggcaagcagctggaggatggccgcactctcgcggactacaacatccagaaggagagcacccttcaccttgttctccgcctcagaggtggtatgcagatctttgtaaagaccctgactggaaaaaccataaccctggaggttgagagctcggacaccatcgacaatgtgaaggcgaagatccaggacaaggagggcatccccccggaccagcagcgtctgatcttcgccggcaaacagctggaggatggccgcaccctagcagactacaacatccaaaaggagagcaccctccaccttgtgctccgtctccgtggtggtcagtaagtcatgggtcgtttaagctgccgatgtgcctgcgtcgtctggtgccctctctccatatggaggttgtcaaagtatctgctgttcgtgtcatgagtcgtgtcagtgttggtttaataatggaccggttgtgttgtgtgtgcgtactacccagaactatgacaaatcatgaataagtttgatgtttg

SEQ ID NO: 12916 - DNA, 1044 bp, Zea mays
  Clone ID: CC-ZMPO148072D11_FLI
gctggttcgtggatggcggcgccacggcctctcctgctatcgctgctggtcgccgtgctagcggtggccgcggatgtcgccaacgccggccacgccaagcccctgacgcctggcgggcgcgtggtacaccacaaccacggcaagttcacggccgggccgtggaaacccgcccacgcgaccttctacggcgggcgggacgggtccggcaccacggcgggcgcgtgcgggtacaaggacacgcgcgcgcaggggtatggcgtgcagacggtggccgtgagcacggtgctgttcggcgacggcgcggcctgcggcgggtgctacgaggtgcgctgcgtggacagccccagcgggtgcaagcccagcgcggcggcgctggtggtgacggcgaccgacctgtgcccgcccaacgaccagcagtccgcggacagcggcgggtggtgcaacccgccgcgggagcacttcgacctcagcatgcccgcgttcctccagatcgcgcaggagaaggccggcatcgtgcccatctcctaccgcagggtggcgtgcacgaagcagggcggcattcggtacaccatcaccgggaacaagtacttcaacatggtgacgatcaccaacgtgggcggcgccggcgacatcgcggcagtgtcggtgaaggggagcaagcgcgttaagtggacggagatgaagcgcaactgggggcaagtgtggcagaccggggaggacctcacatgcgagtcgctgacgttccgggtgatgaccagcgaccaccgcaaggccacctcatggcacgttctccctgctgactggaagttcggcgtcacgtaccaggcgtccaagaacttctaagtagccactttccctcctcttcttcaacctgcatgcccgcaagcagccatgcagatgataacatgcatcatgcatgcatattcattctttcgctcatgcactccgatacggtgccggagttaaaaaaatataaatcaatgtgcaaattcaaatgacatcttaaccagttgtgatcaatctgaaccgctaatgcatgcacac

SEQ ID NO: 12917 - DNA, 1799 bp, Zea mays
  Clone ID: CC-ZMPO148074D03_FLI
cctggtcccgtcctcttcagggcctcgccgtcgcctcctcttttttcccccctcgtcgacggctcctcctcacaggctcacagcctcacactcacgcggagagcgctcgcgcgggcgcacacgcggaggggacgttcacaggagggtgagggaggagatgccggggagccagaacggggggccgaggcctcggccggtcaaagccgagaccatccacgatcttgcgcgcgccggcgacctcgccggcgtccggaggaagctgctggagaacccctccctcctcaatgacaaaaatcccgtgatgtgtcaaacaccacttcatgttgctgctggctacaataatacagaaatagtcaagttcttgcttaaccagcaaggtacagaaacagttgatctggaggcaaagaacatgtatggggagactcctctgcatatggcagtgaagaacagttcttgtggatcaacaaatctactccttgaacatggtgcacacatagaagccaaagccaataatggcatgacaccattgcatttagctgtctggcatgcaattcaagctggagacttcagcacagttagcgtgttactaagctacaaccctgattgctttgtgaaagatgatgaaggcaaaatgcccttaaatcatattccaggaggagctggtagtgagaagctgctgaaactcctcactcatcatatggaagagcaaagaaaacggaaagctctcatgtcatgcctcgaagggaaagcaatgtcagagtttgaagaggcaatgtcacaaattgttggattgcaggagctaaaaatgcaattgcgccgatgggcacggggaatgttttttgatgagaagcgacgggctatgggcttggggattgctaaaaggagagctccccatatggcatttcttggcaatccgggaactggcaaaactatggttgctcgaattcttggaaagctcctccacatggttggaattctccctactgacaaagtaactgaagttcagcgaactgatcttgttggagaatttgtggggcataccggaccaaagactaggaggaagatacatgatgcagagggaggtattctcttcgtggatgaagcttacaggttgataccaatgcaaaaatccgatgacaaggattatggtttagaagccttggaggagataatgtctgtaatggacagtggcaagatagttgtcgtatttgcggggtactgtgagccaatgaagcgagtcatcgcctcgaatgatggcttctgcaggcgggtcacgaaattcttctatttcgatgatttcagtacgacagaactagcagagatcctacatatgaagatgaagatcccaagtgactgtagcttgctttacgggtttaagctgcacccaagctgcagcattgaagccattggagagctgattgccagggagatcactgaagagcagaggaagcagatgaatggaggccttgtagacacgctgctcatcaatgcccgcgagaacctggattcgcggcttgatttcagctgcaacgatgccgatactatgatcacgatcacgttggaagacctggaggcagggcttcgtcagatttccagacaacgtcagctgcagtgacatgtaaatttaggagaattttttctcgatgatctcatgcttgtctccaagggcgaagttatggctgtatcgtctcatccaacgtttttggctattctgactgtctgttgtatgtagtcgttgctaaattgatgccgtccaacatatagcagtaaaatgcatgtggtatatacaattatacatc

SEQ ID NO: 12918 - DNA, 542 bp, Zea mays
  Clone ID: CC-ZMPO14820001B03_FLI
ccaataatagcaagtgtgatcatccgttgatccatcttgctaataagcctgcgtgcccttcgttcttcctcgtctcgatcccgacgacgctccgttcggctccggcaaaccacatcaagtcgcgatggagatgaagaaggtcgcctgcgccgtcctcgccgccgccgcctccgccaccgtggtcctcgccgccgaggccccggcgcccgcccccaccagcgcctcctcggccgcgttcccggccgtcggcgccgtgctgggcgcctccgtgctctccttcttcgcctactacctgcagtaaaattaaaggaggatcggagggagaggctgctggctgccattgcctgtattcggttggattccgtttatatatatatttaagtactttaatttgggtctgaacatgtcgattgatccattcattttatttgctttgccatttctcccttttctgttaatttcgatatgtaaagaggggagaatgggagacactattcgtttggacatgacaattggaaattaatcaatacccattgttagtt

SEQ ID NO: 12919 - DNA, 762 bp, Zea mays
  Clone ID: CC-ZMPO14820002F11_FLI
ggacgaaagaagtcgcctaattctttcgatcgaattaggcgccttcttcgtcccacgctccgtctttatttgtaatctgaagcttacaggaacatttgagtggatcatggacggattggtaggcctcttgaaagtccgggtggtgaggggcatcaaccttgcctaccgcgacgcaagaggcagcgatccgtatgtcgtcctacgacttggcaagaagaaacttaagacgagcgtgaagaagagatctgtgaaccccatctggcacgaggagctaactctgaccgtcacagatcccagcctagctctgaagctggaggtgttcgacaaggacacgttcagcagggacgacccgatgggggacgcggagatcgacgtggcgccgctggtggaggcggcgaacgcgagcccggaggcgagcctgaggaacggcgccatcatcctgtcggtgcggccgagcgccacgaactgcctcgccgacgagagccacgtgtgctggaggaacggcaagttcgcgcaggacatgatcctccggctcaggaacgtggagagcggggagattcagctgcagctgcagtggctcagcatccctcctgctgcagccagcaggtgaaggaaacgaagcaatcgcattttcaacctctttgtgaatgtcggattgtaacaacttaaaccagcaattaatggggtcagggtcagtcagggtagttcatgtgttgccctattaatgtacagttggggacagcatgaaattcaagccaagtc

SEQ ID NO: 12920 - DNA, 1103 bp, Zea mays
  Clone ID: CC-ZMPO14820007E08_FLI
ggttattcattcgtccttctattatctttgcctttgtcttctttcctaagatttcactacttctgcggggtgtcacagtcttaagatcatgtcagggtaggaaatgatgtccgagagtgaagagcatggctcgctcctagacaagatcaacgacaagatcaacgagaagatccatgagtacaagcactcgtcgtcgtcgtcctcctcttcggactcagatgatgacaagaagcccaagaagtctaagaagaagaagctttttggaagaaaacacccattgcatcatgtcctcggaggaggcaaagccgccgaccttgtgctgtggaggaacaaacaggcatctgggagcatattggtaggggtgaccgtgatctggttactgttcgagggcatcggctaccacctccttaccttcctctgccacgcactaattgtgtttctcactatctggttcatctggtccaatgctgcgtcctttgtcaacaggtcacctccaaagttcccagaggtcattctatctgaagtccagtgcatgaaggtagctcatgttgcaaggaaagaaatcaacgaggctttctatacattgcgcaatgttgcttctggaaaagatttgaaaacatatctgatgacagttacagtgctgtggttcatttccataattggaagctgcttcagtttcttgactctgtcttacactattttcctgatggcatacactctgcccatgttgtatgagaaatacgaagatcaagttgatatcgtaggcgagaaggccctcattgagataaaaaagcagtacaaagtgattgatgcaaagtttatctctaagatcccaatgttgtctgagaagaaacaacactgagagagggtgctccaaaggtctaattcagcacattaccaatatatgaaagtagttcctttggctttgctatatcatcatttagcaacctttaagatgataccatagatattatatggattcctaaggttggaaatttgtgtcttccgagtcccctagaatagttgcttcttcctgtctgacagtgaatttgattttgtatggatgtgacatatatatgcctgaccaattgtcattatttgct

SEQ ID NO: 12921 - DNA, 1041 bp, Zea mays
  Clone ID: CC-ZMPO14820017D05_FLI
ccccatgcggccatgccgcaccccacagccagaaccctagcctcgtcaccatggcctcctccttgctccgctccggccaccgcctctttctccgacgccaccgcctacccgcggcattctccaccgctacggccgaggagctaatcgacgtacgcaagcttcccaccaactacgacccctccacctttgacccgtcctccccgtcccgcccgccgccgtccgaccgcgtgtggcgcctcgtcgaggatgtctcctccctcaccctcgcagagaccgcggctctctcctctctcctcctccgccgcctcgacataccctccgcaccacccatcgccatcctcaactccgccgcggggctgggcggcgccgccacggccggcgcggcgggggagaaggcgggggcggcgggggcggccgagaagaccgtcttcgagctgcggctggagggctacgacgctgcgagcaagatcaaggtgatcaaggagatccggtcgttcaccgacctggggctgaaggaggccaaggagctggtggagaaggcgcctgcggtgatcaagggcggcctatccaaggacgaagccaaggcgatcatcgagcggatgaaggcagttggcgccaaggtcgtcatggactgatcagaacaagcctttttcaacggtgaaatcctgcaactgcgaatctatgcttcatttcagatcaactttaagtgcaaggatggacgggtggattgtggacagttcctgtatgaacttgcggaaatttgatgtggcacagcgctaataggttttcaagcacgttaatcaaatgaacattgatcctgcaatgctatagggtattggcatcaaacgctcgtcattatgttcgaatttgtgacctttcaattgtgggaagttaaaatgacctagttagttattttgttcatcacagggtcttgtttgagactggatgtccatatggatacaataacattttgctcttgtttctgtgaatttacaaatcgattctttttgaatgcaacttaactctcgactattgtttgct

SEQ ID NO: 12922 - DNA, 1101 bp, Zea mays
  Clone ID: CC-ZMPO14820017E02_FLI
cccctctccatctctgcgtgatggacgcccgcctcgtcttcctcctcctcctcgccgccgcggcgtccgcgccgctggcctccgcgcagctctcggcggatttctacaagacgtcgtgccccgacgccgagaagatcatcttcgacgtcgtccagaagcggttcaaagctgaccccggcaccgccgccggcctcctccgcctcgtcttccacgactgcttcgcaaatggctgcgacgcgtccatcctgatcgacccgatgtcgaaccaggcctccgagaaggaggccggccccaacgtctccgtgaagggctacgacgtgatcgaggagatcaagacggagctggagaagaagtgcccgaacgtggtgtcgtgcgcggacatcatctcggtgagcgcccgcgactcggtgaagctgacgggcgggcccgagtacgcggtgcccctggggcggcgcgactcgctcgtgtccaaccgcgaggacgccgacaacctgccgggcccggacatcgcggtgcccaagctcatcgacgagttcgacaagcagggcttcaacgtcgaggagatggtcgcgatgctgggcggcggccacagcatcggcgtctgcaggtgcttcttcatcgagaccgacgcggcgcccatcgaccccaagtacaagaagacgatcagcgacgcgtgcgacggcaaggactcgggctccgtccccatggactccacctcgcccaacgacctggacgggagctacttcggcctggtgctggagaagaagatgccgctcaccatcgaccgcctgatggggatggacaagaagacggagcccatagtgaaggccatgtcggacaagaccaccgacttcgtcccgatcttcgccaaggccatggagaagctcagcgtgctcaaggtgctcacggggaaggaaggcgagatcaggaagacgtgctccgagttcaacaacccgcagaacagcagcggcagcacgtcggtgatacggatcagctccatcgaccccgaccagatggccgggctgtcgcagccagggtcgtcgtccaggaaggtgggccctcctcccgtcgaggaggaaacacccgccatggtggcgaccg

SEQ ID NO: 12923 - DNA, 1208 bp, Zea mays
  Clone ID: CC-ZMPO14820018F09_FLI
gaagccgtagccgccgccgccggacgagacaggttgaggcggggcggcaatggccgccggggaccttgaggtgctcaccgcgctcgacaccgcgaagacgcaatggtaccacttcaccgccatcgtggtcgccggcatgggattcttcaccgacgcctacgacctcttctgcatctccctcgtggccatcgtcgtgtccgcgtcgttcaaggccaggttcccagccccggcctacgccgtcgaccccgccgggtccacgccgccgcaggccgacttcgtgtggcggatcatcctgatgctgggcgcgatgcccgcggcgctcacctactactggcgcaccaagatgcccgagacggcgcggtacacggcgctggttgccaagaacgccaagcaggccgcggctgacatgtccaaggtgctgcaggtggagatctcagccggcgccgccgaggaggacgccgcggctgcgactgcgactgagcctgcgccggcgtcctttgggctcttctccggggagttcctccgccggcacgggctgcacctcctgggcacgtcctcgacgtggttcctgctggacatcgccttctactcgcagaacctgttccagaaggacatcttcagcgcggtggggtggatccccaaggcggcgacgatgaacgcgctggaggagctgttcagcatcgcgcgggcgcagtccttgatcgcgctgtgcggcacggtgcccgggtactggttcacggtggcgctgatcgacgtgttggggcggttcgcgatccaggtgacggggttcctgatgatgacggtgttcatgctgggtctggccgtgccgtacgagcactggacgacgccggggcaccacatcggcttcatcgtcatgtacggcctcaccttcttcttcgccaacttcgggcccaacgcgaccacgttcatcgtgcccgcggagatcttcccggccaggctgcggtcgacgtgccacggcatctcggcggcgtcggggaagctgggcgccatcatcggctccttcgggttcctgtacctggcgcaaaaccgggacccggccaagacggaccacgggtaccccgcgggcatcggcgtgcgcaactcgctgttcctcctcgccggctgcaacctgctgggcctggcattcacgttcctggtgccggagtccaagggcaaatccctggaggagatgtccggcgagaacgacg

SEQ ID NO: 12924 - DNA, 3494 bp, Arabidopsis thaliana landsberg
  Clone ID: gC-alX01DS00049G02_FLI
ctctaaagtttaaaggtaaaaatcttaaaattcagtttgatgatttagcttttatggaatttttaagaattgagattaattgaccttttgtcattaatgtataacaatgaaaccatttttctcataaaaaagataaactatttttgtagtcctcacaaaaaaaaaaaagcacatgcggtttcctctgcttcttccttcttacaagttggatgtctccgtcttccacggtgcttataaattagtgtaacaacaaaagctttggtcagtatttatattatcatgcatttctaatctctactttgtcaattcctatactttcactctcttcaattatataatctctggtccatagaaaacatcggtctcttgtcaccgttgattttatttggtcaaaatcattctctcctcgctgaataatcgttgatttcacttcttcttctggtcttaaaaaaattcaagatctatacgagaaaacacaaaacaagtaaaactatttcaaccgtttttcctgtcggtaaagtttggattcttcttggtaaattttggtcttattgtcaaccaaaagaagaagatggtcgttcagaatgttcaagatttggatgttcttccgaaacatagctccgattcattcgatgatgatggtcgtcccaagcgaaccggtaatttctcgttcttctctaattttatgtttttatgtttctaatttgttcaaacaagaatcaaagtaaacatcaaattactctttgttttctataaccggtgatttgaacccgaaacccggaataattttgggttaattccgggtttcgggattccaatcataacccggagtttgttgaacttgcaatttaaaacatctacagtaaatatatgcattggctttgtttgttaaggggtgacaaattccaaccattttttttctttgtgtggatgttatgaaaaagtatgatttttgttactgaagtgtatggacactattgttactatagttgttgtcttaaaattaccggttaaacaaaacagaactttattgttactacagttcgtgtcttaaaattctgtttgaatgtgattggtgtttagggacggtgtggacagcaagtgcacacataataacagcagtaattgggtcaggagtgttgtcattggcatgggccgttgctcagattggttggattggtggtccagtggctatgttactcttttctttcgttactttttacacatctacccttctctgttcttgttaccgatctggtgactctgttaccggcaaaagaaactacacttacatggacgctattcactccaacctcggtaaacaaaaaataaatcatttcggtttctttttggtgcatatattgggatatgaaaccgatatggagaaccggagatcgaccgagatcgaaggttgagatgacaagaagatattattgtagaagataaatgttaaacttcctaaacttcaatattaacatttgatcttctagaataatatcttcttgccatatcttggccttatcatttcaaccgtagatctccggttctccatatcgggtccatatcccaatagttattatcatcaaaaacttaattcattgttgattcatttttaggtgggattaaggtgaaagtatgtggagttgtgcaatatgttaatctatttggtacagcaattggatatacaattgcatcagctataagtttggtgtaagttaaaactttgctttcacaaaactctttttatttttaagtgttcacatttgtccaaaaaaagttagatgcgtgttttattttgctattcaatattgtccatacaagtcattaatgtttggctcaataatgcagtgttttagtcaatgtagtcttgttttgtgccattaaagattcgaaagaacggctctattattgtttgacttgttaactaattttcttgaataaaaaatttacagagcaatccaaaggacaagttgccaacagatgaatggaccaaatgatccttgtcatgttaatggaaatgtttacatgattgcgtttggtattgtacaaatcatattctctcagattcctgattttgatcagttatggtggctttccattgtcgctgcggtcatgtcttttgcttattctgccattggacttggccttggtgtctctaaagtggtagagaacaaagaaattaaaggtagtctcactggagtcactgttgggacagtgacactgagtgggacagtgacatcgtcgcagaaaatatggagaacatttcagtctcttggcaacattgcgtttgcgtactcttactcgatgattctcatcgaaattcaggtatttttgttacgcgagtttttttttttttgaaaataatgttaagttagattcaaaagaaaaataacgttgttacaactagtgcatcgtttggtttatttgttaagcgagtttgtgtgataagagtttgtttaaaggatgttttaatcaactagacgatttgatgatccaggacacggtgaaatcaccgcctgccgaagtaaacacgatgagaaaagcgacttttgtaagtgtggcagtgactacagtcttctacatgctatgtggctgtgtagggtatgcagcatttggggataacgcacccggaaatctcctcgctcatggagggtttagaaacccatattggttgcttgacattgctaatctcgctatagtgatccatctagtcggtgcttaccaagtctattgccaacccctctttgccttcgtcgagaaggaagcctctaggaggtttccagagagcgaattcgtcacaaaagagatcaagatccaactcttcccggggaagccctttaacttgaatctcttcaggctcgtatggaggacgttcttcgtgataacaacaacgttgatctcaatgttaatgcctttctttaacgatgtagtcggtctcttgggggccatcggtttttggcctttaacggtttatttcccagtggaaatgtacattgcacagaagaatgttccgagatggggcacaaagtgggtttgtctacaagtcttgagtgtgacatgtctttttgtgtccgtagccgcggccgcgggatctgttattggcattgttagtgatctcaaggtctacaaacctttccagtctgaattctgagatcatacgggaaaaataaactcctgctaaaagggttaagattagaattgaatgttttaatgtcatatttgtattagttaactttgtgtaagtgttcaattataaatcatgtttctaccgagaattcttacaacatggaactatcaatgattaaaagtagtcatgtataaggatagctttttcgacacttgaggtagtagagatgtattaaacatttaatacttataattaattttagaagtctataaaccaaaggagctacaagatgttttgtgtttatctccaaaattcttcaaattcttaaatcgtttatcttcttgtaaacactctccaaactttagag

SEQ ID NO: 12925 - DNA, 1964 bp, Zea mays
  Clone ID: GC-ZMLELIB3302112E04_FLI
tttgtcaaggtgaggcgtcgcttccctctcgtagatcccccacacgttactttgtctgccacagtatcgctcccctctatagccacgttctcgtcagatccttcctcccctttgtgtttgaaaattgcatctggtatatttctagccctattttaggttccacccagaatttctgtactaggtctgttatttccgtactaggtctgttgagctgtcagcaatgcgatcctttgagcgttatcaaatgttatttggttaaatgtcttaccaaatactgttacccttcatgtgcactgacagagctgccttgccatgagatacgaggcactgttgcttagagatgctaaatactgcaacgaccttcacttgcaagtgtcccgtcaggagtggttaacttttgcaatggattgtcttgataatggcttctacaccattgcctccaaggtacttttatccagctttaactttgttgtaggtattacccctttactgttcttatcaattagcatgttggcacttaagcgagttttatccacccaaggcacttggactctgctaattccattgaggagaaggacaagatcattgagataacaggactccagaacttggccaagtcattatctacacaacattgtggtaagttttcagtgctatggattgcttaaattgcaggcagagaaactgagtttgctttaacttttcaagtaaaataagttcagagaaactaaacttgtcttcatcttctaaagttgagtaaatgaaagagtgatacttgtttaatcaacagagatccaacctgactgaatgcatgtcttcctctatgtttgagtaactactaatgccttttttctgtatatcaaacatgacgtctgttatgtgggagatttggagacgtattgtgacaccaaatcttctcttgtatgttccaactgtttgaacatatttttgatatagctttctaatgacatttacttgtacagacacgcgcagcgatagatcatcagcgcgcggttctagacttcactggcatgagttcattgcgaccaaccagcctcttcgtgagtattgcgacgcttccagaggctgtcgagcgataaacagagaaaaggctatatatctctctcagacttggctgctggggcggcgctatccatggcgaagtgggcgtcggccgcgagggctacgacgatgacgatagaccgacttgacgctctcaacaggtacgagccactctcctccctgggtccttggacctgaaagttactagatagcaagcctttactccttgagtcgtgattcgtcaggatccctaatctccctgggtttgaccgagatagagagttttttgcaactgctggtgtaaataaaaagataaaagtgtttgagtataatatgattgtaaatgaacaccgtgatattcactatcctgtggtagagatgtctaatagatcaaaactgagttgtatttcctggaacagttatatgaagagccatatagcatctagtgattttgagggtatagtgcagataagttttgtggctttttttataactaaattgtatttgatgcaattaccataatatccctgtattttcaggtttgggatgttactaggagtcaagtttttgttgagatgagggagcatgagcgacgtgtgtggtcggtggacttctcaattatggacccaacaaaattggtcagtgggagtgatgatggatctgtgaagctgcgggatatgaatcaggcaattttattcttgcacctactgtatgtcagctttttaactaacgataacatggttatcgaacttgtatgtggatgtagagttgcttctcttcattgttataacacatttttttgtgtactgtgcaggctgggagtattggcactattaaaacaagggcaaatgtgtgttttgtgcaatttcaacctgatactgctcgctccattgccatcggct

SEQ ID NO: 12926 - DNA, 1255 bp, Zea mays
  Clone ID: GC-ZMLELIB3308285C07_FLI
tggccataaggagacgcggcgatcaggccttccttaattttcttctgttccatcctcgctctacctgcctgctgccagtttcaactctccaaggtcaacgccagccctcgcgcgcttggtgtactctagtttagtacaccaatccgcatgcattcttttttgtttgtttgtttgtttgtttgttttgattgacaaatatatgcggcagagttaagaacgaatcgactccgtcgtctcggctagtcgaccgtacatatccacgacctccaaaggccgccaaaacacccgatccggccagccttgtcgtgtcatcgtccagttagatgtcaactcccatctgaatctcctcctccatggcggctttcctataaatacgtcgcctttccatgttggatgtcattccattccagcaggcaacagcagctatagtttccaagggaaagggatacatcacctgctgctctagctctgctatagcgctagcagcaatataatggcggccgtcggcgccccgggcagctctctgcacggagtcacggggcgcgagccggcgttcgccttctccacggagcacgaggaggcggcgagcaatggcggcaagttcgacctgccggtggactcggagcacaaggcgaagagcgtccggctcttctccgtggccaacccgcacatgcgcaccttccacctctcctggatctccttcttcacctgcttcgtgtccaccttcgccgccgcgccgctggtccccatcatccgcgacaacctcaacctcaccaaggccgacatcggcaacgcgggcgtggcctccgtgtcgggctccatcttctcccgcctcaccatgggcgccgtctgcgacctgctgggcccgcgctacggctgcgccttcctcatcatgctgtccgcgcccaccgtgttctgcatgtcgctcatcgacgacgccgcgggctacatcgccgtcaggttcctcatcggcttctccctcgccaccttcgtctcctgccagtactggatgagcaccatgttcagcagcaagatcatcggcaccgtcaacgggctcgccgccggatggggcaacatgggcggcggcgccacgcagctcatcatgccgctcgtctacgacgtcatccgcaagtgcggcgccacgcccttcacggcgtggcgcctcgcctacttcgtgccgggcctcatgcacgtcgtcatgggcgtcctggtgctcacgctggggcaggacctccccgacggcaacctcaggtcg

SEQ ID NO: 12927 - DNA, 485 bp, Zea mays
  Clone ID: GC-ZMLELIB3334201D02_FLI
gctactcgtgtccatggatctgcgccctctaacactgttggtcgtcatgggctcgctccccaccactctggtcggcaggcttgaaatggggccgacctgcgacctcttcgatccgcgtgacgcgtcggggttcactaaccttctggctgcgctcaccgttgtgatcatcgcggtcaccgcgtcatcgcccgtggggttcatcgtgctgcgcttcgtggcgggtctctccctcgccaactttgtcgccaaccagcactggatgtcgggcatctttgcaccctccgtcatcgggctcgccaacgctgtcacgactggctgactggtgtaaattccaggattcagattgcccaacgatgcagagcatcacggtaagaaactgcaacaaacttagacaaatcccttactttgtttctgtcaagaatctaatgataataaagtcaactctaattggtctccagctttcggcatctaatgaaccttctcag

SEQ ID NO: 12928 - DNA, 876 bp, Zea mays
  Clone ID: GC-ZMLELIB3338051F08_FLI
ctctggccgacgaggatgcatcgccgaagaagacgaagcagggcggcttcaggactatgccattcatactgggtgatcgcccttgcttgcaccgaatctttcttctcgtcagatcgcaatccaagcaacctttccatggctgtttctgagcatatacatactactgcgaacgactgatgcccgccctgcacatgcatttgcagcaaacgagatctgcgaccggttcgcgacggccggcttcaacgccaacatgatcacatacctgacgcagcagctgcacctgccgctcgtggaggcctccaacctgctcaccaacttcaacggcaccgcggcattcacgccggtcctgggcgccatcatcgccgactcccgtgctggccgcttctggaccatcgcggggggcggcgtgctgtaccagctcggcatgctgggcctcgtcgtgtccgcgctcgtccccgcgctccgccccgcgtcctgtggtgccactggcgctgccgctgccgctgcgcccccgctgacgtgccagcgagcgaacggcgggcagctcgccatgctgtacggttccctgctcctcaccgcgctcggcggcggcggcatccggccctgcgtcgtggcgtttggcgccgaccagttcggccagcgcggcaagcgtcctggcggcgagcagcagtggagctacttcaacctctacttcttcagcatggggctcgccgttctgctggcgctcaccgtggtggtgtacatccaggagaacgttgggtggggctgggggttcgggatccccgccatcgccatgttcgcctccgtgctctcgttcgtcgtggggtacccactctacgtgaaggtgaagccccaaggaagcccttcaagaggctc

SEQ ID NO: 12929 - DNA, 1379 bp, Zea mays
  Clone ID: GC-ZMLELIB3340015A11_FLI
ctgcagagtgaattccttaatcagtcaaggaatagcctggaagaacgtgaagcggcacttaggttacgcgaagagatagaagaacaagaattattgctggattttcttcagcagttgcagaaaagaaagcaagatatggcagacagtttgcaggacactgttgcttttctctcttctgacatcaatgaggtactccaccagcagtctgcacttggccactgtgtgaacttctcaccagatttggataaagaggtgtgctctggaactgttgaagatcagagtgattgtggatccaggaagcgttttagacctgagctgcaaggcgttgatatggaggaaaataatcgtagtgtggaagaatgttcaagaacagtgccgtcctctgagttaatccaggaaaatgttctgtcaaaaagctccaggttgatgaagaacttaaaaaaacttgaaacagcttattttctaacaaggtccaagttggcgaagcaagttggcaaccagataaatagttgtaatcgagttgttaagaggactactggttcagctgttgggacagaagcaagttcaatagatgatttttctttggaaaggcaatatggtagaaggcaaagaggttgggtgaactcttttcttgagggattgtgcaagtacttgtcattcagtaagttgaaagttcgggcagaattgaagcattgtgattcactgaactcatcaaacttagtatgctccgtagggtttgaccgagatagagagttttttgcaactgctggtgtaaataagaagataaaagtgtttgagtataatatgattgtaaatgaacaccgtgatattcactatcctgtggtagagatgtctaatagatcaaaactgagttgtatttcctggaacagttatatgaagagccatatagcatctagtgattttgagggtatagtgcaggtaagttctgtggcatgttttttataactaaattgtatttgatgcaattaccataatatccctgtattttcaggtttgggatgttactaggagtcaagtttttgttgagatgagggagcatgagcgacgtgtgtggtcggtggacttctcaattgtggacccaacaaaattggtcagtgggagtgatgatggatctgtgaagctgtgggatatgaatcaggcaattttattcttgcacctactgtatgtcagctttttaactaacgataacatggttatcgaacttgtatgtggattagagttgcttctcttcattgttataacacattttttgtgaactgtgcaggctgggagtattggcactattaaaacaagggcaaatgtgtgttctgtgcaatttcaacctgatactgctcgctccattgccatcggctctgcag

SEQ ID NO: 12930 - DNA, 1262 bp, Zea mays
  Clone ID: GC-ZMLELIB3348047D12_FLI
cagtatccatattggattttgtagaagtgatgtgacattgtgcaaccacaatttataattttgcgggtggtatattactatcatttactagcaaattcaagttgtttacctaaaacctagtatgagctgttggacttctgacatgcataccatggtgtttctaatctcaccacatattaagcaaaaaaggatagcatatcaggaaaatttaaaatgacacgataatcacattaattgtgagatagttgtgaccctttcacatggtggtcactgttgccaatgaaagaatacaataggcctttctgcttttattggtgcatcagctcttggaatgctgaaagcactttgctatgcagcatatttgcatcacgcatgcaccttatcatgaatctggttgtagtttccaattgcaatcgaggcccaagaccatggttttatgatagtctatgcttgccttagttacacgtgaatgccgattatacccttgttcttactatatgcaattcttatgcagtctcctattactataggatattgataatccatttgtactactatcaccatgcatgcacaaatttaattgcctaggctatggccagcagatcgtgcgtatgaccgtgcaaaaactgtattgcactgactcctctgtttacagagtggagtttgaaataggagatatgaatgagtaagctgctggagatagccttactaactgaaaccacacttacagttggacttctctacttttctgtgtgattctgtcaattatatcctcttttttctcactgaagtgtaaaattctatcttaagtctggcaggcaaggtatttaatttacctaatatttttgtcagctcttttgctgttctgagacatgggaggtgcactgtgctgcaatgtcaaatcttcgtcaacgcatcctgcctccaaattttctttcagaaagtcccaaggaggctggcttctgcctttggttactgcatccagatccttgttcgagaccaaaagcaaagtcagtttattcatctctctcatttggagacaaaataagaaaaatgcttactgattagtaattagtttgatacaagtaaaggccaatcttctttgctttggtgatttttaatgttaaaattaagtttagataactgcttgtcctatggaagaagtttctagagttttgaaatattttataggataaataagctctatcacactcagcgtcttatgtttgttatctttcttttcttttgttcaacacagttgt

SEQ ID NO: 12931 - DNA, 1374 bp, Zea mays
  Clone ID: GC-ZMLELIB3348125F08_FLI
ctgcagagtgaattccttaatacgtcaaggaatagcctggaagaacgtgaagcggcacttaggttacgcgaagagatagaagaacaagaattattgctggattttcttcagcagttgcagaaaagaaagcaagatatggcagacagtttgcaggacactgttgcttttctctcttctgacatcaatgaggtactccaccagcagtctgcacttggccactgtgtgaacttttcaccagatttggataaagaggtgtgctctggaactgttgaagatcagagtgattgtggatccaggaagcgttttagacctgagctgcaaggcgttgatatggaggaaaataatcgtagtgtggaagaatgttcaagaacagtgccgtcctctgagttaatccaggaaaatgttctgtcaaaaagctccaggttgatgaagaacttaaaaaaacttgaaacagcttattttctaacaaggtccaagttggcgaagcaagttggcaaccagataaatagttgtaatcgagttgttaagaggactactggttcagctgttgggacagaagcaagttcaatagatgatttttctttggaaaggcaatatggtagaaggcaaagaggttgggtgaactcttttcttgagggattgtgcaagtacttgtcattcagtaagttgaaagttcgggcagaattgaagcattgtgattcactgaactcatcaaacttagtatgctccgtagggtttgaccgagatagagagttttttgcaactgctggtgtaaataagaagataaaagtgtttgagtataatatgattgtaaatgaacaccgtgatattcactatcctgtggtagagatgtctaatagatcaaaactgagttgtatttcctggaacagttatatgaagagccatatagcatctagtgattttgagggtatagtgcaggtaagttctgtggcatgttttttataactaaattgtatttgatgcaattaccataatatccctgtattttcaggtttgggatgttactaggagtcaagtttttgttgagatgagggagcatgagcgacgtgtgtggtcggtggacttctcaattgtggacccaacaaaattggtcagtgggagtgatgatggatctgtgaagctgtgggatatgaatcaggcaattttattcttgcacctactgtatgtcagctttttaactaacgataacatggttatcgaacttgtatgtggatgtagagttgcttctcttcattgttataacacattttttgtgaactgtgcaggctgggagtattggcactattaaaacaagggcaaatgtgtgttctgtgcaatttcaacctgatactgctcgctccattgccatcggct

SEQ ID NO: 12932 - DNA, 604 bp, Zea mays
  Clone ID: GC-ZMLELIB3453052C02_FLI
gtaaataagaagataaaagtgtttgagtataatatgattgtaaatgaacaccgtgatattcactatcctgtagtagagatgtctaatagatcaaagttgagttgtatttgctggaacagttatatgaagagccatattgcatctagtgattttgagggtatagtacaggtaagctctgtggcatgctttttataattaaatttgtatttgatgcaattaccataatatccctgcaatttcaggtttgggatgttactaggagtcaagtttttgttgggatgagggagcatgagcgacgcgtgtggtcggtggacttctcaattgtggacccaacaaaattggtcagtgggagtgatgatggatctgtgaaactgtgggatatgaatcaggcaattttattcttgcacctactgtatgtcaggcttttaactaacgataacatggttatcgaacttgtatgtgaacgtaggattattttccgccattgttataacagattttttgtgaactatgcaggctgggagtattggcactattagaacaagagcaaatgtgtgttctgtacaatttcaacctgatactgctcgctccattgccatcggct

SEQ ID NO: 12933 - DNA, 985 bp, Arabidopsis thaliana columbia
  Clone ID: JC-ALXLIB327436P4G04_FLI
ctttgttttctttgcttcttctatcttcttcttctttcttcttctcgctttaatactctttgattcctctgttcgtttgatgagaattagattttaaatggcaaaagtttcgtttaaggattctctgaaagctcttgaagctgatattcaacacgctaacactgtagctttagattatcctcgggagaaggatggagcgcgtgttcaaatgaggctatcgtacactccagctgctcagtttttactttttcttgtacaatggactgattgccatcttgctggtacactcggtctgctcagagttctgatttacatgacctatgcggatgggaaaaccacaatgtcggtttatgagagaaaaacaagtattaaagatttctatgctgtgatatttccgtcgttgttacaactagaaagaggtatcacagacctggatgatcgtaaacagaaagaagtctgcaaaatacggtacagaaataaagatgagactgaaaaggtcaagctctcggagattgacatcgagagagaagaagaatgcgggatttgtatggagatgaacaacatggtggttctccctaattgtacgcattctttatgcatcaagtgttaccgcgattggcacgggaggtcagaatcatgccctttttgccgagacagtcttaagagagtaaactcaggggacttatggatgttaatggagaaatccgatacggttaatatgtatacaattgagcgggagaataagaagaggttgtttgtgtatatagagaagctacctctagtggttccagatcaagtgtttgcttcttctccttatgattgccatgtcaagtaaataagacggagaagagctttggcaaaagccgaaaccgggtctggtaaacttttatctgaatgtatatgtatataatgttttagagtagtagtaagtaatatagtgtaactatttcttggggaagtccatttctacttgcttttctttttt

SEQ ID NO: 12934 - DNA, 821 bp, Arabidopsis thaliana columbia
  Clone ID: JC-ATXLIB327403P3G09_FLI
ctctatctctctctctctttgaagcagtttgttacttcttacttttgtgtttcttcatattcttcagaagcaagcacaaggctagggatcgaagaagcggcgatcactgatcgtatctcactacgatcacattaatggatagaatgtgtggtttccgctcgacggaagactattcggagaaagcgacgttgatgatgccgtccgattatcagtctttgatttgttcaaccaccggagacaatcaaagactgtttggatccgacgaactcgctaccgctttgtcctcggagttgcttccgcgtattcgaaaagctgaggataatttctctcttagtgtcatcaaatccaaaatcgcttctcatcctttgtatcctcgcttactccaaacctacatcgattgccaaaaggtgggagcgcctatggaaatagcgtgtatattggaagagattcagcgagagaaccatgtgtacaagagagatgttgctccattatcttgctttggagctgatcctgagcttgatgaattcatggaaacctactgtgatatattggttaaatacaaaaccgatcttgcgaggccgttcgacgaggctacaactttcataaacaagattgaaatgcagcttcagaacttgtgcactggtccagcgtctgctacagctctttcagatgatggtgcggtttcatctgacgaggaactgagagaagatgatgacatagcagcggatgacagccaacaaagaagcaatgaccgcgatctgaaggaccagctactacgcaaatttggtagccatatcagttcattgaaactcgagttctct

SEQ ID NO: 12935 - DNA, 740 bp, Arabidopsis thaliana columbia
  Clone ID: JC-ATXLIB327406P4A02_FLI
gggaaaacgtctatcgggagactcctcttcgagctcatcttcttctctctctttttatctttggttgtgcgatctcctttctctttcaatctccaaggattttactgtgagatatttggcgggaaaatgtcggggaaaggtgctaaaggtttgattatggggaaacccagcggtagcgacaaggataaggacaagaagaagcctatcactcgttcttctcgagctggtctccagttcccagttggtagggtgcatcgtctgttaaagacaaggtccactgctcatggaagggttggagcaactgcagctgtttacacagcagcaatattggagtatctgactgcagaagttttggagttggctggtaacgccagcaaggacttgaaggtgaaacgtatctcgccgaggcatttgcagcttgcgattcgtggagatgaggagctcgatactctcatcaaaggaactatagctggtggtggagtcatccctcatatccacaagagtctcatcaacaaatccgccaaggaataggacttttttagttacccgctttgttctgtgttgcttttctgttttctaaatgtttttaagagttgttgtttgataagatgctagagaagctctttttaggatcgtttgctattgttcgttcgatcagcgtactttgtgttagagacgccagtcgatttatctatctttaaaaatgtattcgaatgattatccaaaaaccatttctgact

SEQ ID NO: 12936 - DNA, 450 bp, Arabidopsis thaliana columbia
  Clone ID: JC-ATXLIB327407P1A06_FLI
ttgagctagctgggaacgcagcgagagataataagaagaacaggataaaccctaggcatctatgtttagcgataaggaacgatgaggaattggggagattgcttcatggagttactattgctagtggtggtgttcttccaaacattaatccagttcttcttcctaagaaatcaacagcttcttcttctcaagcggagaaagcttctgctaccaaatctcctaagaaggcttgataaagaatagtatcgatgttgctttttggttatattcggatcttagatgaagaagaagaagaagaagaaacaacttgttttttgttttagaggatttgtgtaggtatctgaaatcttcttctctttgttttggtttgtcttatgtaaaaaccatgggaagatgattatgtttgttaacgcaatttgtaatggaaaataattaagttctgggattagt

SEQ ID NO: 12937 - DNA, 2014 bp, Arabidopsis thaliana columbia
  Clone ID: JC-ATXLIB327407P1G04_FLI
gtggtcttgttagcttagaacctatgaagattgcagagatcctcaaagatcggccatcttggttccgtgactgtaggagccttgaagttttcactatgttcccggctggtaatggtggcacaatcgagcttgtttatatgcagacgtatgcaccaacgactctggctcctgcccgcgatttctggaccctgagatacacaacgagcctcgacaatgggagttttgtggtttgtgagaggtcgctatctggctctggagctgggcctaatgctgcttcagcttctcagtttgtgagagcagaaatgctttctagtgggtatttaataaggccttgtgatggtggtggttctattattcacattgtcgatcaccttaatcttgaggcttggagtgttccggatgtgcttcgacccctttatgagtcatccaaagtcgttgcacaaaaaatgaccatttccgcgttgcggtatatcaggcaattagcccaagagtctaatggtgaagtagtgtatggattaggaaggcagcctgctgttcttagaacctttagccaaagattaagcaggggcttcaatgatgcggttaatgggtttggtgacgacgggtggtctacgatgcattgtgatggagcggaagatattatcgttgctattaactctacaaagcatttgaataatatttctaattctctttcgttccttggaggcgtgctctgtgccaaggcttcaatgcttctccaaaatgttcctcctgcggttttgatccggttccttagagagcatcgatctgagtgggctgatttcaatgttgatgcatattccgctgctacacttaaagctggtagctttgcttatccgggaatgagaccaacaagattcactgggagtcagatcataatgccactaggacatacaattgaacacgaagaaatgctagaagttgttagactggaaggtcattctcttgctcaagaagatgcatttatgtcacgggatgtccatctccttcagatttgtaccgggattgacgagaatgccgttggagcttgttctgaactgatatttgctccgattaatgagatgttcccggatgatgctccacttgttccctctggattccgagtcatacccgttgatgctaaaacgggagatgtacaagatctgttaaccgctaatcaccgtacactagacttaacttctagccttgaagtcggtccatcacctgagaatgcttctggaaactctttttctagctcaagctcgagatgtattctcactatcgcgtttcaattcccttttgaaaacaacttgcaagaaaatgttgctggtatggcttgtcagtatgtgaggagcgtgatctcatcagttcaacgtgttgcaatggcgatctcaccgtctgggataagcccgagtctgggctccaaattgtccccaggatctcctgaagctgttactcttgctcagtggatctctcaaagttacagtcatcacttaggctcggagttgctgacgattgattcacttggaagcgacgactcggtactaaaacttctatgggatcaccaagatgccatcctgtgttgctcattaaagccacagccagtgttcatgtttgcgaaccaagctggtctagacatgctagagacaacacttgtagccttacaagatataacactcgaaaagatattcgatgaatcgggtcgtaaggctatctgttcggacttcgccaagctaatgcaacagggatttgcttgcttgccttcaggaatctgtgtgtcaacgatgggaagacatgtgagttatgaacaagctgttgcttggaaagtgtttgctgcatctgaagaaaacaacaacaatctgcattgtcttgccttctcctttgtaaactggtcttttgtgtgattcgattgacagaaaaagactaatttaaatttacgttagagaactcaaatttttggttgttgtttaggtgtctctgttttgttttttaaaattattttgatcaaatgttactc

SEQ ID NO: 12938 - DNA, 661 bp, Arabidopsis thaliana columbia
  Clone ID: JC-ATXLIB327407P2A01_FLI
catagaatcgtcgctgatcgaagtgattctgctcgattttgctctcacttgaaagatctgagtgatttgtttcagatcttctccgaaaggatgaagcggattggagataaagaaatcgacggttctgggtctcaaaatcaacatccagtgggctcccctcgaaacgaattacaagggcaatctccaaaacctggaaacggtaacaccaaagatgctttgacaaccgatgatgctttggcctacttaaaggaaataaaggacgtgtttcatgatcaaaagtacaaataccatctgtttctcgagattatgagcgacttcaaggcacaaaggaccgatacttctgtcgtgattgcacgagtcaaagacctgttaaagggacataaccatttaattctcgtatttaacaaattcttgccacatgggtttgaaattactcttgacgatgaggatgaggattaaggatcaagaagctagcatttgaatgagacggatatatcaaattagctctctgttcgaccttttttttaatatcttcttagctctactacaagttacaattggttatttttagtattggagaaacaggttgtgttgttacttctgctcagaattatgaatgttttttctcatagatcaaaagatctctgaagtctgacatgtg

SEQ ID NO: 12939 - DNA, 590 bp, Arabidopsis thaliana columbia
  Clone ID: JC-ATXLIB327407P2C07_FLI
gttcacccactactattcgccgttcgcttttccctcgccgtcgaaatcaacatggcgccgaagaaggataaggttccgccaccgtcatcgaagccggcgaaatccggaggtggaaagcagaagaagaagaagtggagcaagggaaagcaaaaggagaaggtgaacaacatggtgctgtttgatcaagctacttatgacaagcttctcactgaagctcccaagttcaagctcatcaccccttccattctctctgaccgtatgaggatcaatgggtcgctagcaaggagagcgattagggagctaatggccaaaggtgtgatcaggatggtcgctgctcactcgagccagcagatctacactcgtgccaccaacacctaagatgtttggtttctttatccacctaagatgtttggcttctttttcttatctcttgttgtttgattcttcaggaacttgttagaatcttttgtttcgtattccgtttttttgagatatatggttatttaaaacgcatcaagacttctaaaattgagtcaatcctttgatatatccgttctagaattcggtaatggagttgttccggtttagtt

SEQ ID NO: 12940 - DNA, 1476 bp, Arabidopsis thaliana columbia
  Clone ID: JC-ATXLIB327407P2D04_FLI
tttgtggcggtggaggagacttcgggagggaagagaagagagattgagcttgttgttggtggagaagacgaagttgaggaggataggcggaggagtcgtcggagacatgttttcgaggggcttgatttaagtgagatagagatgaagacggagaagaaagagagaggagaagaagttggacggatgagtatttgttctccgccgaagaatgctttgttgttgatgcggtgtagatctgatccggttaaggttgcggcgttagctaaccgggttcgtgaaagacagttgtcgttaaacgacggcgtatacacagaggaggaagaagatgagagaagaagaaggtttgagctggaaattgaagataagaaacggatcgacttgtgtgagaaatggatctctggtgagactactgtggaaacagaagaagtttcagtagcagttgcagaagcagaagcagaagcagaagcagaagctcctttgccttcaaatccagctacagaggaagaagaaagagtcaaagttgtggaagattcgattgttgaagaagaacaagaagcttcgaaaattctggattcgtttgaggaagaaatagaagctacgatcatgaaaaaaattgaagacgaaatcagaaacgctatagaagaagaggagaaacttgctgagatggaagaattagcggttgtggcggtggctgagacggaggaggtagaagaaagcaaagaggttgttcctgattgtatacctcaaaatgaggaaagatccgaacaaggaaaccgggaacccgacccgagtccggaagtggtgatgagaagaagtctacaagaggaaacaacggagaaagagaagacgacggcgacgccgtataaggtgttaccggattgtttgctgcttatgatgtgtgaaccaaagctctcaatggaagtctctaaggagacttgggtttgcagtacagatttcgtcagatgtttaccaggaagacctccggcgaagaagataccaccagaagccgtcggagacaatcatcatcatcatcaacccaagaagcgaatcgtcacagccgttgattccaacgcatcctctcgccggcggtcaatcgatagaccaccacttcacctacagccgccacggtcatcgtgttcatacccagcagctccaccgataataacggcagctgcggcggttggggaacagagggtagccggagctaataaggtacagccaccagtgctgccacgttgcaaatcggaaccgaggaagtcagcgtcgaagctagcgccggaagcttgtttctggaaaaataggaagcttgagccacaccctccggcaaccgtcggtgtcggcggcgccggagtagggttctagaagaaggagacgtgagtgggaataaaggaaactatttgggtgtaatagtaatttcagaatactatttgtccttgtttgtaaatttgttttgttagtcataattcattttctatc

SEQ ID NO: 12941 - DNA, 1239 bp, Arabidopsis thaliana columbia
  Clone ID: JC-ATXLIB327407P2G12_FLI
tagaaatccacaatatctttcttcacactttctttcactttcccgggaaaacagccgagaaaataaaagaaacgaagaaaagtttgttcctttgtggggatcaaagaagaatgtactcggcgattcggtcttcgcttcctctagatggcagcttgggagactactctgacggaaccaatcttcccatcgacgcttgtctggtcctaaccactgaccccaagcctcgccttcgttggacctctgagctccatgaaagattcgttgacgccgtcactcagctcggcggacccgacaaagcaacgcctaaaactataatgagaacaatgggagtgaagggtctcactctttaccatctcaaatctcatcttcagaaattccgcttggggaggcaatcttgtaaagaatcaattgacaactctaaggatgtttcttgtgttgcggagagtcaggacactggttcatcttcaacatcatccttaagattggctgctcaagaacagaacgagagttaccaggtcactgaagctttgcgtgcccagatggaagtccaaagaagactacacgagcaactagaggtgcaaaggcgactccagttaaggatcgaggcacaagggaagtacctgcaatcaattctagagaaagcttgcaaggctatagaggagcaagctgttgcatttgctgggttagaggcagctagagaagagctttcagagctagccataaaggcctccatcaccaatgggtgccaaggaacaacaagcaccttcgacacaaccaaaatgatgattccatccttatccgagcttgcagtagcaatagagcacaagaacaactgttcagcagagagctctctgacttccagcactgtaggaagtccggtatcagctgcgttgatgaagaagagacaacgaggagtgtttggaaatggagatagtgtggttgttggtcatgatgctggatgggttatgcctagtagtagcattggatgaagttagcaagagagagagagagagcgagaccagattttagcttatttaattttgctatgttgtatttaactctaaactctgtcatcaaacttgtcttagcgtctatgtatatatttgttgaatctgtagcctctcttttagtttgtgtatttgcttcaactttttctaagcttgccttcttttttcttttttggacaaacctaaatatagaatttatgtaattgtataacataaaaaatactcattaaat

SEQ ID NO: 12942 - DNA, 1259 bp, Arabidopsis thaliana columbia
  Clone ID: JC-ATXLIB327408P1D11_FLI
gcgcagaagttgatctcaacaagtgtgagccttggcaacttcccgggagagctaagatgggagagaaagaatggtacttctttagcctccgtgaccggaagtatccgacgggactgagaactaacagagcaactgaggctggttactggaaagctaccggaaaagacagagagatctttagttcaaagacttgtgcacttgttgggatgaagaagactcttgtcttttacaaaggaagagctccgaaaggagagaagagtaattgggttatgcatgaatatcgtcttgaaggcaaattctcttaccatttcatctcaagaagctccaaggatgaatgggtgatctctagggttttccagaaaaccactttagctagcaccggagccgtctccgaaggaggaggaggaggaggagcaactgtgagcgtaagcagcggtactggtccatctaaaaagacgaaagtaccctcaacaatctcaagaaactatcaagaacaaccaagctctccttcctccgtctcactcccacctctcctggatccgaccactaccctcggctacaccgacagcagttgctcctacgacagccgtagcaccaacacaaccgtcacagccagcgcaataaccgagcacgtgtcctgtttctccactgtccctactactactacggccttgggcttagacgttaactcattcagccgtcttccaccgccgctagggtttgactttgacccttttcctcgtttcgtttctagaaacgtctcgactcaatctaacttcagatcgttccaagaaaacttcaatcaatttccttactttggatcgtcttctgcatcgactatgacctccgccgttaatctgccttctttccaaggcggcggaggcgtctccgggatgaattactggctaccggcgactgccgaagagaatgagtcaaaggtcggtgtgcttcatgctggacttgactgtatttggaactactgatcacaaaagaggtgacttataattgttcccgttagggttttatttatgtatttctaggatgattatggtattatgaaatgtgtgtaccgaggagcttaatattgcacttagcttgatgttccgcttaattctctagttttaagtttatccggttgtgttaattaggaggtaatatgcaaggaaaatgttttctagactatgaacgtgcatatgtataagctatgctcgtttttgtaatgtttgacattatgttaatttcatggctttttcatgttt

SEQ ID NO: 12943 - DNA, 1889 bp, Arabidopsis thaliana columbia
  Clone ID: JC-ATXLIB327408P2A09_FLI
ctcacttccctcattggacctctctaactctcctctcttaccttctcctgtttaaattcttctcctttctttccacaatttctgtctaaccaattccaacaccaaaaaattccatttcttgacgatgaaacgaagccatcaagaaacgtctgtagaagaagaagctccttcaatggtggagaagttagaaaatggttgtggtggtggtggagacgataacatggacgagtttcttgctgttttgggttacaaggttcgatcttcagacatggcagatgttgcacagaagcttgaacagcttgaaatggtcttgtccaatgatattgcctcttctagtaatgccttcaatgacaccgttcattacaatccttctgatctctccggttgggctcagagcatgctctcggatcttaattactacccggatcttgacccgaaccggatttgcgatctgagaccaatcacagacgacgatgagtgttgcagtagcaatagtaacagcaacaagaggattcgactcggtccttggtgtgactcagtgaccagcgagtcaactcgttccgtggtgcttatcgaggagacaggagttagactcgttcaggcgctagtggcctgcgccgaggcggttcagctggagaatctgagcctcgcggatgctctcgtcaagcgcgtgggattactcgcggcttctcaagccggagccatggggaaagtcgctacctacttcgccgaagccctagctcgtcgaatttaccggattcatccttccgccgccgccattgatccttccttcgaagagattcttcagatgaacttctacgactcgtgtccctacctgaaattcgctcatttcacggccaatcaggcgattctagaagctgttacgacgtcgcgtgtcgtacacgtaatcgatctagggcttaatcaaggtatgcaatggccggcgttaatgcaagccttagctctccgacccggtggtccaccgtcgtttcgtctcaccggcgttgggaatccgtcgaatcgagaagggattcaagagttaggttggaagctagctcagctggctcaagccatcggcgtcgaattcaaattcaatggtctaacgacggagaggttatccgatttagaaccggatatgttcgagacccgaaccgaatcggagactctagtggttaattcggttttcgagcttcacccggttttatcccaacccggttcgatcgaaaagctgttagcgacggttaaggcggttaaaccgggtctcgtaacagtggtggaacaagaagcgaaccataacggtgacgttttcttagaccggtttaacgaagcgcttcactattactcgagcttgttcgactcgctcgaagatggtgttgtgataccgagtcaagaccgagtcatgtcggaggtttacttagggagacagatattgaacttggtggcgacggaaggaagcgataggatcgagcgacacgagacgctggctcagtggcgaaaacgtatgggatccgccgggtttgacccggttaacctcggatcagacgcgtttaagcaagcgagtttgctattggcgttatctggcggtggagatggatacagagtggaggagaacgacggaagcctaatgcttgcgtggcaaacgaaacctctaatcgctgcatcggcgtggaaactagcggcggagttgcggcggtagatacgtcgtcataaagaggagaagaaaaaagacttagcgaacgtgaccttatgtttttattttactttaacttaccccagtagtttcgttttgtgacaatttcgcccgaaatattccgtgccttatacttttgggacccagttggttcgttggtcgtggagattcgagaacgaggaacatgtgtgtatgtaac

SEQ ID NO: 12944 - DNA, 2857 bp, Arabidopsis thaliana columbia
  Clone ID: JC-ATXLIB327408P2F07_FLI
gtctgattgcggaaaaagcagagagagagagaaagttcgagcggaagagaagcggaaagctcgaggagtcatcaatggtgacggacgatagcaactcctctggacgaatcaagtctcatgtagatgatgatgatgatggtgaagaagaagaagatagactcgagggtttggaaaacagattaagtgagcttaaaaggaaaattcaaggagaaagagttaggtctattaaagagaaatttgaggctaatagaaagaaagtggatgctcatgtttctcccttttcatctgctgcatcgagccgagctaccgcagaggataatggaaatagcaatatgctttcttcgagaatgagaatgccactctgcaagttaaatggtttttctcatggtgtgggagatagagactatgttcctactaaggatgttatatcagcaagtgtcaagcttcctattgctgagagaataccgccatacactacctggatatttttggacagaaatcaaagaatggctgaagatcagtctgtggttggtcgaagacaaatctactatgaacaacatggtggtgagacgctaatatgcagcgatagtgaggaagaaccagaacctgaggaggaaaaacgtgaattttccgagggtgaagattccattatatggttaattgggcaggagtatggcatgggtgaggaagtgcaggatgccctttgccagttgctaagcgtagatgcttctgatatcctggaaagatacaatgagctcaagttgaaggataagcagaataccgaggaattttctaattccggattcaagctgggaatatctctggaaaagggccttggtgcagctctagattcttttgataatcttttctgccgccgttgcttggtatttgactgtcgtctgcatggatgttctcagcctttgattagtgctagtgaaaaacagccttattggtctgattatgaaggtgataggaaaccctgcagcaaacattgttacctccagctcaaggcggtcagagaagtaccagaaacatgcagtaattttgcatctaaagcagaagagaaagcttcagaagaggaatgcagcaaggctgtctcctctgatgttccccatgctgctgctagtggtgtcagtctgcaagttgagaagactgatattggtatcaagaatgtagattcatcctctggtgtagaacaagagcatggaattagaggaaagcgtgaggtcccaattctaaaagactccaatgatctgcctaatttatcgaacaagaaacagaagaccgcagcctcagatacaaaaatgtcatttgttaattctgtccctagcttagatcaggcattggatagcacaaagggtgatcaaggtggaacaactgacaataaagtaaacagagactcagaagctgatgcaaaagaagtaggtgagcctattccagacaattcggtccatgatggtggttcctcaatttgtcagccacaccatggtagtggaaacggagcaataatcattgcagaaatgtctgagacaagtcgaccatctacagagtggaatcctatcgagaaggatctttacttgaagggagtcgaaatctttggaagaaacagctgtcttattgcaagaaacctgctttctggcttgaagacatgcctagatgtgtccaattacatgcgtgaaaacgaagtttcagtttttcgaagatctagtaccccaaatttgctgttggatgatggcaggactgacccagggaatgataatgatgaggtgcctccaaggacaagattgttccgtagaaaaggcaaaacccggaagctaaaatactctacaaagtctgctggtcatccgtctgtctggaaaagaatagctggtggcaaaaaccagtcctgtaaacaatacacgccgtgtggatgcctgtcaatgtgcggaaaggattgcccttgtctaactaatgaaacttgctgcgagaaatattgcgggtgctcaaaaagctgtaaaaatcgtttccgaggatgtcattgtgcaaagagtcaatgcagaagtaggcagtgtccctgctttgctgctggcagagaatgtgatccagatgtttgcagaaattgctgggttagttgtggagatggttctctcggtgaagcaccaagacgcggagaagggcaatgcggaaacatgagacttctcctgaggcaacaacagaggatcctattgggaaagtctgatgttgctggatggggtgcttttctaaagaactcggtcagcaaaaatgaataccttggagaatacaccggtgaattgatctcacaccatgaggcggataagcgtgggaaaatatatgaccgggcaaattcgtccttcctctttgacttgaatgatcagtacgtcctcgatgctcaacgcaaaggtgacaagctgaaatttgccaatcactcagctaaacccaattgctacgctaaggtgatgtttgtagcaggagatcacagggtcgggatttttgcaaacgaacgaatagaagctagcgaagagcttttctatgactatagatatggaccagaccaagcaccagtgtgggctcgcaaacctgaaggctccaagaaagatgattcagccattactcatcgtagagccagaaagcaccaatctcattgatgattactggctaagagaagtaacttttataaaaataacttatagagttgtgagagatgatatttgaagtttgataacttaagcttgtctttattaattaattattatagagttgagattttattttattttgacatcgagtttggactttgtataggtgataaaacaatttatgaattattggggtcaataagtaaaaatgtatcatttcg

SEQ ID NO: 12945 - DNA, 748 bp, Arabidopsis thaliana columbia
  Clone ID: JC-ATXLIB327408P2H10_FLI
tcggaggattagggtttcaacggagactcactagtcgatctccgatcctttcttctacccgcccgaaatccgtcgaaacttctcttctttaccattgatttgcctcgtctcagctcaattctcttccgttgctgcttcgtttagttgttgcttcgcttcagtactctggtggtgggagagatgaatcacggccaacaatctggtgaggcaaagcatgaagatgatgctgctcttacagagttccttgcttctctgatggattatactcctactattcctgatgatttagtggagcactacttggctaagagtggatttcagtgccccgacgtacgattgtaggataaggctagttgctgtggctacacaaaagtttgttgcagatgttgccagtgacgcccttcagcattgcaaggctagaccagcaccagttgtgaaagacaaaaaacagcaaaaggataagcgtttggtattgacaatggaagatctttcaaaagctttgcgtgagtatggtgtgaacgtgaagcatccagaatattttgctgatagcccttcgactggaatggaccctgcaacaagggacgaatagaaaccaggaattcctcaaaatctttgcctagtaaggacggtcatgtgtctcagatccctgattctctgttgtgtttcagttaaaaacaaaactcacttgtcttgctagtcctcaattactacattacatgtatattcgtttgttgtttgttctctggtg

SEQ ID NO: 12946 - DNA, 1004 bp, Arabidopsis thaliana columbia
  Clone ID: JC-ATXLIB327408P3B01_FLI
aatatctctcttcctctgtttcttcgccattctctcagcttttctccttcttcttcgtctttgtcagagtgaatggagctgtggacagaagctagagccttaaaggcaagtctaagaggagaatctactatatctctcaaacatcaccaagtgattgtgtcggaagatttaagccgaacttcttccttgccggaagatttctccgttgagtgtttcctcgatttctcagaaggtcaaaaagaagaagaagaagaagttgtctctgtttcttcttcacaagagcaagaagaacaagaacatgattgtgtctttagttcacaaccttgcatctttgatcaacttccttctttgccggatgaagatgtggaagagcttgaatgggtatctcgtgttgtggatgattgttcatcaccagaagtttcacttctcttaacacaaacacataaaaccaaaccaagcttctcaagaattccggttaaaccaagaaccaaacggtctcggaacagtttaaccggtagtcgtgtttggccactcgtttcaaccaatcatcaacatgcagcaacagagcagttgaggaagaagaaacaagaaactgtccttgtgtttcaacgaagatgcagccattgtggcacaaacaacacaccacagtggagaaccggtccggtcggtccaaaaaccttatgtaatgcatgtggagtccggtttaagtctggtaggctctgcccggaatacagaccggcggatagtccgacgttctcgaatgagattcactcaaatcttcataggaaggttctggaattaagaaagagtaaagagttgggtgaagaaacaggtgaagctagtactaaatcagacccagtcaaatttggcagcaagtggtagataagacttaggtaaaacctactttttgtaacattatctgtagtgttgtaatttaacaacttgcttcttaacattttgaaactgtttcaggaactagtcttaagtaaacaatggttttctat

SEQ ID NO: 12947 - DNA, 1022 bp, Arabidopsis thaliana columbia
  Clone ID: JC-ATXLIB327408P3C12_FLI
cagcagttaagtggtactgagataaatgatatagtttctcttcaagaacagtttctcattacccaccttctcctttttgctgatctatcgtaatcttgagaactcaggatcaatggaggaaggtgggagtagtcacgacgcagagagtagcaagaaactagggagagggaaaatagagataaagaggatagagaacacaacaaatcgtcaagttactttctgcaaacgacgcaatggtcttctcaagaaagcttatgaactctctgtcttgtgtgatgccgaagttgccctcgtcatcttctccactcgtggccgtctctatgagtacgccaacaacagtgtgaggggtacaattgaaaggtacaagaaagcttgttccgatgccgtcaaccctccttccgtcaccgaagctaatactcagtactatcagcaagaagcctctaagcttcggaggcagattcgagatattcagaattcaaataggcatattgttggggaatcacttggttccttgaacttcaaggaactcaaaaacctagaaggacgtcttgaaaaaggaatcagccgtgtccgctccaaaaagaatgagctgttagtggcagagatagagtatatgcagaagagggaaatggagttgcaacacaataacatgtacctgcgagcaaagatagccgaaggcgccagattgaatccggaccagcaggaatcgagtgtgatacaagggacgacagtttacgaatccggtgtatcttctcatgaccagtcgcagcattataatcggaactatattccggtgaaccttcttgaaccgaatcagcaattctccggccaagaccaacctcctcttcaacttgtgtaactcaaaacatgataacttgtttcttctcctcataacgattaagagagagacgagagagttcattttatatttataacgcgactgtgtattcatagtttaggttctaataatgataataacaaaactgttgtttctttgcttaattacatcaacatttaaatcc

SEQ ID NO: 12948 - DNA, 1135 bp, Arabidopsis thaliana columbia
  Clone ID: JC-ATXLIB327408P3G11_FLI
aaagaaaggaactccatggacagaggaagaacacaggatgttcttattaggtttacagaagctgggtaaaggtgattggagaggtatctcaagaaactatgtgaccactaggacacctacacaagttgctagccatgctcagaagtatttcatcagacaatccaatgtctctcgtcgcaaaagacgttctagtctctttgatatggttcctgatgaggttggagatattcccatggatttgcaagaaccagaggaagataatattcctgtggaaactgaaatgcaaggtgctgactctattcatcagacacttgctcctagctcacttcacgcaccgtcaatcttggaaatcgaagaatgtgaatcaatggactccacaaactctaccaccggggaaccaaccgcaactgccgctgctgcttcttcttcttccagactagaagaaaccacacaactgcaatcacaactgcaaccgcagccgcaactacctggctcattccccatactatatccgacctacttttcaccatattacccgtttccattcccaatatggcctgctggttatgttcctgaaccacccaagaaagaggaaactcatgaaattctcagaccaactgctgtgcactcgaaagctcctatcaatgttgacgagcttcttggtatgtctaagctcagccttgcagagtccaacaaacatggagaatccgatcagtctctttcattgaagctaggtggcgggtcatcttcaagacaatcagcatttcacccgaatcctagctctgatagttcagacatcaaaagcgtgatacacgctttataaaagacctgaggaagtgatggtctaaaatgggatctggtttggggtttacaggttagttgttggtcacagtaacttaaataagtttttctttgttaggttgtttaacttgggtaggatgttttagttcagctttgatcattagggaaaagaaaaaagaaaaaaaaaagggagaaaaacaaattattattttttgcttacatttctttatatttgtatgcttttattttgactctaggatgcgttaattttcgtttaatctgtactaaaaattagaatttattagttttgaataaataaaatcacagtttgttt

SEQ ID NO: 12949 - DNA, 485 bp, Arabidopsis thaliana columbia
  Clone ID: JC-ATXLIB327408P4A09_FLI
tgagaagtcaaaggctgagaacagggcacaaaagaagatctctgatgtgcatgcttgggaaaatagcaagaaagcagccgtagaagctcaacttaggaagatcgaggaaaaattagagaagaaaaaagcgcagtacggtgagaaaatgaagaacaaagtagctgcaatccacaagttagcagaagagaagagagcaatggttgaagctaaaaaaggagaagagcttctcaaagctgaagaaatgggtgctaagtatagagccactggtgtagtaccaaaggcaacgtgtggatgtttctaagcctttattgaatttgtatctttgtaacaattcatctctgtttctttcttcttcttttgtttttgtgtgattcaacaactctttttagtttttgttatttgtttggtcgtttgtgtcttgtttacatattgggtgattgtgtgtaaaagtgaaagattaatggagtataattgtatgaagcatc

SEQ ID NO: 12950 - DNA, 1780 bp, Arabidopsis thaliana columbia
  Clone ID: JC-ATXLIB327408P4B03_FLI
aaattccaattttctcggatttttatttcttatatacaaatccctaaaaccctatagccctctttcttcgtcacctactactactaactccaagctcaagctcctctgtttcttctgcttgtggttaaaaatcatttcagacacagtgcttttgatgactctctgcaacaaacaacagcagctgcagacaaagcttatacgaagctgtatctactgactttgatggtgaaatatcaaaaaccctaaattaattttaaaaaaaaacacattttttttcttcttttggtttttcctctgagggtattcatcatcaatgcttacaaagtacagtgggtaaacaaaacaaaaacaaaaacccatttttttctccttctttaaatcccaaaccaaccctaaagttttgatttttaattttgggggtaaccaaaaaaaaacaaaaccctaattttttttctttagtgatgagattattggtgatgatgaaatgattggagatctaatgaagaataacaacaatggcgacgttgtggataacgaagtgaacaaccggttaagccggtggcatcacaattcttcccggataattagggtttcacgagcttccggtggtaaagatcgacacagcaaagtcttgacttctaaaggaccacgtgaccgtcgtgtccggttatcagtctccaccgctcttcaattctatgatcttcaagatcggttaggttatgatcaacctagcaaagctgttgaatggttaatcaaagctgctgaagattcaatctctgagcttccttcactcaacaacactcattttccgaccgatgacgagaatcaccagaatcagacattaacaacagttgctgctaattccttgtctaaatctgcttgtagtagcaattcagacacgagcaagaactcttctggtttgtctttatcaagatcggagcttagagataaagctagagagagggctagagagagaacagctaaagagaccaaggaaagagatcataaccacacttcgtttacggatttgttaaattccggttcagatccggttaactcaaaccggcaatggatggcttcagctccttcttcatctccaatggagtatttcagttcgggtttaattctcgggtcgggtcaacaaacccatttccctatttcaacaaattctcatcctttctcatcaatctccgatcatcatcatcatcatcctcatcatcagcatcaagagttttcattcgttcccgaccatttgatatcaccggcagaatccaacggcggagcattcaatcttgattttaatatgtcaacaccctccggcgccggagctgccgtctccgccgcatcaggtggtggcttcagtggtttcaacagggggacccttcagtccaattcaacaaatcagcatcagtcattcctcgctaatctacagaggtttccaacatcagaaagtggaggaggtccacagttcttattcggtgcactgcctgcagagaatcaccaccacaatcaccagtttcagctttactatgaaaatggatgcagaaactcatcagaacataagggtaaaggcaagaactgatgatattaattattgcatctttggttttgttcaaatgctcattttgtatgtttatctttggtttatttcaaaacaaatgttaatctctttcgttgtctgatgtgtgttagggttttgttttatgtattgagggtctttggaaatctttttgcattgtgcttgtaatgttgtatttgtgataatagcattttgtttgtg

SEQ ID NO: 12951 - DNA, 802 bp, Arabidopsis thaliana columbia
  Clone ID: JC-ATXLIB327408P4H04_FLI
gtccatctctcaagacgtctccgccgtaatcatgacgaacgcttcttcagcgccaccgccgccgcaggcaaaacgcagacttgggagaacgagtaggtccgctatgaaaccaaaaatccacagaacaaaaactcgtaaaacgaagaaaacgtctgcaccaccggagcctaacgccgatgtagctggggctgataaagaagcattaatggtggagtcaagtggagccgaggctgagctaggacgaccatgtgactactatggagatgattgtaacaaaaatctcatgagcattaatggcgataatggagttttaacgtttgatgatgatatcatcgatcttttgttggacgagtcagatcctggccacttgtacacaaacacaacgtgcggtggtgatggggagttgcataacataagagactctgaaggagccagagggttctcggatacttggaaccaagggaatctcgactgtcttcttcagtcttgtccatcggtggagtcgtttctcaactacgaccaccaagttaacgatgcgtcgacggatgagtttatcgattgggattgtgtttggcaagaaggtagtgataataatctttggcatgagaaagagaatcccgactcaatggtctcgtggcttttagacggtgatgatgaggccacgatcgggaatagtaattgtgagaactttggagaaccgttagatcatgacgacgaaagcgctttggtcgcttggcttctgtcatgatgatattgattgatccgttatgtaatcttttttgtgcattcacagtttgaatct

SEQ ID NO: 12952 - DNA, 1450 bp, Arabidopsis thaliana columbia
  Clone ID: JC-ATXLIB327409P1A09_FLI
tgtatttcaagtttcatgagcgtttgccaccacaacattgtcttttcgggttaatttcttcttcttcttccttttcttactaaattctcttagggttttagtcatacttaatggcttccaattcggagaaaaatcctcttctttcagatgagaaacccaaatcgacggaggagaataagagttctaagccggaatcagcttctgggagttcaacttcatcagctatgcctggcttgaatttcaatgcttttgatttctctaatatggctagtattctcaacgatcctagcatcagagaaatggctgagcaaatagctaaagatcctgcgtttaaccaattggctgagcagcttcagagatctattcctaacgctggccaggaaggtggtttccctaactttgatcctcaacagtatgtcaatacaatgcaacaggttatgcataaccctgagtttaagacaatggccgagaaacttggtaccgccttagttcaggatccacaaatgtctccttttttggatgctttctcgaatcctgaaacagcagaacactttactgagcgtatggcgcggatgaaagaagatccagagttgaaacctatactagatgagattgatgctggtggtccttctgccatgatgaagtactggaatgatccagaagtgctgaaaaagctgggtgaagcaatgggtatgcctgttgctggcttaccagaccagactgtttcagctgaacctgaggtagcagaagaaggtgaagaagaagagtctattgttcaccaaactgccagtcttggtgatgttgagggtttgaaagctgccttggcatctggtggtaacaaagatgaagaagattctgaaggaaggacagcattgcattttgcttgtggatacggcgagttgaaatgtgctcaagttcttatcgatgctggagcaagtgttaatgcggttgacaaaaacaagaacacacctctgcattatgctgctggttacgggaggaaagagtgtgtaagccttctcctggagaatggtgctgcagtcactctgcaaaacctagacgagaagacgccaattgatgtagcgaagctcaacagccagctggaggtggtgaagctgcttgagaaggatgctttcctttgagctctgctggttaaaggaaagctctaagctcatattgtctttgaggcatttgtcttgtgtgtgtcctgaaccagtttcacaggctttttgtgtacactttttattagttcctctcttcttctaaatttgtctcttatgttgttttaaaagtcaataaagaaagaaatagcaatcaatgatttaatttatgattatattctttatttcgtcgacctctacagaatgattcaatttggaagaatcattctggtttggaggatatgtaagaaaaactacttgatctccaagttattccattcttctgttactgt

SEQ ID NO: 12953 - DNA, 2447 bp, Arabidopsis thaliana columbia
  Clone ID: JC-ATXLIB327409P2D06_FLI
tttcccctgaaaccgttcttgtctctctctctctctctctctctcttcttctctgctcaagacaagaacttgatgttcatgtcttgaaacttaacaaagtattgatctttccttttaagtaaagaatttgggggttacacaacttcgtctagatggagcaagagaaaagcttggatccacaactatggcatgcttgtgcaggatcaatggttcaaatcccttcactgaattcaacggttttttacttcgctcaaggccacacagagcacgctcacgcgcctcctgattttcacgcgccgcgcgttccacctcttatcctctgtcgtgtcgtctccgtgaagttcctcgccgacgctgaaacagacgaagtttttgctaaaattacgcttttgccacttccgggaaacgacttggatctagaaaacgacgccgttttgggtctaactcctccttcttctgacggtaacggtaacggtaaagagaaaccggcgtctttcgctaaaacgttaacgcagtctgacgctaataacggcggtggtttctccgttccacgttattgcgccgagacgattttcccgcggcttgattactcggcggagccaccggttcaaaccgtgattgctaaagacatccacggcgagacttggaaattccggcatatttacagaggaacacctcgccgtcatctcctaaccaccggttggagcactttcgttaaccagaagaaactaatcgccggagactcaatcgtcttcctccgttctgaatccggtgacctctgcgtcggaatccgccgcgctaaacgcggcggtctcggatctaacgcaggatccgacaatccttaccctggattctccggtttcctccgtgacgacgagtcaacaacaacaacatcgaagctaatgatgatgaaacgcaacggaaacaacgacggaaacgccgcggctacagggagggttagagtagaagcagtagcggaagcggtggcgcgtgcagcgtgtggacaagcgtttgaggttgtttattatccacgcgctagtacaccggagttttgcgtaaaagcagctgatgttagatcagcaatgaggataagatggtgtagtggtatgcgttttaaaatggcgtttgaaacagaggattcttctagaatcagttggtttatgggtactgtctccgccgttcaagtcgctgatccaattcgttggcctaattcaccatggcgtctccttcaggtagcttgggacgaaccggatttgttacaaaacgttaagcgggttagtccgtggttagtcgaattggtatcgaacatgcctacaatacatttatctccattctctccgaggaagaagattaggattccgcagccatttgagtttccattccacggtactaaattcccgattttctccccgggattcgccaacaatggcggtggcgagtccatgtgttatctgtcaaacgacaacaataatgctcctgcaggaatacagggagccaggcaagctcaacaactcttcggatcaccatctccgtctttgttgtctgatctcaatcttagtagttacaccggtaacaacaagttacattctccggcgatgtttctatcgagtttcaacccgaggcatcatcattatcaggctagggatagtgagaatagtaataacatttcgtgttctttaactatggggaatcctgctatggttcaggataagaagaagtctgttggttcggttaagactcatcagttcgtgttgttcggtcaaccgattttaaccgaacagcaagttatgaaccgaaaacggtttttggaagaagaggcggaagcggaggaggagaaaggtttagtggctcgtgggttaacatggaattatagtttgcaaggacttgagacgggtcattgtaaagttttcatggaatctgaggatgttggacgcacactcgatctctcggttattggctcgtaccaagaattgtaccggaaattggctgagatgtttcatatagaagagaggtcggatttgttgactcatgttgtgtaccgggatgcaaatggtgttatcaaacgtattggagacgaacctttcagtgatttcatgaaagcaactaaacggctaacaatcaagatggatattggtggcgacaacgtgagaaagacgtggataaccggaatcaggactggtgaaaatggtatagacgcttctacgaagactggtccgctcagcatcttcgcttgaacttgaagcatattgaggaataagcagtggcctttgttttgaacctaattttatttctgtctttaattctcttttttccctattttaaatcctttttttgctggtcttttgtgtgtaacaaaccattcccaagtgttaccaaaagtactctaattggtatttgaatttatttgttttggttgcaagttgtatatgataatcaaagaacctgcc

SEQ ID NO: 12954 - DNA, 1317 bp, Arabidopsis thaliana columbia
  Clone ID: JC-ATXLIB327409P2G08_FLI
gcaaaaacaaaaccaacaaggaacttgtctctctctctggctctctttctcttaacgtgatcataacgtgattcgaaaattggatatagataggtttcttgttggatcttgatccctctggaaaaggaggggagaatagcagttcatgatgggattttgtatctgcccgttggagtcacctgcgagattactatggagtacaagcttcttccgccataagatcatgatcttctaatccttcctacttcttcccatctttttaatcatcttctcgctatctctgcttcctctttctctctgtttcctctttctcagaactcagaagtagttgttgttttatttctgttgatcaaaaatggaatccaattcgtttttcttcgatccatctgcttcacacggcaacagcatgttcttccttgggaatctcaatcccgtcgtccaaggaggaggagcaagatcgatgatgaacatggaggaaacttcgaagcgaaggcccttctttagctcccctgaggatctctacgacgatgacttttacgacgaccagttgcctgaaaagaagcgtcgcctcactaccgaacaagtgcatctgctggagaaaagcttcgagacagagaacaagctagagcctgaacgcaagactcagcttgccaagaagcttggtctacagccaaggcaagtggctgtctggtttcagaatcgccgagctcgttggaaaacaaaacagcttgagagagactacgatcttctcaagtccacttacgaccaacttctttctaactacgactccatcgtcatggacaacgataagctcagatccgaggttacttccctgaccgaaaagcttcagggcaaacaagagacagctaatgaaccacctggtcaagtgcccgaaccaaaccaacttgatccggtttacattaatgcggcagcaatcaaaaccgaggaccggttaagttcagggagcgttgggagcgcggtactagacgacgacgcacctcaactactagacagctgtgactcttacttcccaagcatcgtacccatccaagacaacagcaacgccagtgatcatgacaatgaccggagctgtttcgccgacgtctttgtgcccaccacttcaccgtcgcacgatcatcacggtgaatcattggctttctggggatggccttagaaaaccactctgataataaatgtgtgtttatttaagttcaagagtcatcttcttgttgtttccatgttgacgataattgttgactcgtggaataattccgctgttcaacggtatttttatcagttgcattatatgcttttatg

SEQ ID NO: 12955 - DNA, 1087 bp, Arabidopsis thaliana columbia
  Clone ID: JC-ATXLIB327409P4C08_FLI
attttctgcaacttctccaaatctcatactttccagaaaatcattttcccaagaaaaataaaactttcccctttgttcttctccccccaacagcaatcacggcgtaccaatcggagctaggaggagattcctctcccttgaggaaatctgggagaggaaagatcgaaatcaaacggatcgagaacacaacgaatcaagtcactttttgcaaacgtagaaatggtttgctcaagaaagcttacgagctctctgttctttgtgatgctgaagtcgcactcatcgtcttctctagccgtggtcgtctctatgagtactctaacaacagtgtaaaagggactattgagaggtacaagaaggcaatatcggacaattctaacaccggatcggtggcagaaattaatgcacagtattatcaacaagaatcagccaaattgcgtcaacaaataatcagcatacaaaactccaacaggcaattgatgggtgagacgatagggtcaatgtctcccaaagagctcaggaacttggaaggcagattagagagaagtattacccgaatccgatccaagaagaatgagctcttattttctgaaatcgactacatgcagaaaagagaagttgatttgcataacgataaccagattcttcgtgcaaagatagctgaaaatgagaggaacaatccgagtataagtctaatgccaggaggatctaactacgagcagcttatgccaccacctcaaacgcaatctcaaccgtttgattcacggaattatttccaagtcgcggcattgcaacctaacaatcaccattactcatccgcgggtcgccaagaccaaaccgctctccagttagtgtaatataggctgaaggaaatggccgggagtgaataaaaaccagaattgggttgagcaagcaatataaagctaatgcatgttatatatatatttatcccatgaatgttgtatcagtgaattttatgcttatgttgatgtgaaattaatatcttaaagacatgtcattaatgtgcttaatttgcttcaaaacatctatgtgtataagtgtactattagttcaattgttgtatttaatt

SEQ ID NO: 12956 - DNA, 522 bp, Arabidopsis thaliana columbia
  Clone ID: JC-ATXLIB327410P3F03_FLI
agaagtaaaagaaacatcaaagccaaagattttgcttgtggaagataataagatcaacatcatggttgcaaagtcgatgatgaagcagttaggccataccatggatattgctaataatggagttgaagccataaccgcgattaatagctctagctacgatctggtactcatggatgtgtgcatgccggtgctcgatggtttaaaagctacaagactgatccgttcgtatgaagaaactgggaactggaatgctgcaatagaagccggagtagatatatcgacatcggagaatgaacaagtttgtatgcgtcccacaaaccggctgcctataatcgcgatgacggcaaatactttagcagagagttcagaagaatgttatgcaaatggtatggactcgtttatttcgaaacctgtaacgttgcaaaaactgagagagtgtttgcaacagtatttgcactgagatttcagatttttgtgttttgtagattaagaaatggttgtgttgtatataaattgtgtagg

SEQ ID NO: 12957 - DNA, 1019 bp, Arabidopsis thaliana columbia
  Clone ID: JC-ATXLIB327411P1E12_FLI
gcttacagagctttctcagaaacgtcaccgtttcttcaattcgtcaacttcacagcaaaccaaacgattctcgagtcattcgaagggtttgatcggatccacattgtcgatttcgatatcggttatggaggtcaatgggcgtctctgattcaagagctcgccggaaaaagaaacagatcttcatcagctccgtcgctaaagattacagctttcgcttctccttcaactgtctccgacgaattcgagctccgattcactgaagaaaatctcagaagcttcgccggcgaaacaggtgtctccttcgaaatcgagctcttaaacatggagattctcttgaatccaacttattggccactgtctttattccgatcatcggagaaagaagcaatcgctgtgaatctcccaatcagctccatggtctccggttacctcccattgatacttcgtttcctcaagcaaatctcaccaaacgtcgtcgtttgctcagacagaagctgcgaccgtaacaacgacgcgccgttccctaacggtgtgattaacgcgcttcagtactacacatctctgctcgagtctctcgactctgggaatctgaataatgcggaagctgctacgagtattgagaggttttgtgtgcaaccgtcgatacagaaactgttgacgaatcgttaccgttggatggagagatcaccgccgtggagaagcttatttgggcaatgtgggtttactcctgtgacgctgagtcagacggcggagacacaagcggagtatttgttgcagaggaatccaatgagagggtttcacttggagaagagacagtcttcgtcgccttcacttgtcttgtgttggcagaggaaagaacttgttactgtctcagcttggaaatgttaagacgaaaaaggaggatattttcacggtttaattttctttttgtagcttttcaatttgggttagatcacgttttaatatgtttgattgtgatgttaaccaatcaaatgatatatatataatctccttatgtt

SEQ ID NO: 12958 - DNA, 2042 bp, Arabidopsis thaliana columbia
  Clone ID: JC-ATXLIB327411P1F05_FLI
aaaaacgtgtttttttttaccggtcaccggtttatggaatgactgattaccggctacaaccaacgatgaatctttggaccaccgacgacaacgcttctatgatggaagctttcatgagctcttccgatatctcaactttatggcctccggcgtcgacgacaaccacgacggcgacgactgaaacaactccgacgccggcgatggagattccggcacaggcgggatttaatcaagagactcttcagcaacgtttacaagctttgattgaaggaacacacgaaggttggacctacgctatattctggcaaccgtcgtatgatttctccggcgcctccgtgctcggatggggagatggttattacaaaggtgaagaagataaagcaaacccgagacggagatcgagttcgccgccgttttctactccggcggatcaggagtacaggaaaaaagtgttgagagagcttaactcgttgatctccggtggtgttgctccgtcggatgacgctgttgatgaggaggtgacggatacggaatggtttttcttggtttcgatgacgcagagcttcgcttgcggtgcgggattagctggtaaagcgtttgcaacgggtaacgcggtttgggtttccgggtcagatcaattatccgggtcgggttgtgaacgggctaagcaaggaggagtgtttgggatgcatactattgcgtgtattccttcggcgaacggagttgtggaagtcgggtcaacggagccgatccgacagagttcggaccttattaacaaggttcgaattcttttcaatttcgacggcggagctggagatttatcgggtcttaattggaatcttgacccggatcaaggtgagaacgacccgtctatgtggattaatgacccgattggaacacctggatctaacgaaccgggtaacggagctccaagttctagctcccagcttttttcaaagtctattcagtttgagaacggtagctcaagcacaataaccgaaaacccgaatctggatccgactccgagtccggttcattctcagacccagaatccgaaattcaataacactttctcccgagaacttaatttttcgacgtcaagttctactttagtgaaaccaagatccggcgagatattaaacttcggcgatgaaggtaaacgaagctccggaaacccggatccaagttcttattcgggtcaaacacaattcgaaaacaaaagaaagaggtcgatggttttgaacgaagataaagttctatcattcggagataaaaccgccggagaatcagatcactccgatctagaagcttccgtcgtgaaagaagtagcagtagagaaacgtccaaagaaacgaggaagaaagccagcaaacggtagagaagagccactaaaccacgtcgaagcagagagacaaagacgcgagaaactaaaccaaagattctacgcgttacgagcggttgtaccaaacgtttcaaaaatggataaagcttcgttactcggtgacgcaatcgcttacatcaacgagcttaaatccaaagtagtcaaaacagagtcagagaaactccaaatcaagaaccagctcgaggaagtgaaactcgagctcgccggaagaaaagcgagtgctagtggaggagatatgtcgtcttcgtgttcttcgattaaaccggtggggatggagattgaagtgaagataattggttgggacgcaatgattagagttgaatctagtaagaggaatcatccggcggcgaggttgatgtcggcgttgatggatttggagttggaagtgaatcacgcgagtatgtcggtggttaacgatttgatgattcaacaagcgacggtgaagatgggttttaggatctatacgcaagaacagctcagagcaagtttgatttcaaaaatcggttaaaagggtgtgttttgggaagtttagaaagttatggggtcaaatcataattaattcgttttagtggcttcagtaattttgtagattttagttttgtaagaaaaaaatcttaaaatagagcgacaagtttcttct

SEQ ID NO: 12959 - DNA, 1282 bp, Arabidopsis thaliana columbia
  Clone ID: JC-ATXLIB327411P1H02_FLI
cgtcccataatcttccaaacttcaccagaagaaattcttaacaaacaattttcttcataatattaattctcaagatcttaaagattatattaatacgaagagaaaattcaaatgggtcttgatgattcatgcaacacaggtcttgttcttggtttaggcctctcaccaacgcctaataattacaatcatgccatcaagaaatcttcctccactgtggaccatcgtttcatcaggctcgatccgtcgttgactctaagcctatccggtgagagctacaagatcaagactggtgccggcgccggcgaccaaatttgccggcagacctcgtcccacagcggcatctcatctttctcgagcggaagggtaaagagagaaagagaaatctccggcggcgatggagaagaagaggcggaggagacgacggagagagtggtgtgttcgagagtgagtgatgatcatgacgatgaagaaggtgttagtgctcgtaaaaagcttagactcactaaacaacaatctgctcttctcgaagataacttcaaacttcatagcacccttaatcccaagcaaaaacaagctcttgcgagacagctgaatctaaggcctagacaagttgaagtgtggttccaaaacaggagagctagaacaaaactaaagcaaacagaagtggattgtgagtttttgaagaaatgttgcgagactttaacggatgagaatagaaggcttcaaaaagagcttcaagaccttaaggctttaaaattgtctcaaccgttttacatgcacatgccggcggcgactttgactatgtgcccttcttgtgagagactcggcggtggtggtgtcggaggagatacgacggcggttgatgaagaaacggcgaaaggagctttctccatcgtcacaaagcctcgtttctataaccctttcactaatccttctgcagcatgttagttacttattagttatttaatttctttttgttggttttttttttgtttcttaaatcaaattaggaattagttagaagataaatcccagggaaaaaatattacgttgaaattggggggaaatggggtatagtctttatagataagactcttcaacgattccactttatttttcggtgggattgttggttgatgaagaaaaaaaaatagtttgtaattacaggtttaaatatgtagagaaaaaatgacgaatatgtattatcttgtttttttttccttcgaatatgtattacggtaatataaatttgcttgtaaaaataataaatatattatttgat

SEQ ID NO: 12960 - DNA, 2550 bp, Arabidopsis thaliana columbia
  Clone ID: JC-ATXLIB327411P3A08_FLI
agatggtggttttgttttattatttagagtaagcttcttcatttttttaaaaacttctattattttgaccttaagaagaaagtgacaaggagaggaagaagaagaaaaaaaaacataatttgaggaagaagaaaaaaaattcggatttgttttttcaataaattgactaattgagtactcgtttaaaggaagtgaagagcggttttttggtagtggtggtcgagaaaagagagagtttgtctctgtgactcagagtgaaatcaatagagcgggaaaagattgttgcttttttttgccatgggagttgatgagctgtctcacctcaaattctctcttctgctagaatcatcagcctgcaatgatttgtccggttttaagtctctagttgaagaagaaggtcttgagagcattgatggctctggtttgtggtatgggaggagattaggatcaaagaagatgggttttgaggagaggacgcctcttatgattgctgccttgtttggaagcaaagaggttgttgattacatcattagtactggtcttgttgacgtgaaccgctcttgtggctctgatggtgccacggctcttcactgtgcggtctctggcttgtctgccaatagccttgagattgttactcttctgctgaagggctctgcgaatccggattcttgtgatgcttatggtaacaagcctggagatgtgattttcccttgtttgagtccggtttttagcgcgaggatgaaggttttggagcgtttgttgaaaggaaatgatgatttgaatgaagttaatgggcaagaagaaagcgagccagaggttgaggttgaggttgaggtttcgcctcctcgggggtctgagaggaaggagtatccggttgatccaacgcttcctgatatcaagaacggtgtatatgggacggatgagttccggatgtatgctttcaagatcaagccgtgctctagagcatactctcacgactggacggaatgtccctttgttcatccgggtgagaacgcaaggaggcgtgatccgaggaagtaccattatagttgtgtcccttgtcctgaattccggaaggggtcttgttccagaggtgatacttgcgagtatgctcatggtatctttgagtgctggcttcacccggctcagtaccggactcgtctctgcaaggacgagacgaattgctcgagaagagtttgtttctttgcccacaaacccgaggagctgcgtcctttgtacccttcaactggatcaggtgttccgtccccgcggtcttccttctcatcttgcaattcctcgaccgctttcgacatgggaccgattagtccgcttcctatcggagcaacaaccacacctcctttgagtcctaacggtgtatcctctccaataggtggaggaaaaacgtggatgaactggcctaacataacccctcctgcattgcagcttccagggagcagattgaaatctgcattgaatgcaagagaaatcgatttctctgaagagatgcaaagtcttacttctccaactacatggaacaacacgccaatgtcatctccattctccggaaagggcatgaacaggcttgcaggaggagcaatgagcccggtgaatagtctcagtgatatgtttgggacagaggataatacatcgggtttgcagatccgacgcagcgtcattaacccgcagctgcattccaacagtctttcttcatcacctgtgggagccaattctctgttttcgatggattcctccgcagtcttggcttcaagagcggctgaatttgctaaacagcgaagccaaagcttcatagaacgcaacaacggactgaatcaccatcccgcaatctcttccatgactacaacttgtttaaacgattggggctcattggatgggaagcttgactggagcgtccaaggagacgagctacagaagctcagaaaatccacttctttccgtctcagagccggtggcatggaatcaagactgcctaacgaagggactgggctcgaagagccagatgtctcatgggtggagccgctggtgaaagagccacaggagacaagactagctccggtttggatggagcaatcatacatggagacagaacagaccgtggcttgaatcaaaagttttgaactttcattaaccgttccacaagaagcaaagtcagaaagattccgagaggtcgatgctaatctatttcattttatttgtttaatgctttgttatttttctttagaataaaaagaaaaaattcttaggggacaaaagagagttcgtttgtctctctctctgtctccaaagaaaaacagaggtgaaaaaaggtttcaaaacctaagaaaccttgaattacctcacctcacttccttgattctttactattcacaatgagtaatcgattttttttttttcttggtaacactctcacgctgaatatatatgttttttagtaataatataattggaatacagaaatgtatttacacttgtgaagttagggaaagtgttgtaattgtttcttctaagagttgatctaagatgtttgagact

SEQ ID NO: 12961 - DNA, 1029 bp, Arabidopsis thaliana columbia
  Clone ID: JC-ATXLIB327411P3G02_FLI
ttttctattgcagagagaaagagagttagagaaagagagagagagagagagagagagagagatgaaacttgtgcaagaagaataccgtaaaggaccgtggacagaacaggaggacatcctcttggtcaactttgtccacttgttcggagatcgaagatgggattttgtagcgaaagtttcaggtttgaaggtggagggagaaacataagaataggtttaaacagaacaggaaagagttgcaggttaaggtgggttaattacctgcatcctggtctcaaacgtggtaagatgactccacaagaagagcgtttagtccttgagcttcacgccaaatggggaaacaggtggtcaaaaattgcccggaaattaccggggagaacagataatgagataaagaactactggaggactcatatgaggaagaaggctcaagagaagaagcgacctatgtctcctacttcctcatcttcaaactgttgctcatcatctatgaccactactactagtcaagacactggaggctccaacgggaaaatgaatcaagaatgcgaagacgggtactactccatggatgacatatggagagagattgatcagtctggagcaaacgttattaaaccggtaaaagacaactactactcagagcaaagctgttacttgaatttccctcctctggcttctccaacatgggaaagttccttggaatctatatggaacatggatgcagatgaaagtaagatgtcttcttttgctattgatcagtttcctctaagttttgaacatggtagtggtcgcctttagtctaggatttgattcatttggaatgtttatatgtgcagcatatatatgttatcaaacgacgactgtagtagtttcctatgacttacatcaaaaatcaccacccactgtactaatctcataagtagtcatcatcttatgcctttgtttagtttgtagagtgagtgaaaagatgtgtaatacaagtcagaactctatttccaaaataaatagacttttgaagtttctgtg

SEQ ID NO: 12962 - DNA, 1423 bp, Arabidopsis thaliana columbia
  Clone ID: JC-ATXLIB327412P3C10_FLI
gaatgaatctctgtttcttgttttggaaccgagatggcttcctaacaattgggcttttctctgcctcttcctaggaatctgaagctcttctctactctctactctatcactccatctgtgaacatatctttcttattcttctaggcactatctatttttcactttttgtaattggaatttggagatggctatgcaaactgtgagagaaggtctcttctctgctccacagacttcttggtggactgcttttggatctcagccgttggctccggagagtctcgccggcgattctgactcattcgccggagttaaggtcggatctgtcggagagacaggacaacgtgtggataaacagagcaactctgcaacgcacttagctttctcacttggtgatgtaaagagtccaagacttgtgccaaagcctcatggagctactttctcaatgcaatcaccttgcttggaacttggattttctcagccaccgatctatacaaagtatccctatggagaacaacaatactatggagttgtttcagcctatggatctcagagcagggtaatgcttcctctaaacatggaaacggaagatagtaccatctatgtgaactcaaagcaataccatggaatcataaggagacgccaatcccgcgcaaaggctgctgctgttcttgatcagaagaaattgagtagtagatgccgcaagccatatatgcatcattcgcgccatctccatgcattgcggcgtcctagaggatccggtgggagattcttgaacactaaaagtcagaacttggaaaatagcggaaccaatgcaaagaaaggtgatggaagtatgcagattcagtctcagcctaagcctcagcaaagtaactctcagaattctgaagttgttcatccggaaaacgggaccatgaacttatcgaacggattaaatgtgtcgggatcagaagttactagcatgaactacttcctaagttctcccgttcattctcttggtggcatggtaatgcctagcaagtggatagcagcagcagcagcaatggataatggctgctgcaatttcaaaacctgatcctttaccgtttcacagtcaaacggagagagataaagaactcttgccttggtataaaggattttcctttttgccaatccgctttggctgtgaacaggcaaatcatctttggctcattctctattaaggtaacttcgccgtgaagtaaaaaaagctttgatatatttatcttcagtgtaaaagtagttaaaactggtgaagaacaatgatgtgtttggtcactaaacccacttgttccaactagtagtgtgtgttttaagaaaactctgttatctgattttgtagctctctctggctttgtgtgtttctcaaacaactgtaacaacttttaagttatgtggtttatgtaac

SEQ ID NO: 12963 - DNA, 1365 bp, Arabidopsis thaliana columbia
  Clone ID: JC-ATXLIB327412P3D05_FLI
attttgatttggttttgtagcctacgaattcgaatcatcagcatcatcttcaacaccagcttaacgaaaatggagtataataagtggccacggactagtactctctcaccaacttccacctctccaagcaaaccctaaccctaaccaccaccatgtcgctacctctgctggtcttccgtcaaggatgggtggatcgatggcggagagagcaaggcaggccaacattcctccactagcgggacccctaaagtgtcctcgatgcgactccagcaacactaagttctgttactacaacaactataacctcactcagcctcgtcacttctgcaaaggttgccgtcgctactggacacaagggggcgccctgagaaacgtccctgtaggtggaggctgccggaggaataacaagaagggcaaaaatggaaatttaaaatcttcttcttcttcgtccaaacagtcttcctcggtcaacgctcaaagtcctagctcaggacagctaaggacaaatcatcagttccctttttcaccaactctttacaatctcactcaactcggaggtattggtttgaacttagccgctactaatggcaacaaccaagctcaccagatcggttccagtttgatgatgagcgatctagggtttctccatggacgaaatacttcaactccgatgacgggaaacattcatgaaaacaacaacaataataacaatgaaaacaacctaatggcatccgttggatctttgagcccctttgctctcttcgatccaacgacggggctatacgctttccagaacgacggtaatatcgggaacaacgttgggatatctggttcttctacttccatggttgattctagggtttatcagacgcctccggtgaagatggaagaacaacctaatttggctaacttgtctagaccggtctccggtttgacgtctcctgggaatcaaacaaatcagtacttttggcctggttcggatttctcgggtccttctaatgatctcttgtgagatttttgtgtgttttgtcggatcattaacgtatgttacgacttacgacgtggagattgattaaaaggactaccaacggtcaggattaactgcatgcatagtctgtgctcaagacgatgatcgtggagaagtacaaggacaaactaaaaggtatcttaattagagattgtggttttacaacttaaattcgatacttatttatataatcaggtgtgtcatataatttgtttgtattgcgtgatttcatggttgatctgatttctcaagttgctatatatgcctcaatacatgtgtgtaacagtccaatttgtatactctttagactgaattttatcgaatatataatatttttc

SEQ ID NO: 12964 - DNA, 1340 bp, Arabidopsis thaliana columbia
  Clone ID: JC-ATXLIB327413P1F04_FLI
tcgaactcgtatgactaggcctgtgcctcgtattggagacagaagaattaggaagatattggcatctagacattggaaaggaggttcgaagaacaacacagatgcaaagccatggtattgctcaaagaggagttattacttgcaccatcatcagaggagttatcccatcaagaaaaggaaatactttgacagtgtttacgactcgaactctgatgattaccgtttgcaaggaaagactcataaaggaagcagaacaatatcttccatgaaaagtcgaaatgcgtcctttgtgtcaagggatcatcatgtgaagctgcggatcaagtcttttagggtgcctgagcttttcgtagagattccagaaactgctactgttggctccttgaagcggatggtgatggaagcagtgaccaccatactgggtgatggacttcgagtcgggctgatggttcaaggaaagaaagtccgagatgatggcaaaactcttcttcagactgggatctctgaggagaacaaccacttggattctcttggtttcagccttgaacctagcttagagaccacccctcaaccactgttatccagttatctgtcagatcatgcctgtgatgatgtgacgttatgccacgacaatgcgttggattctagtcatgagccagaaccatccccagctgactcatttgggaaactaggcacaagtgatcattctagagctttgattcctgttgcctcagcagcaatgctggctcctcggcctcctaaccgtaagtttaaaaggactgagcagcagctagctgcacaacgcagaattcgtcgacctttctcagttactgaagtagaagcactggtccaagccgttgagaaactcggaaccggaaggtggagagatgtgaaggttcgtgctttcgaggacgcagaccatcgtacctatgttgatctcaaggataagtggaagacgctggtccacacggcaaggatatctccacaacagcggagaggagagccggtgccacaggaacttctggaccgtgttttgaaggcacacgcttactggtcacaacacctaatgcatcaactgcagactgagccaccatccactcaggtagaggctctctaatctgaacaggttcttggtctaaagaacctttgtgtattattatgatgatccatattgtaagattctgacatagttgaagatctggtctcagttcttctttgttttttttttctttctttcaaatgtaaagttttataattggaaataaggttgggttttttctaacaatgtaaaggatttgttgtaaatctttggtgacatttttattctgtctatatgattt

SEQ ID NO: 12965 - DNA, 717 bp, Arabidopsis thaliana columbia
  Clone ID: JC-ATXLIB327413P1G12_FLI
ggtcaaacaaaaaaaaaaaacctaaagaaacttcgacatgaaaggcggcgaatccaaagctgaagcaacgagcactgatcagagactcaaaaccagaggtagaaaggctgggaagaagacgaagaaggatccaaatcaacctaagagacctccaagtgctttcttcgtcttccttgaggatttccgaaaagagtttaacctagcgaatcctaataacaaatccgtcgctactgttggtaaggctgctggagctagatggaaggcaatgactgatgaagataaagctccttacgtcgctaaggctgagagcagaaagactgaatatattaagaatgtgcaacagtacaacttgaaactggctagtggaaccaatagagaagaggatgactctgacaaatccaagtctgaagttgatgaagcagtaagcgaagaggaggcagaagacgacgattgaagcatctaggtcttgctattgacttgactcagatttgagaatgtaaacttgcttaggtttatgaccaaaaacttttaaaaaactcttatttatgctttgtgtttgtgatatttgaacctcatttgctacatcaatgttgttttaggtcagtctgtagggataatatcacttgactgctatatttcccctatttccttatgttttactagtattcatatgttcttcaactttgtatgagttttagtatcagttttatttctact

SEQ ID NO: 12966 - DNA, 1451 bp, Arabidopsis thaliana columbia
  Clone ID: JC-ATXLIB327413P2A07_FLI
ccttgttgtactctcaaattcttgggtcgttctgagtcgtctccgcgttaaatcttttccctttttgatcctttcttcctttcttcttcttcttcgcattgatttggtcctccttcctcttctattctattcattaagaacctaatcttcatcttctccatcttcttcttcacggactccacttcgctcatccaggaaggtttattagtagtaaccaatccaagtgttccttttgtttgaagcaacaagctttgtgatattatcctgagagacaatgtttggtttaaggaaatcaccggcaaatcttcccaagcataactcagtcgacctcaagtcttccaagccaaatcctttcgattcagatgatgaatctgacaacaaacatacccttaacccttctaagaggactacctctgaaccctctttggctgatatgacaaacccttttggtggtgagagagttcagaaaggagatagtagttcatccaaacagtcattgttttcgaactccaaataccagtacaagaacaatttccgtgattctggtggtattgaaaaccagtcggttcaggagcttgaaggttatgctgtgtacaaggctgaagagactacgaaatctgtacaaggttgtttgaaggtagcagaagatataaggtctgatgctaccagaactttggtcatgttacacgatcagggcgagcaaatcactaggacgcaccataaagccgttgaaatcgaccatgatctcagtcgtggtgagaaacttcttggaagccttggaggcatgttttcaaagacttggaaaccaaagaagactcgtcctataaatggtcccgtcgtaaccagagatgactcaccaacgagaagagttaaccacttagagaaaagggaaaaactgggactgaactcagcacccagaggacaatcaagaacccgagaaccactccccgaatcagctgatgcttatcagagagtggagatggaaaaagctaagcaagacgatgggctttcagacttgagtgatatactcggcgagctaaagaacatggctgttgacatgggaagcgaaatcgagaagcagaacaaaggacttgaccatcttctggctatgaacgaggctatttgcatcgataaggtgagagttacgggatactttgtatggtcattgttggataacttcgaatggcaagatggttacaaaaacagattcggactctattacgtcgatttcaaaaataacctcacacgttatgagaaagaatcagccaagtattacaaagatttcctcgctcaaggtgttcgtccatccgcactcaagagggatgagctttaagttatattttgaggatttcgttttctattcgatgtttttcctatgttttagtttgtgattgaccacgcacgattcatgagtcgtggttaataataataaaagtgtttcgttttccttc

SEQ ID NO: 12967 - DNA, 373 bp, Arabidopsis thaliana columbia
  Clone ID: JC-ATXLIB327413P2A08_FLI
atcttcacaaaactcaccttgaagagaggattaagaagattgtgccggagtttccaagaacagcttctagcaagctactgagaagagtcttgagagatcagattaagcaagaactactatccttacgaagtcgaatataaagccttgatcttaagtttaactagaataaaataagatctgctgagtagtagttgatctacacatgattgggtactgctcggtccaaataagaaaaccgattaaatcaaatctaccggtccttgaattctctagcctgattcacatttacatgactaaacactttgactttgttatgtttgtgtttgtgtttggtgtatatatttcatatcagattataatcttaattttcctc

SEQ ID NO: 12968 - DNA, 1839 bp, Arabidopsis thaliana columbia
  Clone ID: JC-ATXLIB327413P2C03_FLI
ttttttattaccctgttttataaacagaggaagccctaaatttggattctctattctaaagttttctcatttcgctaattttggagaaaaacgattgttttttttaatcgtttcttcatttctgattcatttttcttggtttatgatctgttcaagtaaaggaacaatcttaatcgctagaggtaaaaattcaaatacaatccctagattacccctaaaagggtcatccacaaattacgcgaatcgaattcaaattcgaaacccaatcagtgtcaaaactttccggcgatcatcttcatcgtcaatggcggtggaaacaatgtcgatgggatcagattcatcaactttgattctaacatcaggagcaagcggtcgcgttagggtactcttctcgatgcgagagcttaagcgtctcgttacgattatccaatcgttgattcttttcctcctccttccgtttcgcgtcgtcgtttggcggcggaggactggtgcggtggttatcagagacgataagcaagagaggaaggtttggtctcctccgcagatcgtggtgaggaagaggaacatcggtggcgaaagcagcgtttctcctccgtcggttccagctgcggtggtggatggggaggttgctgttcgacgtgaactggcgattaagcgagttttggaggatgaaggcggcgatggaagctccgtcagagattattcgctattcacgacgaagagaggagatacgttgtttagtcagtcatggtcacctctttccccaaatcacaggggacttattgttctgctacatggattaaacgagcatagtggcaggtatagtgattttgcaaagcagcttaatgctaatgggttcaaggtctatggaattgactggatcggtcatggcggaagtgatggacttcatgcttacgttccttcccttgattacgctgtcacagatttgaaatcatttcttgaaaaggtattcacagagaatccaggactcccctgtttctgctttggacactcaacaggtggagcaatcatcctcaaggctatgctggatccaaagattgaatctcgagtttcaggcattgcattgacttcaccagctgttggagtccaaccatcccatccaatcttcgctgttcttgctccaatcatggcgtttctactacccaggtaccaaatcagtgcagcaaacaagaaaggaatgccggtttctcgtgacccagcagctctcatcgccaaatactctgacccattagtcttcaccggatccatccgggttaaaaccggctacgagatccttagaatcactgctcacttgcaacagaacctgaacaaagtgaaagttccctttcttgtgatgcacggtactgacgacacagttaccgatcctagcgcctcaaagaagctctacgaggaagctgcctcgtcagacaaatcactcaagctctacgacgggttgttgcacgatcttctttttgaacccgaacgagaaatcatcgctggagccatattagattggctaaaccagcgggtttagctcgttcaaaccaacaatcactatcgcatcgaatcaagagattcttgattcagacaagaataattaattcgcggaattttctgagtgtgttgactgagaaacgtgaggaaaaagaagttcttggtcgaattttctcaactcagaagtagaaggaagataagagaaaaagagagactccaaatctggactctcttgctatgcttcttgacgtcggtatattgttataaatcaataattttgtaaccttggattttaatatcttatacctgtaataccaattattatttatatcgaaactatatatg

SEQ ID NO: 12969 - DNA, 1288 bp, Arabidopsis thaliana columbia
  Clone ID: JC-ATXLIB327413P2H06_FLI
cttaattagggttctatatgtttagaaaaaaaatgttggtgttagcattattttccatttacttcttatcaatagaagctgtccggaatgaatcatttcctgcgctattagcttttggagattcaatggtcgatactggtaacaacaattacctcctgactctaatgaaaggaaattactggccatatgggtggaatttcgactcaaaaataccgaccggaagatttggaaacggaagagttttctccgatgtagttgctgaaggtttggggatcaaaagaattgtaccagcttatcgtaagttatacattgctccaagcgaccttaaaacgggtgtttcttttgcatcaggtggtgcaggagtcgaccctgttacatccaaattgctgagagttttatcgccagctgaccaagtaaaagatttcaaaggctacaaaagaaagctaaaaggtgtagtaggcaggtcaaaagcaaaaaaaatagttgcaaattcagtgattcttgtttctgaaggaaataatgatattggaatcacatatgcgattcatgatgctggtatgcgattaatgactccgaaagtatacaccagtaaattagttggttggaacaaaaaatttataaaagatttatatgatcacggagcaagaaaatttgcggtgatgggagtgataccattgggatgtttgcctatgtcaagacttatttttggtgggttcttcgtgtggtgtaatttcttggcaaacacaatctctgaagattacaacaaaaaattgaaaagcggaattaaaagttggagaggagcatcagattttaggggtgctaggtttgtctatgtcgacatgtacaactctcttatggatgttatcaacaatcataggaaatacggatttacccatgagaagaatggatgttgttgtatgcttacggcaatagtaccatgctccaacccagataaatatgtcttctatgactttgctcatccctccgagaaagcctacaaaacaattgctaaaaagcttgtcgaggatatcaagacaggacttgcctgatttcttacaatgctattttcatcttggaattaccataattaattatatacgtacttcttctgtttcaaaatctttgatgttctagagaatttttttttgttttacattataatgttctcatttttaatgtaaaatttattagtttaaaaaaaatgttttgaccatttatattttgcagtttgttattttgcagttggttgaattgtgttagataaataataaataatgtttttatctac

SEQ ID NO: 12970 - DNA, 560 bp, Arabidopsis thaliana columbia
  Clone ID: JC-ATXLIB327413P3A02_FLI
agcatttgcttcaccctcatcaggtgtgatgcctgattccaccaatcctactatgagtgtgaatgcccaaggccatgaaatccaaaatggtggtggaacaacaagccagttctcatcggctttgtgggcattaatggactcaataccttcaacgccagcctctgcgtgtgagggtccccttaaccgaacctttgtacgtatgtctagcttcagccgtatgaggttcaatggaaaggctaatggaacgccagtgagtactaccatagcaaagaagggtattagaaacagaggttttcttctattatcaatcgtgggtgctttgtgtgccatcttctgggtgttggtagccacagttcgagtctcaggtagaagtcttctcttgaaagactagtggtggttctcttgaactcttaactactggtaagttagaagaagaaaccatgatccacattagtgttcatgggattattgacctatctataatatatgaaactttgaatatgtacagagtttgaaagagtaaagtacaataattcgtgataaaggagtttcttttcctt

SEQ ID NO: 12971 - DNA, 1122 bp, Arabidopsis thaliana columbia
  Clone ID: JC-ATXLIB327413P3E08_FLI
ggaatttgggaaaagtatggagaagaagacgaaagtgctaattgtgggaggtactggatacttgggtcagcatcttcttcaagctttcgccggcaactatggcggtgaatgtgagctatacgacgtcgctttcactcaccattcttctccacttcccgctcgtttgctcgacgctttccctcattcccccgcgtttcctgtcgatcttaaatccggtctagggctcaattccatatcccaggactttcgtcagcctgatgtggtcgtgaattgtgctgctctgtctgtcccacgagcttgcgagcaagatccagattccgccatgtccatcaacgtacctacttctcttgtaaactggttatcaagttttgagactaacaaaaccttgttgattcatctctctactgatcaagtttatcaaggtgtcaagtctttctacaaggaagaagatgagactgttgcagtcaacgtttatgggaaatcaaaagttgcagcagagcttctcatcaaggataagtgtcaaagctttgcaatattgagaagtagtatcatctttggtcctcaaactgtatcacctctccccaagactctcccaattcagtggattgatagctccttaaagaaaggggacacggtagacttcttccatgacgagtttcgttgccccatttacgttaaggatcttgtgaatatcactttcaaattaatagacagatgggtctctgatgataaacagatgcggctagttctgaatgctggtggacccgagaggctatctcgtgttcaaatggctcaaatggttgcagaagtcagaggatacgacctgtccttgattaaacatgtgtctgcatcatcgattgatcgtggcgtagtgtcaccagcagatatatctatggacataactaaactgattcatacacttgagctctctccaacttctttcaaggaaggtgttaggttaacgcttgactctgaatctcattctcatatgctcccatgatagtattcccttatgtgctcttctttaccactctgcttctttctatggagaaaaatctcggtttgagaaaaccaatgtaaaacggttgatatggtttcggaattaaggtttggttttcaatc

SEQ ID NO: 12972 - DNA, 2698 bp, Arabidopsis thaliana columbia
  Clone ID: JC-ATXLIB327413P4A07_FLI
agctctggtatctaacaatcatgaggcgtactcaagttgtctacctaaatgtgtcaaaatattagaacgccttgctaggaaccaggatgttcctcaggagtacacatactatggcatcccatctccttggctccaggttaaggcaatgagggctcttcaatattttccaaccattgaagatcccagtaccagaaaagctctctttgaggtccttcagcgaatattgatgggcacagatgttgtgaaaaatgtgaataaaaacaatgcgtctcatgccgtgctgtttgaagctctctccctggtcatgcatcttgatgctgagaaggaaatgatgtcacagtgtgttgctcttcttggcaagtttatttctgtccgtgagcccaacatcagatatctaggcttggaaaatatgacgcgaatgctgatggtcacagatgttcaagatatcataaagaagcatcagtctcagataatcacctcgttgaaagaccctgacatcagtattcgtagacgcgctcttgatttgctatatgggatgtgcgatgtgtcaaatgcaaaggatatagttgaagagttgttgcagtatcttagcacagcagaattttctatgcgggaggaattatcacttaaagctgctattcttgctgagaagtttgctcctgatctttcatggtatgtagatgtgatccttcagttgatcgacaaggctggggattttgttagcgatgacatttggtttcgtgtggttcagtttgtaacaaataatgaagacctgcagccttatgcggcatcaaaagcaagagaatatatggacaaaattgcaatccatgagaccatggtgaaggtcagtgcttatattttgggggagtatggtcaccttttagctagacaacctggatgcagtgcaagtgaactctttagcatcttacatgagaagcttcctacagtatcgactcccaccattcctattcttctttctacatatgcaaagcttcttatgcacgctcaacccccggatccagaactgcaaaaaaaagtttgggctgtatttaagaaatatgagagttgtatcgatgtggagatacaacagagggcagttgaatattttgaattgagtaaaaaagggcctgcctttatggatgtattggctgagatgccaaaatttccggagcgccagtcttcattgattaaaaaggcagaaaacgttgaagataccgcagaccagagtgccatcaaacttagagcacaacaacagccttcaaatgctattgttttggctgacccacagcctgttaatggggcaccaccacctttgaaggttccaattttaagtggaagcacggaccctgagtcagtggctcgatctctctcacatcccaatggaactttaagtaatatagatccacaaactccatcacctgatctccttagtgacctactcggtcctcttgcaatagaggctccacctggagctgtctcatatgaacaacatggtcccgtaggggcagaaggagttccagatgaaattgatggttccgccattgtacctgttgaagagcaaacaaatacagtggagcttatcggaaatattgctgagagatttcatgctttatgtttgaaagacagtggtgtcttatacgaggatcctcatatccagattggcatcaaagctgaatggagaggacaccatgggagacttgttctcttcatgggaaacaagaatacttctccacttacatcagttcaagctctgatactaccccctgcccacttaagactggatctgtctccagtacctgatacaattcctcctcgagcacaggtacaatctccgcttgaagtgatgaacatccgccctagtagggatgttgcagttttggatttctcctacaagtttggtacaaacgtggtcagtgccaaattacgcatcccggcaaccttgaataagtttcttcaacctctacaattgacatctgaagagttcttccctcaatggagagcaatctcagggccacccttgaaacttcaggaagtggtaagaggtgtaagacctctagctcttccggaaatggcaaatctgttcaacagttttcatgtgacgatatgccctgggcttgatccaaaccctaataatctagtggcaagcacaaccttctactctgaaactacaggagccatgctctgtttggcaagaattgaaacagacccagcggacagaacccaactacgattgacagtaggctcgggagatcctacccttacatttgagttaaaagaattcatcaaggaacaattaattactattccaatgggatctcgagctctagttccagcagcaggtccagcaccatcaccagcagttcaaccgcctagcccagcggctttagctgatgatccaggagctatgcttgctggcttactttaaattcattgggataaaagattacttgcacatgtcgaaaagtttgttttctgttattgtagaatgtaatggcgaaaatatggaatgatgggagagtaaatgtagagccaagggagagaaaaaagctagttttgattatatttgtgccgtttatccaaagcgggcgggttgcgttaggtaagaaattttgcattcattctgaacatttgtattgtgaggtcagtggttgtatcagcttgttcttgtgcctatatattttcaatctgtttctccatg

SEQ ID NO: 12973 - DNA, 1495 bp, Arabidopsis thaliana columbia
  Clone ID: JC-ATXLIB327413P4D02_FLI
cttctgcattcctcgcaatgcattggattacgagattctctgctttcttctccgccgcattagccatgattctcctttctccttcgctccaatccttttctccggcggcagctatccgatcatctcacccctacgccgacgaattcaaaccccaacaaaactccgattactcctccttcagagaatctccaatgttccgtaacgccgaacaatgcagatcttccggcgaagattccggcgtctgtaaccctaatctcgtccacgtagccatcactctcgacatcgattacctccgtggctcaatcgcagccgtcaattcgatcctccagcactcaatgtgccctcaaagcgtcttcttccacttcctcgtctcctccgagtctcaaaacctagaatctctgattcgttctactttccccaaattgacgaatctcaaaatttactattttgcccctgagaccgtacagtctttgatttcatcttccgtgagacaagccctagagcaaccgttgaattacgccagaaattacttggcggatctgctcgagccttgcgttaagcgagtcatctacttggattcggatctcgtcgtcgtcgatgatatcgtcaagctttggaaaacgggtttaggccagagaacaatcggagctccggagtattgtcacgcgaatttcacgaaatacttcaccggaggtttttggtcagataagaggtttaacgggacgttcaaagggaggaacccttgttacttcaatactggtgtaatggtgattgatttgaagaagtggagacaatttaggttcacgaaacgaattgagaaatggatggagattcagaagatagagaggatttatgagcttggttctcttcctccgtttcttctggtatttgctggtcatgtagctccgatttcacatcggtggaatcaacatgggcttggtggtgataatgttagaggtagttgccgtgatttgcattctggtcctgtgagtttgcttcactggtcaggtagtggtaagccatggttaagactcgattccaagcttccatgtcctttagacacattgtgggcaccttatgatttgtataaacactcccattgatgccaatttcgagttcgacatattcatggtcatggggactaaaccgaagatagcagagttgcaatggtggttttcaactggaaacaactatgttgaagattgagtaaaccctgccggaacagagtgctatagtagtgttgcttcggacagttcaaccagaccgtagacacaatttagaagagtgaacttcgttttaagtgttgtaccggcggttaaatatgttcttgtgggaagaaaaaaaataaaaatatagttaggtcattcacacatagctcaggttaaagcgtttttgttgtttatgattggtcctataagtaattttgtgcagactctagtccttactttggttctcaaaagtctttagaaatctatggttaaagattttaccttat

SEQ ID NO: 12974 - DNA, 1715 bp, Arabidopsis thaliana columbia
  Clone ID: JC-ATXLIB327414P1A02_FLI
taaagaaacacaaaaatgaagtgtccgtactgttcatcggcgcagggacggtgtaccaccacgagctccggtagatcaataacggagtgctcatcttgcggtcgcgtaatggaagaacgacagacgcaaaaccaccacctcttccatctccgagcccaagacactcctctctgcttagtcacttccgatctccaaacggcggcgcaaccgtctcctgaagacgaggaagatccgttcgaacctaccggattcattaccgccttctctacctggtccctcgagccaagcccgattttcgctcgctcttccctctctttctccggtcatctcgctgaactcgaacgaaccctagaactcgcttcgtcaacatcgaattcgaattcgtcgactgttgtggtggataatcttagggcttatatgcagattatcgatgtggcatcgattttaggattggattgcgatatctctgagcatgctttccagttgtttagggattgttgctcagctacttgcttgcgaaacagaagcgttgaagctttagccactgcttgccttgttcaagctattagggaggctcaagaacctagaactcttcaggaaatctccattgcagccaatgtacagcagaaggaaattgggaagtacatcaagattttaggagaagctctacaactaagtcaacccatcaacagtaactctatatcagttcatatgccaagattctgtaccctccttcaactaaacaaatctgctcaggaactagcaacacacattggagaagttgtgatcaacaaatgcttctgcacccgtagaaacccgatcagcatttctgcagctgctatctatctggcatgtcaacttgaagacaagcgaaagacacaagcagagatatgtaaaataaccggactaactgaggtaactctacgcaaagtctataaagaactgctagagaattgggacgatctacttccatctaactacacaccagctgtgccaccagagaaagcatttcccacaaccacaatctccacaacccgctcaacaactcctagagccgtggatccacctgaacctagtttcgtggaaaaagacaagccctctgcgaaaccaatcgaaactttcgatcatacctaccaacaaccgaaaggcaaagaagataagcagccaaaattcagacagccttggctgtttggaactgccagtgtcatgaacccagcggagatgataagcgagccagcaaaacctaatgctatggactatgaaaagcaacaactcgataagcagcagcagcagcagctaggcgataaggaaacattgcctatatatctaagagaccataacccattcccttcaaatccatctccatctacaggtatcagcacaatcaattggtcattccgaccatctgttgtccccggatcttccagcaacttgcctgttattcatcccccaaaactacctccgggttatgctgagattagaggtagtggaagcaggaatgctgataatccccatggagacttctagagaactaatagattagtcgtgatgataatcttcatttcgtttactctgtctttgtgtgtatcttgggctatgtacaaaatatgcttccgagcagctgtcgcgtctgatcttgggctttgtattagcccatttacgttttggcccattatttctcgactacgacaaaatcaaagtggaagatttaatct

SEQ ID NO: 12975 - DNA, 1096 bp, Arabidopsis thaliana columbia
  Clone ID: JC-ATXLIB327414P3G12_FLI
ctctcaaaaccaaaatcactaaagaggagaagattgctaaagtttgataaaacattccaaaatcaatggctgataggatcaaaggtccatggagtcctgaagaagacgagcagcttcgtaggcttgttgttaaatacggtccaagaaactggacagtgattagcaaatctattcccggtagatcggggaaatcgtgtcgtttacggtggtgcaaccagctttcgccgcaagttgagcatcggccgttttcggctgaggaagacgagacgatcgcacgtgctcacgctcagttcggtaataaatgggcgacgattgctcgtcttctcaacggtcgtacggacaacgccgtgaagaatcactggaactcgacgctcaagaggaaatgcggcggttacgaccatcggggttacgatggttcggaggatcatcggccggttaagagatcggtgagtgcgggatctccacctgttgttactgggctttacatgagcccaggaagcccaactggatctgatgtcagtgattcaagtactatcccgatattaccttccgttgagcttttcaagcctgtgcctagacctggtgctgttgtgctaccgcttcctatcgaaacgtcgtcttcttccgatgatccaccgacttcgttaagcttgtcacttcctggtgccgacgtaagcgaggagtcaaaccgtagccacgagtcaacgaatatcaacaacaccacttcgagccgccacaaccacaacaatacggtgtcgtttatgccgtttagtggtgggtttagaggtgcgattgaggaaatggggaagtcttttcccggtaacggaggcgagtttatggcggtggtgcaagagatgattaaggcggaagtgaggagttacatgacggagatgcaacggaacaatggtggcggattcgtcggaggattcattgataatggcatgattccgatgagtcaaattggagttgggagaatcgagtagacaaagtgagattattaggaaactgtttaaattggagaagaagaaaaatgctctgtttttttctcctttggattaggcttaagaattttgggttttaaggaaatgtatagagg

SEQ ID NO: 12976 - DNA, 1002 bp, Arabidopsis thaliana columbia
  Clone ID: JC-ATXLIB327414P4C07_FLI
aaaaaaaatcaaatctctctctttctctctctaatggcggcgacattaggcagagaccagtatgtgtacatggcgaagctcgccgagcaggcggagcgttacgaagagatggttcaattcatggaacagctcgttacaggcgctactccagcggaagagctcaccgttgaagagaggaatctcctctctgttgcttacaaaaacgtgatcggatctctacgcgccgcctggaggatcgtgtcttcgattgagcagaaggaagagagtaggaagaacgacgagcacgtgtcgcttgtcaaggattacagatctaaagttgagtctgagctttcttctgtttgctctggaatccttaagctccttgactcgcatctgatcccatctgctggagcgagtgagtctaaggtcttttacttgaagatgaaaggtgattatcatcggtacatggctgagtttaagtctggtgatgagaggaaaactgctgctgaagataccatgctcgcttacaaagcagctcaggatatcgcagctgcggatatggcacctactcatccgataaggcttggtctggccctgaatttctcagtgttctactatgagattctcaattcttcagacaaagcttgtaacatggccaaacaggcttttgaggaggccatagctgagcttgacactctgggagaggaatcctacaaagacagcactctcataatgcagttgctgagggacaatttaaccctttggacctccgatatgcaggagcagatggacgaggcctgaggatctagatgaagggggggagggttgttacgcgatgtttctgccaccaaatcgatctcaaaatccccataacctttgctcaaaaactgtgaaaaaagattgaagtgtttatgatgattatgattgtgcacagcttgatgatttatctactctactaaacctctgtgctcttaatatttattgtctcgactctgctcaagccttaaaaacatctttctcctt

SEQ ID NO: 12977 - DNA, 1224 bp, Arabidopsis thaliana columbia
  Clone ID: JC-ATXLIB327414P4F10_FLI
ctcgctctcagttttgtgggattgtttctttaaaaggggttcttagggtttagtgaagctatagatttcaatttcatacatagttaacgtatagaaggaatcttgggttgatcaatggaaggttgtccaagaaacagagaaatcggtccaaaacttcttgatttgattccacaaggaaggaaatggtaccaagaagacaagaacaacacagatcaggagaagaaacttgagctaaggcttggaccacccggtggtgatgaagaagatcattcagcaatcaagaagaagaacacagagataagaaacatcaagaaggaaacagaagacaaatctttccactgttttaatggcaatcacttctctccttccaacaaaaccacttctgttcctcacatctcacagaaaagaactgctcctggtccagtggtgggttggcctccggttcgttcgttcagaaagaatctagcgagcacaagctcttcaaagctaggtaacgaatcctctcatggaggtcaaatcaacaagagtgatgatggtgaaaaacaagttgaaaccaagaaggaaggaatgtttgtcaagatcaacatggatggtgttcctattggtcgtaaagttgatctcaatgcttacaacagctacgaacagctctcttttgtcgttgacaaactcttcagaggtctactcgcagctcaaagagatatctctgatggtcaaggagaagagaaacctatcattggattattagatgggaaaggagaatttactttaacctatgaagacaatgaaggggacaagatgcttgttggggatgttccatggcaaatgtttgtttcatctgtgaagagactgcgtgtgattaaaagctctgagatttcatctgccttgacatttggatgcagtaagcaagagaagatgatgcactgaagagtctttttagaaacttttatttcagacagagagtctcaaagctttataaatgtacatctggtttttgttatatataagagttaatcattggttttttactttttttttggtccagagaaacatttgatctgatctgatattcccatgtcttcaagacactagacgatgagattacataagcaatctgtgtttataagcattttaattaattaaggagataattagaacatactgtaataattatctcatgcatgtctgcaaaactctttttgaaaaaagaagatgaaatttttattc

SEQ ID NO: 12978 - DNA, 1893 bp, Arabidopsis thaliana columbia
  Clone ID: JC-ATXLIB327415P1B08_FLI
atcaaatccatcatccatggatttacctgaagaatgttgggaattaatctgcaaagctatcgatgaagacgattatcgattcctggaatctgtttcactcgtatcaaccttgttcctctcaatcaccaatcgcgttcgctctactttcgtcgtcaccgatcgagctgttcctttactcaatcgtcatctccttcgattccgcaacttgaagcgaatcaggttctctgatttcactcaggatctcaattcgattcttctccaggtttctcgttccggtttggatttcgaatcggtagatgtctcgcaaacgcgctatttcccagattttgagatgaagaatgtcaaggaattgaaatgttatggagttggaggttttagtgatagcgatctggtttccatcggagtgaattttccgttgctagagaagctggacattagctatcctaattcaagtccgagtcgagtctctgattctggtgttatcgagctttcctcgaatctcaaaggtttgttgaagattaacatttctggtaatagtttcatcacagataaatctttgattgctctctcgcagaattgtcttctcttgagagagataatcttccgtgactgtgatttcatttcgtcggattgcatcaaattcgttcttcgcaattcccgtaacttggagtctcttgcgatcaacggaatcggattgagaccgagggagtctttgttaaccgatgcgttcttgtttgctcgttgtttgactgagcttgatctttcggattcgtttttgtctgatgacttgctctgtttgattgctagtgctaagttacctctaaagaagcttcttctctccgattgccacggttttacttttgatgggatcttgtatctgctggacaagtaccaatcactagttcacttgaacctcaaaggagcaaatttcctctctgatgagatggttatgaaattagggatgttctttcggcgtttaacctttttgaatctgagtttctgttccaagttaactggtctagcattctttagtattattgaaagatgtgtttccctgaggtgcatgataatggtagggacgaactttggagtggaagaatataccaaggatacgaaggatttcaagtcaggggtcaagtttttgtacttatctagaaaccacaatttgctcgatgagtgtctcgaaaagatatcacggcattgcccttttatagaaagtcttgacgtagctcagtgtcctggcatcacgagagatgggattcttgaagtttggaggaattgtggcaagctaagatctttggacatcagcagatgtacgggcataaagagtcttggtgtagtagactttgagcttccaaagttggagtctttgcgagcatgtggaacttggatcgacgatgaagccttagatatgatcagcaaaaagtgtcgagggttgttgcatcttgatctgcaaggatgcttgaatgtgagttcaagaggggtgaaggaagttgtgcagagctgcatacgtttaagagagattaacctcaagtattgtgaagctgataagaaaatgtacacttggatggtttttgcaaatccatctcttaggaaaatcgtaccgccatgtgggttttctccaactaaagcactcaagaacttctttctgcgtcatggatgtgtagtctcccaggattcttctgagttgctttctatagcataccgtgccaatggaagagatgatgacacattgactagactgattatttgagccatttgtgaagaaaaaaggtatcagcataatagtttgaatggagaaacaggggttaacctttctttgagtttatatttgtcactctcgttgtaataaaattgtcaagccaaaggcaagcttgcgttgatttttttttc

SEQ ID NO: 12979 - DNA, 1010 bp, Arabidopsis thaliana columbia
  Clone ID: JC-ATXLIB327415P3B09_FLI
agctcctcttgaggatattgttagaggtgttgaggaagtcgatgcagtcccaggaaggtgtgagttgattgatgaggaacaagcttttggtgttattgtggatcatgcaaacacacctgatggcttgtcaaggctgctagattcaattcgagagcttaaaccgagaagaatcattaccgttattggttgtgagggtgagaatgaaagagggaaaagaccgcttatgacgaaaattgctactgaaaagagcgatgtgacgatgttgacatctgataatccgaggaatgaagatccattggacatcttggatgacatgttgtctgggattggatggacgatgcaagagtatttgaaacatggcgaacacgattactatccgcctttggcaaatggtcatagactcttccttcacgatattagacgtgtagctgtacgttgtgctgttgctatgggtgaagaaggtgatatggttgttgtagctgggaaagggcatgaagcgtatcagcttgaaggtgaaaagaaagagttttatgatgacagagaggaatgtcgggaagcattacaatacgttgatgagcttcaccaagctggaatagacacaagcgagttcccatggcggttaccagagagtcattaatatctctgtggtgaaatcattagaagagaagttagcttagtccatgaaaccagattttcttccaccatggtccaattctcttgcgaagatcgatttgcacagaggtaatgaattctacacaagtgacataaaaatcatgcccaaggaaaagagattacaccactgggaggaggaagattttaaaggtggaagaagatgcgtacaaattttgtaagggttaaaaacccaaaaatgtaagtggttctgttttgggtatgttttgatagcatgtgtttaatttagatgaaccaattcaaaccgaaccaacaaaaatagattccggtttaaattatttattttcttacatgtatccaaacttgaaaaaagtgaattc

SEQ ID NO: 12980 - DNA, 1239 bp, Arabidopsis thaliana columbia
  Clone ID: JC-ATXLIB327415P3F04_FLI
tttctctctcgttttctaacgcatacactttgaatggcgcccatgagtttgcctccaggattcaggtttcatcccactgatgaagaactggtggcttactatcttgataggaaggtcaacggccaagccattgagctcgagatcatcccagaagttgatctttataaatgcgagccatgggacttgcctgaaaagtcatttttgccgggaaacgacatggaatggtacttttacagcacaagggataagaagtatccaaatggctctaggacgaaccgtgcgacccgagcgggttactggaaggccacggggaaagatcgtacagtagaatcaaagaagatgaagatgggaatgaagaagacactggtttattatagaggaagggctcctcatggccttcgtactaattgggtcatgcatgaatatcgtctcacgcacgctccttcctcctccttgaaggagtcgtatgcattgtgccgagtgtttaagaagaacatacaaattccaaagagaaaaggggaagaagaagaagcagaagaagagagcactagtgtaggaaaagaagaggaagaagaaaaggagaagaagtggagaaaatgtgatggtaattatattgaagacgagagcttgaaaagagcatccgcggagacatcttcatcagagctaactcaaggggtccttttagacgaagcaaacagctcatccatatttgctcttcatttctcatcttctcttctggacgatcatgatcatcttttctcaaactattctcatcagcttccatatcatcctcctcttcaactccaagatttccctcaactttctatgaacgaagcagagattatgtcaatccaacaagactttcaatgcagagactctatgaacgggacacttgacgaaatcttctcttcttccgccactttccccgcttccctttgataaatccatatctcatactatcatctagtacttcttttctcaacttatttaaatatactcgggtacttcatatatagtattttttttttacttgttttttgcttatgaattagtttgactggtgaaaaagggtgaggaggtttgtggaattattttttctaccacaaaaagaaattgcattattttattttaatttttatcattaggtgtgtatggtacttaatcactagagttggttggttttgtcatatataggagggaaaacggaagtaaaaattgtgtaatcgatcgacattactt

SEQ ID NO: 12981 - DNA, 1051 bp, Arabidopsis thaliana columbia
  Clone ID: JC-ATXLIB327415P3F10_FLI
tgattatcaaaaactgttggttagtaacagaaattgttgcaaatgtaacatattatataagctttctttcactttggtgcattctctctaaataatggcctctattgatgcagtatctgattcttagttttgaaatggtttttgcataaattattgttctaatgcatttttgttttatctccagcatttccaagatcattgatcgttatgaaatacaacatgctgatgaacttagagccttagtaagtaattagctaagaacgtcattctaatattcttctggatgcggtttttggtgttatgaaggatagaagcgctgttcaagccggagaaacctcaatgttttgaactcgtaacaccgaacttaattctctagagttacagttattgtgtctactggaaaatacaagaacttcacaatctttctgaccattccttttcttcatgtgcaggatcttgaagaaaaaattcagaattatcttccacacaaggagttactagaaacagtccaaagcaagcttgaagaaccaaatgtcgataatgtaagtgtagattctctaatttctctggaggaacaacttgagactgctctgtccgtaagtagagctaggaaggcagaactgatgatggagtatatcgagtcccttaaagaaaaggagaaattgctgagagaagagaaccaggttctggctagccagatgggaaagaatacgttgctggcaacagatgatgagagaggaatgtttccgggaagtagctccggcaacaaaataccggagactctcccgctgctcaattagccaccatcatcaacggctgagttttcaccttaaactcaaagcctgattcataattaagagaataaatttgtatattataaaaagctgtgtaatctcaaaccttttatcttcctctagtgtggaatttaaggtcaaaaagaaaacgagaaagtatggatcagtgttgtacctccttcggagacaagatcagagtttgtgtgtttgtgtctgaatgtacggattggatttttaaagttgtgctttctttcttc

SEQ ID NO: 12982 - DNA, 280 bp, Arabidopsis thaliana columbia
  Clone ID: JC-ATXLIB327416P2E04_FLI
gagattgggaagcaagccagaagaaaatgcaacggaagaagaatcaagctgaaggaaataatactatgattttaagacacacatagactttttaatactagtgaagagagttttattgagagaagctctacttcatgttttgctgcttagacataagcaggctacttacatatacaagcggctaagaatacgagaccttttgctagtaatgtgaaaagaggttgaagattaaaaataacattacgccaagaatgatatcttgagcgttttatttcaatgg

SEQ ID NO: 12983 - DNA, 1944 bp, Arabidopsis thaliana columbia
  Clone ID: JC-ATXLIB327416P2G07_FLI
ctctctttcatttcctcttttcgttgacttactaaagtactcttgtttcaatcttcattctagagagattctgtttcatggatgctattttgccagtacccgttgatgggttcagattcgacaccggttctggatcttgttgcaaaccgaggaacaatcttgaatctgggacgaccaatcgtttcacttgtttcaacgaatctgaatctcagagcaacccttctccgaccgagtctaaggtatgttcagattaccttcctgtctttaagtacatcaatgacatgttgatggaagaagatcttgaaggtcagtcttgtatgttggaagacagtttggctttacaagccgcagagagatctttcttcgaagtgcttcaagatcaaactccaatctcgggtgatctagaggatggttctcttggaaacttcagttctataacgagtttgcatcaacctgaagtttcagaggagtcaaccagaaggtatcgacatagggatgatgatgaagatgatgatcttgagagtggaaggaaatcgaagctccctgcgatttctacggtggatgagttagcagagaagtttgaggaagtgttgttggtatgtcaaaagaatgatcagggagaagcaacagagaagaaaacaagacacgtaaaaggctcatcgaatcgatacaagcagcaaaagtcagatcagccagtagatatgaggaatcttttgatgcaatgcgcgcaagctgtggcgagttttgaccagagaagagcttttgagaaactgaaggagataagagaacactcttctcgccacggtgatgcgactcaaagacttggttatcactttgctgaggcgcttgaagctcgtattacaggaaccatgactacaccaatatctgctacttctagcagaacatcaatggtggacattttgaaggcgtacaagggatttgttcaggcttgccccaccttaataatgtgttatttcactgcaaacagaacaatcaatgagcttgcttccaaagcaaccacacttcacatcattgattttgggattctctatggatttcaatggccttgtctgatacaagctttgtcaaaacgtgacatcggaccaccactgctccgtgtgactggtatcgagcttcctcagtcaggtttccgtccatcagagcgggtagaagagaccgggcgaagactaaagaggttctgtgacaagttcaatgtcccgtttgagtacagtttcatagccaagaattgggagaacataactcttgatgatctggtgatcaatagtggcgagacaacagttgtcaactgcatcctccggctacaatatacacctgatgaaaccgtgtccctcaactcaccgagagacacggctctgaaactattcagagacatcaaccctgacctctttgtgtttgcagagattaacgggacttacaattcacccttcttcctaacaaggttcagagaagctctcttccattgctctcactctttgacatgtatgagaccacattatcagaagacgacaattgcaggacactggtggagagggaactaatcataagagatgcaatgagtgtgatagcctgtgaagggtctgagcggtttgcaaggccagagacctacaagcaatggcaggttaggattctaagagcaggatttagaccagcgaaactaagcaaacagatagtaaaggacgggaaagagatagtgaaagaacgttaccacaaagattttgtgatcgacaatgataaccactggatgtttcagggctggaaaggaagagtcctttatgctgtttcttgctggaaacctgctaagaagtaataaaacagttctgtaatcatttgcataattttgctagctttccatttctttgtttttggtttcaaagtgttgtagaaactgtttgctctcatatatattgaatgagtctctctctt

SEQ ID NO: 12984 - DNA, 847 bp, Arabidopsis thaliana columbia
  Clone ID: JC-ATXLIB327416P3G11_FLI
agccaacacatctgagtcagcagtactgcaacaactcctttgacaactcttttggtgatatgagtttcatggaagagaagcctcagatgtacaacaatcagtttgggttaacaaactcgttcgatgctggaggtaacaatggataccagtatttcagttccgatcagggcagtaactccttcgactgttctgagttcgggtggagtgatcacggccctaaaacacccgagatctcttcaatgcttgtcaataacaacgaagcatcatttgttgaagaaaccaatgcagccaagaagctcaaaccaaactctgatgagtcagacgatctgatggcataccttgacaacgccttgtgggacaccccactagaagtggaagccatgcttggcgcagatgctggtgctgtgactcaggaagaggaaaacccagtggagctatggagcttagatgagatcaatttcatgctggaaggagacttttgaagtgatcgatggttccttagtttgtaaataaagctgtgttggattttgctgttgggggatggtacaagtcacacctcaagctctatgcattggtatctcatgagcctctcttccatagagagtttctcttttaattttgtcgaaataaaaaaggtgtgatgaagtaaatagaggtataataatatctatctattaagtcttgttttgttctttcatttttgtatttcttttctatttaaaagacagtttattagtcttctgagctctctttttgatctttgttatagcgtatcatcaccctcgaaagtgtaatgttttgtacccccaaacttgtttagcattataataaagtctctttggaactt

SEQ ID NO: 12985 - DNA, 1144 bp, Arabidopsis thaliana columbia
  Clone ID: JC-ATXLIB327416P3H10_FLI
gttgaggaggaggaggatttcatcatttcaccaattccatctctccttttgggtcaaacccaaacccaaatccaaaccctggaggtgtctctactggattcgtgtctcctcctttacccgttgactcttctccggctgattcgtcagcggcggcggcgggagctttggttgctcctccttcaggtgacacgtctgtgaagcggaagagaggacggcctagaaaatatggacaagatggtggttctgtttcgttggcattgtctccttctatctccaacgtttccccgaactctaacaaacgtggccgtggaagacctcctggctccggcaagaagcaacggctatcttccattggtgaaatgatgccttcatcaactgggatgagcttcacaccgcatgtaatcgtagtttccattggtgaagacattgcttcaaaggttatatcgttctcgcatcaaggtccacgagcgatatgtgtcttatccgcaagtggtgctgtctctactgcaactcttcttcagccagcaccttctcatggaactattatatacgagggtctattcgagctcatatctctctcaacttcttatctgaacacaactgacaatgactacccaaaccgcactggaagtctagcggtctcacttgctagccccgatggtcgtgtcattggtggtggaattggaggtcctctaatagcagcaagccaagtccaggtcattgttggcagcttcatttgggcaattccgaaagggaagattaaaaaacgtgaagaaacttctgaagatgtccaagatactgatgctttggaaaacaacaacgataacacagcagcaacgtcacctcctgttcctcagcaaagtcagaacattgttcagactcctgtaggcatttggtcaactggttcaaggtcaatggatatgcatcacccccatatggacattgatctaatgcgtggatgattcatgtatatataagcattgaatctaggagaagaagaagaaacttgagctaacctccctgaaacaaagtagtctattgctattgtttaggaaagaaaaagacaattagtaagtttaggaatttctgcgtgttttcgagctttcagttagttgatttggtctcttgacttgttatgaatggg

SEQ ID NO: 12986 - DNA, 2558 bp, Arabidopsis thaliana columbia
  Clone ID: JC-ATXLIB327417P1D12_FLI
gttttcgcgggcagctcacatttctctccaccgtctcctcgtcttctctcaccaaagatcagagcaaaagtggaattggacaaggtcatttttactactttctctgggttgggggttctatgatacttgtactggattgataatgagtatcaacagagatgaggctcttagagccaaagatcttgcggagggtttgatgaaaaagaccgattttactgctgctcgtaagcttgcaatgaaggctcaaaaaatggattccagcctggagaacatatctcgtatgataatggtttgtgatgttcactgtgctgcaacggagaagttgtttggaactgagatggattggtatggtattcttcaggttgagcagatcgctaatgatgttatcatcaagaaacagtacaagaggcttgcgcttcttctccaccctgacaaaaataagctccccggtgctgaatctgcttttaaattgattggtgaagcccagaggattcttttggacagagagaaaaggacgcttcatgacaataaacgcaaaacttggagaaagcctgcagcaccgccatataaagcccaacagatgccgaattatcacacacaacctcattttcgggcaagcgtcaatacgagaaacatcttcactgagttgagacccgaaatcaggcatcctttccagaaagctcaagcccaaccagctgctttcactcaccttaaaacctttgggacctcttgtgtcttctgccgggtgaggtatgaatatgatcgggcacatgtcaacaaggaagtcacttgtgagacttgtaaaaaacgtttcactgcttttgaagaacctttgcagagtgcaccacaggcgaaaggcccatctcagactacttattgcttcccacagcagagcaaattcccagaccaaagggcttgcagtgaaccacacaagcgtccagaaaatcctcccactgtttcctctagcaaggcgagtttccctatgccgggttctactgcaaaacacaatgggaagaggaagaggaagaatgtggctgaatgtagtgaaagctctgacagtgaaagtagcagtgagtcagaagatgatgtaaataatgatactacggcagcacaagattcagggtccaatggaggagagcagcctcggaggtcagtccgtagcaagcagaaggtttcctataatgagaatttgagcgatgatgatgtcgacttagtcaacgacaatggggaagggtccgggaaaaacattgatactgaaagggaaaaagaaacagaggaagaaaagcagacaaatgagaatcatagctccactgaaagcatagacatgaatgggaagatagaagttgatcaggtggaaaccccttctggtgcgagtgattcagaggaagatttaagttcagggagtgcagaaaaaccaaatttgatcaactatgatgatcctgatttcaatgacttcgataagttgagggagaaaagctgttttcaagctggccagatctgggctgtgtatgatgaagaagagggaatgcctagattttatgctctcataaaaaaagttacaactccggatttcatgcttaggtacgtctggttcgaggtagaccaagatcaagagaatgaaacaccaaatttgcccgtctctgttggtaagtttgtagttgggaatattgaggagacgaatttgtgttccattttctctcattttgtctacagcacaacaaaaatcaggactcgcaagtttactgttttcccaaagaaaggagaaatatgggcccttttcaagaactgggacatcaactgctccgctgactcagtttctcctatgaagtacgagtatgaatttgttgagatcctgtctgaccatgcagagggagccacggtatcagttgggttcttgtctaaagtgcaaggctttaactgtgttttctgtccgatgccgaaggatgagtcaaacacttgtgagattccacctcatgaattctgtagattctcacatagcattccgtcattcagattaacaggaacagaaggaagaggcataaccaagggttggtatgagcttgacccagctgctttgccagcctccgtctctcaaaatctatcaggagaagaagctgctcaagaccgagaccgccagtctccaccttcaggatctgcctcttgatattatctcagtcagaggctcttttgtgaccatgaattgctcaacgcgaaattcttggagctcgttttattttgttcaggcgtacaggtttacagacaagagaaaccaaagctcctcagaggcatcgtttaagcccgatacctcgctgttgtcttgtgacatactcgagtcatgattctggtgggaattttttttgttatatgtctagctcttacgtttctgtttttgttttaggttctctcagacttgaaacttaaccagtatttgtctaaatacttcattgttgctagagtaagaaactgttgaaacaagtggtgaaaaccctttttggccatattctacttgtactatccattgttcacttgtaagttgtaatatagcatcagtttcgatt

SEQ ID NO: 12987 - DNA, 1394 bp, Arabidopsis thaliana columbia
  Clone ID: JC-ATXLIB327417P1E07_FLI
tcgcgatctagaataaaagatggaggaagaaagagaaaacactaactctatctacatagtttccgagctacttgaagaaattttccttggattgcctttgaaatcaatcctcaaattcaaaaccgtctcaaaacaatggagatcaatcctggaatcgaacttgttcgtggagaggcgtagaactcttcaaaagaaccacccgaaaatcctggctgcttataactgcgactactgcacgcggccgggtatcctccctaagtctcagttcgaaggggacgaagagatcgtttatcttcataccgacgccacgcaaccctcgatgacttgcgacggtttagtctgcatcaccgaacctggttggttcaacgttttgaacgtctccaccggacaactccgaagatttctacccggtccagatccaggaccgcaagcaaattggctcttgggattcggtagagacaaagttacgggcaagtataaaatagtgaggatgtgttttcatgattgttatgaatttgggattcttgatattgaatctggcgaatggagcaaactgatgtcacctcctcatataatgcgagtgggaagtaaatcggtgtgtgtgaatggatcaatctactggttacaaattagtgtgagttacataatactggccttggatcttcaccaagaaacgttcaatggtgtctaccacctcccggctacgtgggtcacgcaagatacccaattagtgaaccttgaggaccgtctagccatggccatgacgaccaaagttgggcctgaatggatactagagatctggagcatggatatagaagaaaaaggatggagcaagcgttacacatggagcaaggcttactccataagtttagcccatagagttgttgtatcctggccatggcaaaaaaggtggttcacgccggtatcggtttctaagcaagggaatcttgtcttctatgataatcacaagaggctgttcaaatattattcaggtacagatgagattcgttgtctctcctctaacattaatgttatatcttcttacgttgaaaatttggccccacttccgttaaaaccaagccatacgcatcacgatcttgggaattcgaattccaagttcagcacatccagatgccacttgtttccgacgcgaggttcttggatatccaaagtttttagaaggaatgttttgtttacctctctagtagtagttggttatatatacttacctctctaagagtttacttatttagtatcaaactattattgtggttctaaagatcttgttatgtttttaatgctaatgaatttaattgtttgcttttatagtttactctctactattttattaagggaaaattagaaataaagggggtctaaaaaagactttgacc

SEQ ID NO: 12988 - DNA, 2794 bp, Arabidopsis thaliana columbia
  Clone ID: JC-ATXLIB327417P1F02_FLI
ctcctctcaccatttcttcttcttcttctctctaaaagaaaagagacttcaccgattcttttttattattccttcccagattttctcgggaaattaattcttttcctcctctttcttctcacttgttgttgttccttaacactctcttcctagatctactattaactgatttcatttcacgactaaaccatcgaagtcttcggcaagatatggatttgtttctgttctattaaacttgtttcaatcgagaagtaaaaaagaatccgattccacagatggaactatgtgctgtggatcagaccgattaaaccagatcgtgtcatcaagatcttcgttgccaatttctttcgaggaagataacaatcttgttaccaacacagacatgaatcacttaacagtcgaaacagaggatacgtttgcgagcttgcttgagcttgcagctaacaacgatgttgaaggtgtaaggctatctatcgagagagacccttcttgtgtagacgaagctggtctctggtacggtcgtcaaaaaggttctaaagctatggtcaacgattacaggactccgttgatggttgctgctacttacggaagcattgatgtgatcaagcttattgtttctttgactgatgctgacgtgaaccgtgcttgcgggaatgatcagaccactgcgttacactgcgctgcttctggaggagctgtgaatgctatccaagttgttaagctgcttcttgcagctggagctgatttgaatctgttggatgctgaaggtcaacgagctggtgatgttattgttgttcctcctaagcttgaaggcgtgaagctgatgcttcaggagcttctttctgctgatggatcatctactgcggagcggaatctacgggttgtgacaaatgttccgaatagaagctcatctccgtgtcattctcctactggagagaatggtggatcagggtctggttcaccgctcggctctccttttaagctgaaatctactgaattcaagaaagagtatccggttgatccgtctttgccagatatcaagaacagtatctacgcgactgatgagtttagaatgtattccttcaaggtccggccttgctctcgtgcttattcacatgattggactgagtgtccttttgttcacccgggtgaaaacgcgaggaggagagacccgaggaagttccattacagctgcgttccttgcccggattttaggaaaggagcttgtaggagaggagatatgtgtgagtatgcgcacggtgtgtttgaatgctggcttcatccggctcagtacaggacccgtctttgcaaagatggaacaggctgtgctcggcgggtttgtttctttgcgcatacacccgaggagcttcgacctttgtacgcatcaactggttcagcggttccttcgcctagatcgaatgctgattatgcagctgctttgagtctccttcctggttctccatcaggagtctctgtcatgtccccgctttccccatcagcagcggggaacggaatgtctcattcgaatatggcttggccacaaccaaatgtccctgcgttgcacttaccaggaagcaatctacagtcaagcaggctaaggtcttctctcaatgcaagggatatcccgacggatgagttcaatatgttagcggattacgagcagcagcaactcctcaacgagtattccaatgctctgagccgttctggtcggatgaaatcaatgcctccttcgaatcttgaagatcttttctcagcagaaggctcttcatctccccggttcactgattccgctttagcttccgcggtgttctcgcctacacacaagtcagctgtcttcaaccagttccaacaacagcaacagcagcagcagagcatgttgtctccaatcaacacaagcttttcttcaccaaagagcgttgaccactcattgttttcaggtggaggaagaatgtctcctcggaatgttgttgaaccaatatcacccatgagtgctcgggtttccatgttggctcagtgcgtgaagcaacaacaacagcaacagcagcagcagcagcagcaacatcagttccgtagccttagctccagagagctcagaacaaactctagcccaatcgttggttcaccggtaaacaacaacacatggtcatcaaaatggggatcttcaaatggtcaaccggattggggaatgagctcagaagcacttggtaagttgagatcttcgtcatcgtttgatggtgatgagcctgatgtgtcatgggtccagtcactggtgaaggagactccagcagaagccaaagagaaagcagcaacatcttcctcaggggaacacgtgatgaagcagccaaatccggttgaaccggtaatggatcatgctgggctagaagcttggattgagcaaatgcagctcgatcagcttgtggctcagcagaattgagagacctaaccaaagaatcacatgttcttgtctggtctctctatgtggtagataaaaacctcttttttacaggtggtggtggtagaagggtaacaagattaacaaagaagagaagagaagaaagaagatttctttgtttttggtcaattaattttcacaaaaaacagttttttttttttttatttagagaagagaagggaacaatacaagaaaaaggcttatgggaagaaaggagatgaaacaaaaccttcttggttttctttctcccattttcaatttttttttagggatttctttctcccattatcattattattattgttattaatattattattttttatatattttattgttatg

SEQ ID NO: 12989 - DNA, 1540 bp, Arabidopsis thaliana columbia
  Clone ID: JC-ATXLIB327417P1G12_FLI
cctctctatctctctctaagtatcagcaaaaaaacagagatttatagagagagaaaaaaactatggctcacataaagatctaacagagacagtagtatagtcccacttccccaccaccaaagcttcgatcatcatcatcatcatcatcatggatccggatccggatcataaccatcgacccaacttccctctccagcttcttgattcttctacctcctcctcttccacttccttagccatcatctctactacttccgaacctaactccgaacctaagaagcctcctcctaaacgaacctctactaaagaccgacacaccaaagtcgaaggccgaggccgtcggatccgtatgcctgccatgtgtgctgcacgtgtctttcagctcacacgtgagcttggtcacaaatccgacggtgaaactattgagtggctactccaacaagcagaaccagcggttatagccgctacagggactggaaccattccggctaacttcacttctttaaacatctcacttcgtagctcaagatcttctctctctgctgctcatcttcgtacaactcctagtagctattactttcattcaccacatcagtccatgactcatcatcttcaacatcagcatcaggttcgtcccaagaacgagtcacattcttcgtcttcttcttcttcacagcttttagatcacaaccaaatgggtaactatctagtacaatcaactgctggatctttacctacgagtcagagtcctgcaacggcaccgttttggagtagtggtgacaacacacagaatctttgggcttttaatattaatcctcatcattccggtgttgtcgccggagatgtttacaaccccaacagtggtggtagtggcggcggtagtggagttcatttgatgaattttgcagctcctattgctttgttttctggacagcctttggcttctggttatggaggaggaggaggtggcggtggagaacatagccattatggagttttagcggcgttgaatgctgcttaccgaccggtggcggagacggggaaccataacaacaaccagcaaaaccgtgacggagatcatcatcacaaccatcaagaagatggaagcaccagtcatcattcctaggcaaacatacacaaacaaatatattctgtgagatttatttttctttttttgtcctttcgtttgtttgtttgttcttaacaagcgtgttttttttgcattgcttctttttcatatatttttatttatttctaaattctaatattctacggatttcatcttgtttatttttctgattaatgtattgagtaagtaattaagaacctgataatcgatatgttttagtttgtggtttttgcatgcaaggctttggttttattattctagagatttttgcttgaagtagttgtcttgtgaaatgttttcctcattactattgagtgtgagagttttctaatacttgattagggtttttgaacaatttttatatatgtatattaattcagtacggattatcaataaattatttcgcatgcc

SEQ ID NO: 12990 - DNA, 1075 bp, Arabidopsis thaliana columbia
  Clone ID: JC-ATXLIB327417P2E11_FLI
attatgtggtgacgtagctgcgttgggatggtgggacttatttataaacttcggaatagcagagtgctttgcgtttcttgtctgtacaaagtggagcaatcagtcaattcataggtattcacatataccggaacctagctcatcttcaatggtagtaagatatctggattggaacagaggtctagtagtaaccgctgacgacgagcatcagcaaagcaacagaatatgtggtctccaagatattggtggacatgttatgaaaattccatttgtgacctttcaaatcatccttttcatgcgcttagagggaacgccagcttctgccaaaaacattccgattttagttctgtttgtacctctttttctgttacaaggagctggggtactttttgctatgtatagattggttgagaaatcagtcttattaataaatagtggtagtggttcttatggaagatattttaccgcaacatcatcagctcgtgaattcctgggattctttcaacatggtgcaagattacttggctggtggtctatcgatgaaggaagtcgggaagaacaagcaaggctctactctggagaagctactggatacaacaccttctcaccagaggttgtgaagaaaatgccaaagtctgatcttgttgaagagatatggagacttcaagctgcattgagtgagcaaacagatatcaccagttatagccagcaagagtacgaaaggcttcaaaacgagaagattctttgtagagtttgctttgaagatccgatcaacgtggttctactcccatgtagacatcacgtcctctgcagtacatgctgcgagaaatgcaagaaatgtccgatttgtcgtgtcctgatcgaggagcgtatgcctgtatacgatgtgtagatttcagagctccaatccagaaatgaagaatacatttcttgcttgtttggttttgttttagtaatgaagcaagcactatatatatatatgttacaacttgcataggaaaaattctgattcgttttcgagtggatgtaaataatactgtaaaccatcgtatatgtcatgaatcttctttctctc

SEQ ID NO: 12991 - DNA, 765 bp, Arabidopsis thaliana columbia
  Clone ID: JC-ATXLIB327417P4E02_FLI
ctcatcccattccctcgtcttcacttcttcatggttggttttgctcctctcacctcaagaggttcacagcagtaccgctccctcacagtccctgagctcacccagcaaatgtgggactccaagaacatgatgtgtgctgcagacccaaggcacggacgctacctcacagcctctgccatgttccgtggcaagatgagcacaaaggaagttgacgagcagatgctgaatgttcagaacaagaactcgtcctactttgtggagtggatccccaacaacgtgaaatcaacagtctgtgatatcccacctactggtctgaagatggcttccactttcattggaaactcaacatcgatccaagagatgttcaggcgagtgagtgagcagttcacagctatgttcaggaggaaggctttcttgcattggtacacaggtgagggaatggacgagatggagttcacagaagcagagagcaacatgaacgatcttgtgtcagagtaccagcaataccaagatgcaacggctgatgaagaaggtgactacgaggatgaggaagaaggtgaataccaacaggaagaagagtactgagagtaatttagttataaaaaccgcttgaaaaaatcaatttagtcgtttgctactttttttcttaaaaaaaaaaatgagaacctcaactaccagttgcaggtttatttctatgcttgtatttgacttatctggatgatgtttatgtactttgtttttaaatttggttcggtctttagtttg

SEQ ID NO: 12992 - DNA, 1727 bp, Arabidopsis thaliana columbia
  Clone ID: JC-ATXLIB327418P1A06_FLI
ctctgatttagtgatttttcaaatttcaagttttcttcacctttaattttgtgtctcgttgatctctctttggacattctgctttggattctggaggcttctcattagatctctattagtgggtttaggtcaagttcttgaaatggataaggagaaatctcctgcaccaccacctagtggaggtcttcctccaccatcgggtcgttactctgcgttttcacctaatggaagtagctttgcaatgaaagctgaatcatcttttcctcctttgactccaagtggaagcaatagctcagatgctaaccgattcagccatgatattagccgaatgccggataatccacctaagaacctaggccatcgccgagctcattcagagattcttactcttcctgatgacttaagctttgatagtgatcttggtgtggttggtgctgctgatggaccttctttctctgatgatactgacgaggacttactctatatgtatcttgatatggaaaaattcaattcttctgctacatcgacttctcaaatgggtgagccatcagaaccgacttggaggaatgaattagcctcgacttctaaccttcagagtacacccggtagctctagtgaaagaccgagaattagacaccaacacagccaatcgatggatggttcaacaactatcaagcctgagatgcttatgtcagggaatgaagatgtgtctggagttgactctaagaaagccatctctgctgctaaactttctgagcttgctctcattgatccaaaacgcgccaagaggatatgggcaaacaggcagtctgctgcgaggtcaaaagaaaggaagatgagatacattgcagagctcgagagaaaagtacagactttacaaacagaggccacatctctctcagcccagttgactctcttacagagagatacaaatggcctgggtgttgaaaacaatgagcttaaactgcgagtacaaactatggagcaacaggtccacctacaggatgctttaaatgatgcactaaaggaggaagtccagcatcttaaggtattgacggggcaaggtccatcaaatggtacatcaatgaactacggttcttttggatcaaaccagcaattctatcccaataatcagtcgatgcacactatcttagccgcacaacagttacagcagctccagatccagtcacagaaacagcaacaacaacaacagcaacaccagcaacaacaacagcagcagcagcagcaatttcactttcaacagcagcaactgtaccagcttcagcagcagcaacggcttcaacaacaggaacaacaaagcggggcttcagagctaagaagacccatgccttctcctggtcagaaagagagtgtgacatcgcctgatcgtgaaactcccttgacaaaagactgagtctagactgtgctaatgtccaatttagtaagttactcttggaaaatcttctttttcatcgcaggctcatggatttgggatttactgcattatagagttaaaaacaagacagcttagaagttgcggatttagaagttgttagtgaagcttttgttctcgtctgttggtagtttacaatcttctctttgtatgatcctaagctcttaaaaagttcttggatttggtcatttggttagaaatgggtccttagtccaagtctgtagtcgtttaaccatattcatattctttgccttttgttcattttggttacttg

SEQ ID NO: 12993 - DNA, 1064 bp, Arabidopsis thaliana columbia
  Clone ID: JC-ATXLIB327418P2D08_FLI
gttttgggattctcaaaaaactcaaaataaactttcctcatttttttttttctttcttttgttttgttttctttataaaggagaaagaaagagaaagagagtttccgaaagctgaattgagttgggtgaagcaaattctcaggatgggaagaggaaagatagaaataaagaggatagagaactcaacaaatcgacaagtgacgttttgcaaaagaagaaatggacttctgaagaaagcctatgagctttcggtcctttgcgatgcagaagttgcgctcattgttttctccactcgtggccgtctctatgaatacgccaataacaacataagatcaaccattgagaggtacaagaaagcttgttctgatagcaccaacactagcactgtccaagaaatcaatgccgcgtactatcaacaagaatctgctaagctgagacaacagatccaaacgattcaaaactccaacaggaatctgatgggagactctttgagttccttaagtgtcaaggaactaaaacaagttgagaatcgccttgagaaagctatctctaggatcaggtccaagaagcatgagttgcttttagttgaaatcgaaaacgcgcagaaaagggagattgagcttgacaatgagaacatctatctaagaactaaggtagcagaagtggagaggtatcaacaacaccatcatcaaatggttagtggttcagagattaatgcaattgaagctttagcctcacgcaattactttgctcatagcattatgactgctggttctggatctggtaatggaggttcttactctgatcccgacaagaaaattcttcatctcggataatctcgtctgcgaaaaaccgagctgcaataactctctgcatgcatctggggattctttgctcagatttatctctacataaaatatgttttggtgcaaaataattcaaagtacaatgaaggtattggtccttcaagactcattgcaatttgtgttgtgtaatgattaagacatactctagtttttattgcttcgtatcatagtatctattctatggtatcttatttagtg

SEQ ID NO: 12994 - DNA, 853 bp, Arabidopsis thaliana columbia
  Clone ID: JC-ATXLIB327418P4D12_FLI
gcttcaacattgcttcctaaccagaaatccaccatcatcttcccacgaatacaacttaaagctttaccagaaaatggagggtcagagaacacaacgccggggttacttgaaagacaaggctacagtctccaaccttgttgaagaagaaatggagaatggcatggatggagaagaggaggatggaggagacgaagacaaaaggaagaaggtgatggaaagagttagaggtcctagcactgaccgtgttccatcgcgactgtgccaggtcgataggtgcactgttaatttgactgaggccaagcagtattaccgcagacacagagtatgtgaagtacatgcaaaggcatctgctgcgactgttgcaggggtcaggcaacgcttttgtcaacaatgcagcaggtttcatgagctaccagagtttgatgaagctaaaagaagctgcaggaggcgcttagctggacacaatgagaggaggaggaagatctctggtgacagttttggagaagggtcaggccggagagggtttagcggtcaactgatccagactcaagaaagaaacagggtagacaggaaacttcctatgccaactcatcattcaagcgaccacagatcagataaaccctcccgctctctctcttctgtcatctacatatgctctatctacactcttattagacaaataatggcatctaacaatgtcaagaaaagttggtcatggtattaaatcctacacggatatataactataaacctctagtcccctctatgctgtcctgtaatgaatatctatccggaaatgtattcgcatagtcttgcgtctaataatgtttattgattttgtaggtttgattat

SEQ ID NO: 12995 - DNA, 1783 bp, Arabidopsis thaliana columbia
  Clone ID: JC-ATXLIB327419P2D10_FLI
gcaaatttcgaccgagttttgttgaattccgattagatctttcttccacgaaacccccccaagtacccattccatcttctccggtgagtctcccatgttggcattacgctagggttcttcttctctgtggtttcgcataacccaataatccaattttctacttgggcatcaatgggtcgctctcgagggaacttccaaaatttcgaagaccctactcagagaacgaggaaaaagaaaaatgcggctaatgtggagaactttgagtctacttctttggtaccaggtgctgagggaggagggaagtataactgcgattattgccagaaagacattactggaaaaattaggataaagtgtgctgtctgtccagattttgatctctgtatagaatgtatgtctgttggagcagagatcactcctcacaaatgtgatcacccataccgagttatgggaaatctaactttcccgcttatttgtcctgactggagtgcggatgatgaaatgcttctcctggagggacttgaaatttatggcttgggaaactgggcagaggttgcggagcacgtgggaacgaagagtaaagaacagtgtcttgagcactacagaaacatctatttgaactcaccatttttcccacttccggatatgtcacatgtagcagggaagaacagaaaagaacttcaagccatggctaaaggacgcattgatgacaagaaagcagagcagaacatgaaagaagagtacccgttctctcctcctaaagtcaaagttgaagacacacaaaaagagtcttttgtagacagaagttttggagggaagaaacctgtttccacctcggtaaacaactctttggttgagctgagtaattacaaccagaaaagagaagagtttgaccctgaatatgacaatgatgctgagcaactcttggcggagatggagttcaaagagaacgatactcctgaagaacatgaactgaagctgcgtgtgttgcgtatctattcaaaaaggcttgatgagaggaaacgtagaaaagaattcataatagaaagaaacctgttgtacccaaatccctttgagaaggacctgtctcaggaggagaaagtacaatgccgacgtttggacgtttttatgcgttttcattcaaaagaggagcacgacgagctactccgtaatgttgtaagcgagtaccgcatggtgaaacggctcaaagatctcaaggaagctcaagtggcagggtgtcgttcaacggctgaagcagagaggtatctgggaaggaagaggaagagagaaaacgaagaagggatgaacagagggaaagagagcggtcaatttggtcaaattgcaggggagatgggctctagaccacctgtgcaagcttcttcaagctatgtgaatgatttggacttgattgggttcacggagtcgcaactgctgtctgaatccgagaagcgtctctgcagcgaggtcaagttggttccaccggtttatctacagatgcaacaagtgatgtcacatgagatattcaaagggaatgtaacgaagaagtcggatgcatatagccttttcaagattgatccaaccaaagtggatcgagtttatgatatgcttgtgaagaagggtattgctcaactttaaggcttgtgtagtgttgtatcatatatatatatgtgtgagctctaatgagttatttgttgacattcccttgtttattacaccttgtcaaaattagtttgtaatagaaaaacgattaagttatccacagattgtgaaaagagataaggtg

SEQ ID NO: 12996 - DNA, 887 bp, Arabidopsis thaliana columbia
  Clone ID: JC-ATXLIB327419P4D06_FLI
gtggcgtatcatttcatcgatcgagcagaaggaagagagccgtggtaacgatgaccacgtcacggcgatccgtgaatataggtctaagatcgagacggaactctccggaatctgcgacggaatccttaagttgcttgactctagactcatccctgccgctgcttctggtgattccaaggtcttttaccttaagatgaagggagattatcacaggtacttggctgagtttaagactggtcaagagaggaaagacgccgccgaacatacactcgccgcttacaaatctgctcaggatattgctaatgcagagcttgctccaacacacccaattcgtcttggtcttgcattgaacttctctgtgttctattacgagatcctcaattctcctgatcgtgcctgtaacctcgccaaacaggcctttgatgaggcgattgcagagttggacactcttggtgaagagtcatacaaagacagtaccttgatcatgcagcttcttcgtgacaatctcactctctggacatctgatatgcaggatgatgctgcggatgagatcaaggaagcagcagcgccaaaaccgaccgaggaacagcagtgatcttttgagtgaaactgctagttttcttctagggtttggaatttcttctctttctcgcccatatgtttttcttaatccatctaagaggtcgctcttgccatttcgctcatcttcaaaagcttattcattcatcatatttgtggcaagtctgaaccatcaatcatctttttatctctttttaatttattttctcttttcttatttctttgttgttatcgatttcaatgtctgtgtaatcgaaacttgctttcttttctcatcaatttgaagatcataaagtctcttgtctctt

SEQ ID NO: 12997 - DNA, 1166 bp, Arabidopsis thaliana columbia
  Clone ID: JC-ATXLIB327420P1B02_FLI
taaccacaagtctccgtttcaaagagcagcttctcacatcgctgaagctctcctctcactcatccacaacgaatcatcaccaccgttaatcacgccggagaatctgattctccgaatcgccgcttacagatccttctccgaaacctcgccgtttctccaattcgttaacttcacagcgaatcaatcgattcttgagtcctgcaacgaatcagggtttgatcggatccacattatcgatttcgacgttggatatggaggacaatggtcgtctctaatgcaagaactcgcttccggagttggaggaagaagaagaaacagagcatcgtctctgaaattaacagtctttgctcctccaccttctacagtctccgacgagttcgagcttcgtttcacagaggaaaatctcaaaacattcgccggagaagtcaagattcctttcgaaatcgagttactaagcgtagagcttcttctaaacccagcttattggccactctctctacgttcatcggaaaaagaagcaatcgcagtgaatcttccagtaaactccgtcgcctccggttaccttccgttaatcctccgattccttaaacaactatcaccaaacatcgtcgtttgctcagacagaggatgtgaccgtaacgacgcgccgtttccaaacgcagtgattcattcgcttcaataccacacttctctgcttgagtctcttgatgctaatcagaaccaggacgattcgagtatcgagaggttttgggttcaaccatcgatagagaagctgttgatgaaacgacaccgttggattgaaagatctccaccgtggagaatcttgtttacacaatgtgggttttctccggcgagtttgagtcagatggcggaagctcaggcggagtgtttgttgcagagaaatccggtgagagggtttcacgttgagaaaaggcagtcttcacttgtcatgtgttggcaaaggaaagaacttgttactgtctctgcttggaaatgttagacgaagaagaaaccacaaatctctctctcgcttagctaatttctctgtttttctttgtcagattttaaaatgttgttatgttgttcaatgatgttcttagtttcgagactgttgtgttttaacattttaaggaagtcagaatatataatcaaaatctccttttgtt

SEQ ID NO: 12998 - DNA, 1169 bp, Arabidopsis thaliana columbia
  Clone ID: JC-ATXLIB327420P3A01_FLI
tcaaaagcaccttccttttttttcctattctttctcatcatctttcttattatgaactaaaataaatgttcagacaaaggagccatttctaccatttataattttatattacacaactatatgtgtgtttgtgtgtgtgtgtagccgtggggatttatatatacatataacatatattgacaacctctactactgtcatttagcctgcaaagcccacaaacaaagggctacacaagtcttccttctctctctccctcttcctctctttagatggaataatggatcaatgcttgtaaaggtttgaaatttgatcaagttttgaagaagcaaattgaaaaagaaaagaaaagagaagacatggaggtggagaagaggattgtagtgaatggaggaatgaaattgccaataggatacagatttcacccaaccgagcaagagcttatccttcattacttgctcccaaaggcctttgcttctcctttgccttcctccatcatccctgtctttgacctcttcttctctcatcctcttagtttcccaggggaccaaaaggagaagcagaggtacttcttttgcaagaagagagaagtgtcaagtaatgagcatagaatcaagatttcctctggtgatggttattggaaacctattggtaaagagagaccaatcattgcctgtggtaaaacatttgggattagaagaacacttgctttctatgaaacaaacaagtcttcttcttattgcaacaaaactagatggagcatgacagagtattgtcttgcgggatttgcgtcggctaaggtgtctggagaatgggcagtgtacaatgtttatgagaggaaaggctcaaaaggaagaaaacagaggaaatcaagagagggagatgatgaagaattgagatgcatcgaccattttacggttgggtcaaatcatgaaaccggtccaccaccgccttctcctcctacctcagctgatgagtaatatatatatctcataggagacgttgagattgtgacaagctcctaaaccctaacctactattccacttacgtttctgtcaagctatttaaaaaatttcaacgtcttgatttatttgttagcgaagtaagtaaagtaacatggttctaggggagctcattttgatctgaaactgttgaattgtatgagttgag

SEQ ID NO: 12999 - DNA, 509 bp, Arabidopsis thaliana columbia
  Clone ID: JC-ATXLIB327421P1F03_FLI
gatcgaaagaagttgcagaggcaaaggatccatctttgctatcgccactcttctttggggttcgaaagagccagactttgtttaattatgccgataattatgtgcagagtcgtcgctagttttgttctgtaaggagcagaacagtctcctccatccctctatgtgaagtccacaattgctccacttttcagaagccaaggacttgatgcttggtgtggcgcctgatctcgacacaccggaagcagtcgatgctgccattgccagccatcaacctgcgacctgttttggcctctgaaaacggagactctgagagcagccataagagtgatcgagaaggaaaagagaagagttgtttgtgtgaatctagccgaaaaacgaaccaatatcatagagctctcataaaacatagcatcttctcaatgcatgggcaatccatgtaaaatagtaatttactcaacattcaaaagtggatacaacactggtcatgcatatattattgacatttatag

SEQ ID NO: 13000 - DNA, 688 bp, Arabidopsis thaliana columbia
  Clone ID: JC-ATXLIB327421P2D11_FLI
ccctattactgcttttgttacgaaagacaaaaaaacaaaacaaaacaaaagtcagctcaggcgaagaacagatggctcgtaccaagcaaaccgctcgtaagtccaccggaggtaaagctccaaggaagcaacttgctactaaggctgctcgtaaatctgcaccaactactggtggagtcaagaaaccacatcgttaccgtcctggaactgttgctctccgtgaaatccgtaagtaccagaagagtactgagttgcttatcaggaaactgccatttcagaggctagtccgtgagattgctcaagatttcaagactgatttgcgtttccagagccatgctgtcttagctctccaggaagctgcagaagcatatcttgttggtctctttgaagacactaacctttgtgccattcatgccaagcgtgtgaccataatgcccaaagacattcagctcgctcgtcgtatcagaggtgaacgcgcttaagccaaccaagaatccgagatttggttcaagtagtttttgttttttatgaaagcaagatcttaattgctgtgttttttaaatctctgggtatgtagtagtaagagtagtaagaagtctgcaatctaagaatgttgtgttctttaagcttattattatgtgtgttgcgaactctttttaactcttttgttaaattcttatgttttctt

SEQ ID NO: 13001 - DNA, 406 bp, Arabidopsis thaliana columbia
  Clone ID: JC-ATXLIB327421P3E08_FLI
aagacgacagaaggggtggagacgcagcgaagtacgggcatgagattgtgccgttgaaaacgtcgaattcgcagctgacgctggaggatatcgccgacgcggctcagccaagtggagcatttaagtgggactctgaaaccgatttgaaggtcgacggttagttatattttatatgatcgatcgtctaatcacaaagaaagtaagggaaagaatcaaggaagtaagaataagaagataataaataaagagaataagaagaggcatttgcaactttaagaggttaaaatttcttaaatgagtctgagtttcgttgtgtgttttgggtgtaccataagaaataaaacgtacggggttgctatgtattttgtgaagtgtgtatttctggttgaatattagtctgcgtaat

SEQ ID NO: 13002 - DNA, 1581 bp, Arabidopsis thaliana columbia
  Clone ID: JC-ATXLIB327421P4F06_FLI
tacggctgcgagaagacgacagaaggggaaaaagaacaaaaaaaaaaggtcaaaccaaaacgatggcgtttcatcacaatcatctctcacaagacctctccttcaatcatttcaccgaccaacaccaacctccacctccgcaaccgcctcctcctcctccgcaacagcaacaacatttccaagaagcaccgcctcctaattggttaaacacagcgcttcttcgttcctcagataacaacaataacttcctcaacctccacacagccaccgctaacaccacaaccgcaagcagttccgattttccttcctccgccgccgccgccgccgctgctaaccagtggctatctcgcccctcctctttcctccaacgaaacaacaacaacaacgcttccatagtcggagatgggatcgatgatgtcaccggaggagcagacactatgattcagggagagatgaaaaccggcggtggagaaaacaaaaacgacggcggaggagctacggcggcggatggagtagtgagctggcagaatgcgagacacaaggcggagatcctttcgcatcctctttacgagcagcttttgtcggcgcacgttgcttgtttgagaatcgcgactccggttgatcagcttccgagaatcgatgctcagcttgctcagtctcaacacgtcgtcgctaaatactcagctttaggcgccgccgctcaaggtctcgtcggcgacgataaagaacttgaccagttcatgacacattatgtgttgctactgtgttcatttaaagagcaattgcaacaacatgtgcgtgttcatgcaatggaagctgtgatggcttgttgggagattgagcagtctcttcaaagcttaacaggagtgtctcctggagaagggatgggagcaacaatgtctgacgatgaagatgaacaagaagagagtgatgctaatatgttcgatgggggattagatgtgttgggttttggtcctttgattcctactgagagtgagaggtcgttgatggaaagagttagacaagaacttaaacatgaactcaaacagggttacaaggagaagatagtagacataagagaggagatattaaggaagagaagagctgggaagttaccaggagataccacctctgttctcaaagcttggtggcaatctcattccaaatggccttaccctactgaggaagataaggcgaggttggtgcaagagacaggtttgcagctaaaacagatgaacaattggttcatcaatcagagaaagaggaactggcatagcaatccatcttcttccactgtattgaagaacaaacgcaaaaggtgacaatagcggaagagagcggttcgcgtagaaacaacaaacatatgatgtgaattggggaggtggaagatgggatttgaaagcagggttttagggatttaaagttgagaattttatggaggagtttggattatacagagagaggggacagtattagaaagtaactttttgtgcaattacatagtaacgtagtttggttatgtgattatgcccatatattttattaagtagcacacaaaccaaaaagaaaatatgaaaaccc

SEQ ID NO: 13003 - DNA, 1037 bp, Arabidopsis thaliana columbia
  Clone ID: JC-ATXLIB327422P1E12_FLI
acttgatcttcttgccgttaccaaaaccaaaatccctaaatttgccctcatttccctctgattagatcccttaccccgacaaagacaccaaaattcttgagggcgagagagctgattgatgtctttggtatctggagccagggacatggggttcgacgacaacaacaacaacaagaacaacaaggatggagatgatgagaactcctcctccagaacaagagccgacgacgatgctcttagtcgacagatgagcgaatcttctctttgtgctaccgaggaggaagaagacgacgattccaaattgcaattgggtcctcagtacactatcaaagaacatctcgagaaggacaaggatgatgagagtctgaggaaatggaaggaacagcttctcggaagtgttgatgtcaccaacattggagagactcttgatccggaagtgaggattgatagcctcgccatcatatctcctggaagacccgacattgttctcttggttcctgagaatggaaatccaaagggcatgtggtttactttgaaagaagggagcaagtacaacttgaaattcacttttcatgttaacaacaacattgtctctggtcttaggtacaccaatacagtttggaagaccggtgtcaaagtggacagagctaaggaaatgcttggaacctttagtcctcagttggagccatacaaccacgtgatgccagaagagaccactccttctggcatgtttgctcgaggatcatattctgcaagaactaagtttcttgatgatgataataagtgctacttggagatcaactacagctttgacatccgtaaagaatggcctgcgctttgaaactcggagaatgcgagagttgtctcctgagagaggatgttgtcggtagaagaaagttgtgtttgtttcactccatatctccgtttatttcgttgaacatataattgtgaatcgttttctgatcatcttagaacaagaacgacatttacttcctacatccttgatcttgatttttccagtaatgtcgttggaaatc

SEQ ID NO: 13004 - DNA, 689 bp, Arabidopsis thaliana columbia
  Clone ID: JC-ATXLIB327422P1F07_FLI
gttcgcatcctccacaagaagaaaattcgatcggtcgattagtctttgtttgatttcgaaatggctcgtactaagcaaaccgcgaggaaatccacaggaggcaaagcaccaagaaagcaactcgcaaccaaggcggcaaggaaatctgctccggccaccggaggagtgaagaagccgcatagattccgtccaggaactgttgccttgagagagatcaggaagtatcagaagagcactgagcttctgatccgtaagcttcctttccagcgtctggttcgtgagatagctcaggatttcaagacggatctgaggtttcagagcagtgctgttgctgctttacaagaggctgctgaggcttaccttgttggtttgtttgaagacactaatctttgcgccattcacgctaagagggtcaccatcatgcctaaggatatccagctcgcgaggagaatcagaggagaaagagcttgaagactgttgttatggtttatatcttttgatttagttcgtcaatggaactctatttctggattttgatttgcgttttagtagtaatgggttcttgtaagtgttgagctttggctcgttttaattttcagttgttaggtactttggtttagttagccttgaagtgttcgatgaaataccccaacgaaactctctcctgtttaatagaacttattttcctt

SEQ ID NO: 13005 - DNA, 1039 bp, Arabidopsis thaliana columbia
  Clone ID: JC-ATXLIB327422P3A10_FLI
cttcacactctctacaatgttgtctatgctctggttccttctatctcttctctctcttcttctacttccttgtctccgaccttgctttcctgctaaaggatctctgaaaaacaaaaagaagattgacaagggaacttatgtggtcggagaggaggagacacctaaagagcttcagagagagctgatgccgagacacgtggcagtgataatggacggaaaccggagatgggctaaacagaccggattgttgacgtcacaaggctacgaggctggagctaaacggcttctcgagttcgctgacctctgcttcaaactagggataaatactgtctcagcttttgctttctccactgagaattggggaagacacaagattgaagtcaaatgcttgatgtatttgttccaacgttacctcaagtcaaagatccaatttttccagagcaaggaaatccgagtttctgttatcgggaatcttgcgaagatccctgagtctctcctccgaacagttcacgagttagaggaagctacaaagagttacaagaagaagcatctcatcttggccatagattacagcgggagattcgacatcttgggtgcttgcaagaacattgtgaagaaatcagaacaaggtttgatccgagaggaagacgtggacgagacgttgttcgagagagagcttcagactcggtgtaccgagttcccaagtcctgatctcttgattaggactagtggggaacagaggattagtaacttcttcttgtggcagctcgcttataccgagtttttcttttcgcctgtactttggcctgatttcgataagcagaagtttatagaggccctggtttcgtatcagcgcagggatagacgatttggctcccggctttgatccacatttgatcctatggtctgtcatgtttcctctgttttgttctgtttctctctgtgtctttatgttcatctgacttttgcagaaataattatactgtctagtctctcgtagatcaatgtggtatttccaatgaagtaacatattttatgt

SEQ ID NO: 13006 - DNA, 1265 bp, Arabidopsis thaliana columbia
  Clone ID: JC-ATXLIB327422P3H11_FLI
ataaaacaatctcaatactaatggctactaccaagctcgtctacattctcctcatcctattcaccttcaccgtatctccggcgatctcaacggccccggaacattgtgatagcggctttgataacccgtgcatcaacaaagctaaggctttaccactcaaaatcgtagccattgttgccatacttacaacaagcttgataggcgtgacctctcctcttttcagccgttacatttcgttcctccgtcccgatggcaatggtttcatgatcgtcaaatgtttttcttctggaatcatccttggaaccggtttcatgcacgtcttgcctgactctttcgagatgttgtcatcgaaatgtcttagtgataatccgtggcataagttcccttttgcgggttttgtcgctatgatgtccggtctagtcactctagccattgactccattaccaccagcctttataccggtaagaactcagtcggaccagtgcctgatgaagagtatggcattgatcaagagaaagcgattcacatggtaggccacaatcatagtcacggtcatggtgtagtgctagcaactaaagatgatggacagcttttgcgctaccaagtcattgccatggtattggaggttggcattttatttcattctgtggtcattggactatctctaggagcaactaatgattcatgtaccattaaaggactcatcatagctctttgcttccatcacttgttcgaaggcataggtcttggtggctgcatcctccaggcagattttacaaatgtgaagaagttcttgatggcattctttttcactggaacaacaccttgtggtatctttcttggaatcgcattgtcgagtatctatagagataacagtccaaccgcgttgattacgattggactgttaaatgcttgctcggccggaatgctcatctacatggccctcgtcgaccttctagctaccgagttcatggggtcaatgctccaaggtagcatcaaacttcagatcaagtgcttcacggcggctttgcttggctgcgccgtaatgtcggtcgtcgccgtgtgggcttaaacactctttcaacataatcaataaattatttgatttattattcaaggcgacaaatactttcgcctttgtatatttgagtttttgtttttaagtttgattcatttattagtttgtatagtgcatgtaagcgtttgaaagaaatttctttttatgacattgtaaatttatttttatgaatgcgatgtttacttt

SEQ ID NO: 13007 - DNA, 1218 bp, Arabidopsis thaliana columbia
  Clone ID: JC-ATXLIB327423P1E12_FLI
aaaggaattcccttctagtaaggcttctgcatgtacatgaacatatcctgtagcggaaacatctgattactactccctcctcctccaaacgcgttatccacggtggcatcaatgtaattaaacccaaaatcaagggtattgttattgtcattacttacggccgaccaatctttccacttgggcccgctctgaacctcgctcgtgaactccggcgacaccacctgctccgagcaactcgaatccgtagtatgcagcttcggcaccgaatccgacgtgtcgaaatacgcgaactcacttgtctgttgcggcggcggaggcataaccatctccgtcaccttcggcttctcctctcacatggctctacctaaccaacaaaccgtagattatcctagcttcaagctcgtcatcgttggtgatggaggcacagggaaaacgacctttgtgaagagacatcttactggggagtttgagaagaagtatgaacctactattggtgtggaggttcatcctttggatttcttcacaaactgcggaaagatccgtttttactgctgggatactgctggacaagagaaatttggtggccttagggatggatactacatccatggtcaatgtgcgataataatgtttgacgtcacagcaaggctcacatacaagaatgttccgacatggcatcgtgatctttgcagggtgtgtgaaaacatcccgattgttctgtgtggaaacaaagtcgatgtgaagaacaggcaagtgaaggcaaagcaagtcacattccacaggaagaagaatctgcagtactatgagatatcagcaaagagcaactacaacttcgagaagcctttcttgtaccttgctaggaaactggctggagaccagaaccttcactttgtggagtcactagctcttgctccaccagagattcaccttgacattgctgctcagcagcagaatgaggccgatcttgcagctgctgcagctcagcctctccccgatgatgatgatgacgcatttgagtaaaatcttccaaaaatgtctgctgtggttttcctctatgatgttttttgagttgatgttacatataaatcaatcggtctattttagaaccaaaattgggggaattatttggattgttctgttttttgggacccaaagagaatttgcagtcaagttttttctgccttaaagaatatgcggttattggaaaactttgattct

SEQ ID NO: 13008 - DNA, 945 bp, Arabidopsis thaliana columbia
  Clone ID: JC-ATXLIB327423P2E04_FLI
atgagttagagaataagcttgagcctgagaggaaagttaagttagctcaagaacttggtcttcaacctcgtcaagttgctgtttggtttcaaaaccgtcgtgctcggtggaagacaaaacagcttgagaaagattacggtgttcttaaaacccagtacgattctctccgtcataactttgattccctccgccgtgacaatgaatctctccttcaagagattagtaaactgaaaacgaagcttaatggaggaggaggagaagaagaagaagaagagaacaacgcggcggtgacaacggagagtgatatttcggtcaaggaggaagaagtttcgttgccggagaagattacagaggcaccgtcgtctcctccacagtttcttgaacattctgatggtcttaattaccggagtttcacagatctacgtgatcttcttccattaaaggcggcggcttcttcattcgccgccgcagctgggtcttcagacagtagcgattcaagcgctctgctgaatgaagaaagcagctctaatgtcactgtggcggctccggtgacggttccaggaggtaatttcttccagtttgtgaaaatggagcagacggaggatcatgaggactttctgagtggagaagaagcttgtgaattcttttccgatgaacaaccgccgtctctacactggtactccaccgttgatcattggaattgaagctgaaaacaccaccggaagagattttggattggattagatgctcttttcttctctgtggaaaaaacagaggagggcaaaatgggaataaagttaaaattgaagggtgaaagggcaattaaggaagggttaagtctgggcgggaataatgatttagggtgaatttgtaattatgctttttctctagtgattttcgtgcacttcttgtaattaaggatcatcagatcaaagagaaattgag

SEQ ID NO: 13009 - DNA, 511 bp, Arabidopsis thaliana columbia
  Clone ID: JC-ATXLIB327423P2F12_FLI
gattcaccggttgttatatcgtcgattcatcgtcgtcgacggcgagtacttgtgacctccacacccagattaatcttctataactgattttatcgcttagacgatcacgatctcatcgattaactgacaaatgaagcatgtagtaaagatcttgagcctgttggtggctatctctgccttctggattggtcttttgcaggctgcaattattcctcgaagccatacatggttgctaccgatctactttgttgtatccctcggatgctatggcctattaatggttggagtcgggctcatgcagtttcctacttgcccccaagaagcagttctgctgcagaaggatattgcagaggctaagggcttcttcaagcacaaaggggtagatgttggatcgaattgacacaaaggcttttatcagaccattcatcagggatatttttcgttattgacaaaagacttaactgtactgtttggaatttttgaatttaacagtgtcactgaggtaaaacgc

SEQ ID NO: 13010 - DNA, 2382 bp, Arabidopsis thaliana columbia
  Clone ID: JC-ATXLIB327423P2H06_FLI
cgaaaagacagaatcttttatttaattcattttttatttgaaagtacataattaaaaaaaataattaattaatcgtgatgagggcgttgaattcgcggctagttctgatcgacatcaacagctcctggcaagcttcgcgccggttaatctcagccaccgcaaccgctttttcatctgattcctcttcctcattccgtcggacacgtggtgcgcgtcagagaatcgcttcatcgaaatccccggcgtcgtcaccgtctcctgttcggagaccatctgatggattcagtttcgatgttcggtcaccgtcatctgattcatcgatctcatcacggaagtcaccgacgacggctccgcctacggtggagctcgacgctttcctagagattcttcctccggcgacgaggaaggagcttgttaagcacgaggcgattgaggaattgatcgaagtagtgatggatttagggagaaagccacttgctagattcccttccggcgattgggtgatctcagagcagcctgtgacacaccaggatctggagcttgcggtatcaaaggttggtgatttttcggatgataaccgatccgggattgacagatctttgcatcgtataagcgctatacgtaatcgcaaactgcaagtaattggtctaacatgtcgagtgggtcgagtagtctctggaagtgcagaaattataagagacttgattgaaggaggaggatccatcttggtcattggatctcctggagttggcaaaacaactttaatcagagaaattgcacggatgttagctgatgaacacaggaaacgtgtagtgattgttgacacgtcaaatgagattggaggtgatggtgatgttcctcattctggaattggtcgtgccaggcggatgcaagttccaaatgtgaatttacagcacgatgttatgattgaggcggttgagaatcatatgcctgagacaatcatcattgacgagataggaactgagcttgaagctttagctgctagcactattgctcaacgaggtgttcagcttgttgcaactgctcatgggatgactatagacaacataatcaaaaatccttctttgcagattcttattggtggaattgagagtgtgactcttggtgatgaagaagcaaggaaaagaaaagtgcagaagacaattcttgaaagaaaaggacctccgacattcacttgtgctgtagagatgatatcgagaactgagtgtcgtgttcatcaaagactagatgttaccgttgatgctatactagctgggaaatccgctccatttgagatccgtcaaattcgtggcgaagacgatgttcctcataagttagtgactcccattcctttggagaaccttgaagaggagcctgcaccattgctcaacagagatttcgtaagtgaattgctgtctgacgatgaagatgaagattttcttctcattcggtctaataaggccagaagtaacacatacacgagcccaagaagctcaccggttcatgtgtatacttacaatgtccttgaagctgatctcctccaagtagctgaagttatgggtctagacgacgaaatagaagtgacagatgatgttggagaagcagatgtcattctagcctcaagttctgaattgaaacagaattcatcaatccgtcgtgttgccaaattacacaagctaccgatatttgtcattaagtcaactactatggctcagatggtgaaggcagtccgaatgatccttggaagggaatcatttggctcagcccctaaagccatagaaaaatcttctgttgatgatatcgagatcaaagatgatgctcctgagagcaaacccagtttagaagaactcgatgcccttgaggaagtccgtctagcaatcgaatatattgtaatcccgggaggtgaaccagtggagcttcttcctagacgatcagatataatagttcggcagctagagctggtggagagttaccaactcgcagttgagaacctcggcactcaccttaatccgcgccttcagattcttcctcgccgatcaaccaagaagacgttgacatcttcatccccccaaaaatcagcagatggtagcatggggactacgggtactcgtcttcctttccttaaggattgacatgtctgacttcagcatatggactacagtacatactacataagttggggacactcttgaacattgtacattttactgtaagtcttggtaaataaactgtttatatcgttgatcatttctcatttgcaatttatgtgttaccaatgcaatgctctttcttatttacccgagggggtaactctgtaacattgagggtgagagtgtgcaatctgtagatatttccttacctcttaataaatagaaatttctc

SEQ ID NO: 13011 - DNA, 1803 bp, Arabidopsis thaliana columbia
  Clone ID: JC-ATXLIB327423P4C05_FLI
aaaaaaagtataaacaaaattcaaaactattcagtattgatatttgtttacattgaaaaaaaaattaacttaaaaaatatagtttacacaaaaaaagaaaaaccaaaaaaaaaattgttagagattttttcagagtagtgagaggaaaatggcgcagatgcagcgagaagaagtagagtccgtcacgacggagaagaaaagattagacggaggcggtggatcttccggcgctcaggcaacggcgttcaaattcaacgctcaagcgccggaatttgtaccgcgatcacataccaccgcaccagcaccgcaggtttctcctgtctccggttacttttatccttgttttcattacaacggtggttgcataggaggatgtggcggcggagtctgcggtggtggagggaccggcgttggtactcagtcgtcggattggatctacgtgggaggaggagatcctactgctcagcatcaacatgttcatgatccagcggctgcgttttacatttcgaatccggcggttcagtttccggctagtcagaactcgtcttcttcgtcgaagaatctgctttccgatgatctccgccttaagatcgtcaaacaggttgagtaccagtttacggacatgagtctcctagccaacgagtccatttcaaagcatataagcaaagaccctgaaggttatgtgcccgtatcctatatcgcttcgaccaagaagatcaaggctttaacgagtaatcaccacctagtttcacttgctctacgctcctcttcaaaacttgttgtgagtgaagacggcaagaaagttaagcgtacaagtcaatttactgatagagacagagaggaattgcagggccggactgtcgttgcagagaatttgccagatgatcattcttaccagaaccttgagaagatctttggagttgttggaaacgtcaaagcgattcgtatatgtcatcctccagaatccaactcgtctcgtccaaaaggcgatttcttgatgagcaacaaaattcacgcccttatcgagtatgacaacactgttatcgcggacaaagcagtagagaagctaaacgatgaaagaaactggaggaaagggcttcgtgtgaggctgcttcttagatgctcgccaaaatcggtgctcaagaaccgaagaaacttcgatggaatcctcatcgatgatgaactcccttcttatgaatcaggagaagactctccgcgtctccatttaaccgaatcacagcttgataacgatggtgatgacaacaatgttggtggactgtggggtaaagggagaggaaaaggacgaggacgatccccaagaagctacgcagtaggaggaggaggacgtagcttcgggattgggctcggagtcagcctcgggatacccagcctggggtcacacgaatcttcgtctcctaaaacagcaacaaagggaccaagaatgcctgatggaaccagaggcttcaccatgggacgtggcaaaccttccatctcactctcacctaacaatctctaaatagttacccaccacaaggactgctatttataattgatttattataatagaggtaaaagattttagagttaattaaccaaataatacatatggattggttttcctaagatgcattcaaaagaagcaaggcacatgacttgggagaagatagtgaaggcacggtgacgttttttgagggttcgttttatataacttttttcattttttgaggcaatttcttttctgtatgtttaatatgttttatttttgtgagattattatttgaataataaaggggtaatttatat

SEQ ID NO: 13012 - DNA, 1161 bp, Arabidopsis thaliana columbia
  Clone ID: JC-ATXLIB327424P1D04_FLI
ccagttgccacgattaactagaatgtggactcatcttgagcgtcaatctggtggccaagttaagggtatgggagaaaaacaaattgaagttgataagcgaatcttgcgtactcaaattggagttctcaaaaaggagttggaatctgtaagaaagcatcggaagcagtatagaagcaggcgtgttgctatacctgtacctgttgtatccttggtcggttacacaaacgctggaaagagtacactattgaaccaattgactggtgctaatgttctcgctgaaaatcgtttgtttgcaactcttgatccaactacgagaagggttcagatgcaaaacgggaaggaatttcttctcacagatactgttggttttatccaaaagttaccaaccactctggttgctgctttcagagcaacacttgaagaaatagcagagtcaagccttttggtgcatgttgttgacatcagccacccactggcagagcaacaaatagaagctgtggagaaggttatgtctgaactcgacgtttcatcaattccaaaattggtcgtgtggaataaggttgatagagtggatgatcctcaaaaggtcaagctggaagcagaggaaactggggatacaatttgtatatctgctctgactggagaaggactagacgacttctgcaatgctgttcatgagaagctcaaggattcaatggtttgggttgaagcccttttgccatttgataaaggggaccttctaagcaccatacacaaggttggaatggtgaaagaaactgaatatacagagaatgggacacttatcagggcacacgttccgctacgttttgcacagctgcttaaacctatgagacacttggtcaaagatacttcaataagccaaagaggatgaaccagaatcatagcaagaacctgaaggcctgcctcttggtcagaatcggaggctacgtgtgctttgccaaagcatccgaaagcaaaaggaattcaaacaaccttctgatcatacacaccacaaagaatgacagtcagacagtaaagaatattcgtagataaaaaggaatgcagctagacacaagcaagataagcttgaacctacttcacatcgtgaactgacactggaaatgttatttcaacagtgataagtgataaccctttttgtac

SEQ ID NO: 13013 - DNA, 742 bp, Arabidopsis thaliana columbia
  Clone ID: JC-ATXLIB327424P3E10_FLI
ggagagggacggttctccatggaatccaacacatgttggagatacctcagtcttgcagaacgatggacacaatggactctctgaatcctcaggttccataactcggcttgcctccatagactctttcgattcaagatggcaacagtttctagaaccgggagaatcggttctaatgatatcagcagtgaagaagctacagaaaatcacaagtaagaaggtgcagctaatactcaccaacaaaccaagactgatatacgttgacccatcaaagcttgtagtaaaagggaatattatctggtctgataactccaacgacctcaacgttcaagtctcaagtccttcccatttcaagatttgcacaccgaagaaagttttatcgtttgaagatgcgaagcaaagagctttgcagtggaaaaaggcaatcgaaactcttcaaaaccgttgagactcgtagctgatggtgtcaattcattaagttcctattttatttttcctcccttttctttaattcaattgattacatctcatatgcaaagagaagaagagtcttctctgcattcaagacatgcctcgggccgtaggtttcttctccgatcccagaagatgataactaagagttgcattactctgttttgggtccagtgtcagatttatgaatgacagtaaccaaagtaaaagtgtaaaacctaagctaatatggatcggtttgctgtttcaatttcggtttggttccgtgttactc

SEQ ID NO: 13014 - DNA, 2229 bp, Arabidopsis thaliana columbia
  Clone ID: JC-ATXLIB327424P3F10_FLI
tttcgcgtaaacactacgcgccgccgtaagcttgactatctagttcaagtcttccgtcatgtctacgacttcctccgtgcgtgttcgactagctttcgttgcgttactctcagcgacgactttttactgtatccataaatatcgtcgcttgaaacatctgaaaaacctctcgttaaaccctagctctacattgaaagccagcagaggaaagatcttcttcatctcccaaactggtacagctaaagccttagctcaacggcttcacgagctatgcgcatctaacgacatagcatttgatatcgtcgatccacatagctacgaacctgaagatctacctaaagaaaccctagttttattcatcgcgtcgacttgggatggcgggaagccgcctaagaacggagagtttcttgtgaactggcttggtgagagcgctgaagatttccgagtcggctcgcttcttctctccgattgcaaattcgctgttttcggtgtcgggagccgtgcgtatggtgaatcgtataatgctgtggcgaaggaattgtcgagtaggatgataggactgggtggactcgagatgattccggtgggagaaggcgatgttgatgatggagaattagatagagcatttcaagactggtgtgatggagttattagggttctgaaaggaggatctgctcaagaaacaaatggggtttcgcagcagattggtgctgttgaggatgatctggagtactacgattcaacagatgaggaagatgaagacaatgatgcagacggaggtattgttgatcttgaagatattgctggaaaagctccttcaaagagaaatggtgtagttaaagtgactaaagttgatggaaagaaggaaatggtgacccctgtgattagagcaagcttaacgaagcagggctataaaattatcgggtcgcatagtggggttaagatatgtagatggacaaagtcacaacttagaggcaggggaggttgctacaagcactccttttatggcattgagagtcacaggtgcatggagacaacacctagtttggcttgtgcaaacaaatgtgtgttttgttggaggcatcacacaaatcctgtgggaaagagctggcagtggaagatggatgagccttcagtgattgtgaaaggcgctcttgatcttcataaaaatatgattaagcaaatgaaaggagttccaggtgtaactccagagaaattacaagaaggtcttaacccaagacattgtgcgttatcacttgttggtgagccgattatgtatccggagatcaatgcccttgtagatgagctacatggaaggcgtatttctacgtttttggttacaaatgcacaattccccgaaaagattttgatgatgaagcctatcacccagttgtacgtaagtgtagatgctgccaccaaagagagcttgaaggccattgatagacctctctttgctgacttttgggaacggttcattgactccttgaaagctctccaagagaagcagcagcgaaccgtctaccgtttaacacttgtcaaaggatggaacacagaggagctagatgcttatttcaacctattcagcattgggaaacctgattttatcgagatcaaaggcgtcacatactgcggatcctctgcaacgtcaaagttgacaatggagaatgtaccgtggcacacagatgttaaagcattctcagaagctctgtctctgaagagcaatggggagtacgaggttgcttgcgagcacgcccactcttgctgtgttcttctagggagaacggaaaagttcaaagtggatggaaagtggttcacttggattgactatgaaaagttccacgatctggttgcttctggagaaccgttcacgagcacagactatatggctcaaacaccatcgtgggcggtttatggagcgcaggaaggtgggtttgatccagggcagttgcgttacaagaaggaaaggaatcatcctcctaaaccacaggcggttttagcttaagaaaggagtaggctaaagcttttttgtttttcattgtcgtcttcatatcctaaaccacaggcgattttagcttaagacaggaccaagctaaagctattttgttagcctttaaagcttcttcttcttggtctaaagcttttttgttttttgttgtcatctaacagtgttaacttgtggaaagatgttaaagtttcgaaatcatatcaaaactttagacagtttcaatc

SEQ ID NO: 13015 - DNA, 865 bp, Arabidopsis thaliana columbia
  Clone ID: JC-ATXLIB327424P4G06_FLI
cgaaaacacaggttaatgatctaaaaggtgagcattcatcacttcttaaacaactgagcaacatgaatcacaagtatgacgaggctgctgttggcaatagaatactaaaggctgacattgagacattaagagctaaggtgaaaatggcggaagaaaccgtgaagagagtaacaggaatgaatccgatgcttctcggaagatcaagtggacataacaacaacaacagaatgccaataactggtaacaacaggatggattcttctagcattattccagcttatcaaccacactcaaacctaaaccatatgtcaaaccaaaacatcgggatcccaaccattctacctccaagactcggaaacaatttcgctgctcctccatcccaaaccagctctcccttgcagagaattagaaatgggcaaaatcaccatgttactccaagcgccaacccgtatggctggaataccgaacctcagaacgattcagcatggtaagctaaaacatggctctttcttttaagaccattgaacaatttaaaaccatttgaagtactatgatccctgtttatacatatcagattcctgtctcccctttttttgctcattttacaggccgaaaaaatgcgtggactgatcaaacaagaagcgggtttcgcactatattaatgtctatgcatctgtaatttgtaagtgttattaagttacgaatcatgagaaaacatcttgtgaaaatacagtctcatggcttatatatatatataagctctgtcttataacattacaagattcttatttgagaatcgtctttctatttatagctaataacagagtgtatatctgtttttatccaattttaaaaaagatagctc

SEQ ID NO: 13016 - DNA, 1404 bp, Arabidopsis thaliana columbia
  Clone ID: JC-ATXLIB327425P3F07_FLI
cctctccctctccctctccctctttatctttctcttcctcctttgctaataaacttttctttgaaccttacacgccttgttgatattactctcttaaatatatattttcgtacattaacacagacatatataaagctaaagatttcttcacgtaatgggtttgaaagatattgggtccaaattgccaccggggtttcgatttcatccaagtgatgaagagttggtttgtcattatctttgcaacaagattagggccaaatctgatcatggtgatgttgatgatgatgatgatgatgttgatgaagctttgaagggttctactgatcttgtggagattgacttgcatatctgtgagccatgggagcttcctgatgtggcaaagttaaacgcaaaggaatggtacttcttcagtttccgtgatcgaaagtatgctactggatatcgcacgaacagagcgacagtaagcggatactggaaagcaacaggaaaagatcgaacggtgatggatccacgtacaaggcaattggtagggatgagaaaaacactagtgttctacagaaacagagcaccaaatgggatcaaaactacttggatcatgcacgagttccgtcttgagtgtcctaacatcccacctaaggaagactgggtcttgtgcagagtgttcaacaaaggcagagactcatcgctacaagacaataattattataacaatgataatcagacgcaaaggcttgaagttaatgacgctccggatcttaattacaacaatcagttgccacctttgctatcatcccctcctcataatcatcaacatgagaagatgaaaatccaagtttgtgatcagtgggagcagctaatgaagcagccttcaaggaccaccggccacccctatcatcaccattgtcatcatcaaaccatagcatgtggttgggagcagatgatgatcggttcgctgtcatcaccttcgagtcatggccctgatcacgagtccttgctaaatttgctttacgtcgacaataacaacagtgtcaacatcagtggtgatcatcatcagaattatgagaagattttgttgtcatcactagacatgacgagtttggatcacgacaagacatgtatgggatcatcatcggatggtggtatggtctctgatcttcacatggaatgtggtggattgagttttgagaccgaaaatatcctcgctttccaatgaacataattcaaggggttcgccaatttgttgattcgtgaattatacaaacattttatctatagatttatcacattatcaaacatgtaagttgtgtggcatttgggtatagggtttgtgtgattctaggtttttaggacgatgtatgttgttatatttagcgtgtttttaggatttattctcattttaaaatt

SEQ ID NO: 13017 - DNA, 649 bp, Arabidopsis thaliana columbia
  Clone ID: JC-ATXLIB327425P3H02_FLI
caaagatcaaaaaacgccgctcctcttcacacagttccatcttcttcaacttcagaggtgaaaaatgagtcgtggtaacgcagcagcagctaagggaaagaagaagggagtttccttcactatcgattgttctaaacctgtggatgataagattatggagattgcttctttagagaagtttcttcaggagaggattaaggttggtggtaaagctggtgctcttggtgattctgtttctatcactcgtgagaagagcaagatcactgtcactgctgatggtcaattctccaagaggtatcttaagtacttgacaaagaagtacttgaagaagcacaacgtgagggattggcttagagtgattgcggcgaacaaggaccgtaacctctatgagttgaggtacttcaacattgccgagaacgaagctgaggaagaagattaaaaccggttttggtctagtgctatatcctctgttcctctatttctgttggtttggttttgattcttcagttttgtgttagatattattatgtagtttgattgaagtaatactctttgcttttgttgttgcgtacttgagattttctatggagtctatttcttccaaacagtaatgatgtgaaattggactaatatgatttagggtttgatt

SEQ ID NO: 13018 - DNA, 969 bp, Arabidopsis thaliana columbia
  Clone ID: JC-ATXLIB327425P3H08_FLI
ataacttgcaacttcccacaccaaaaaagattccatcaaaggtctctctctcttcataaaccaatattttcacgtaagaaacaaactttttccgatcaaagattgtgtgcagagtcagaaattttcccggggaaaagaaaaatgcaggatctgacgtcagcagcagcgtattatcatcagtcgatgatgatgacgacggcgaaacagaaccaaccagagttaccagaacaagaacagctaaagtgtcctcgctgtgactcacctaacactaaattctgttactacaacaattacaatctgtcacagccccgtcacttttgcaaaaactgtcgtcgttactggactaaaggcggtgctcttcgtaacatccccgtcggtggtggaactcggaaaagcaacaaacgatccggttcttctccgtctagtaatctcaagaaccaaaccgtcgctgagaaacctgatcatcatgggtccgggtcagaagaaaaagaagagagagtttcgggtcaagaaatgaatccgacccggatgttatacgggttaccagttggagatccgaatggtgcgagttttagttcgttgttggcgtcgaatatgcagatgggtgggcttgtttacgagtccgggtcgcgttggttaccaggtatggatttgggtttgggttcggtacggaggagtgatgacacgtggactgacttagctatgaacagaatggagaagaattgaagaggcgaagggtaatttggtcaatttgacatagatgtcttttttttagtcatctcatagtcaaacataacaacaaatgatgtcggtccatttagcgctgtagtcattttttttcactttgtttttcgtcattttccacccaaattggctttagtgagtgttatttagaaaaaaaaacatttccgcaaactctagcgagttttatatgatgataagtatttgatgaatatctatttcttttgg

SEQ ID NO: 13019 - DNA, 865 bp, Arabidopsis thaliana columbia
  Clone ID: JC-ATXLIB327426P1F07_FLI
gatgggaagatctccttgctgcgagaaagaacacatgaacaaaggtgcttggactaaagaagaagatgagagactagtctcttacatcaagtctcacggtgaaggtcgttggcgacctcttcctagagccgctggtctccttcgctgcggtaaaagctgccgtcttcggtggattaactatctccgacctgatctcaaaagaggaaactttacacatgatgaagatgaacttatcatcaagcttcatagcctcctaggcaacaagtggtctttgattgcggcgagattacctggaagaacagataacgagatcaagaactactggaacacacatataaagaggaagcttttgagcaaagggattgatccagccactcatagagggatcaacgaggcaaaaatttctgatttgaagaaaacaaaggaccaaattgtaaaagatgtttcttttgtgacaaagtttgaggaaacagacaagtctggggaccagaagcaaaataagtatattcgaaatgggttagtttgcaaagaagagagagttgttgttgaagaaaaaataggcccagatttgaatcttgagcttaggatcagtccaccatggcaaaaccagagagaaatatctacttgcactgcgtcccgtttttacatggaaaacgacatggagtgtagtagtgaaactgtgaaatgtcaaacagagaatagtagcagcattagctattcttctattgatattagtagtagtaacgttggttatgacttcttgggtttgaagacaagaattttggattttcgaagcttggaaatgaaataaatgaatagtattagattcttaatttgtaggtgtgataatgaatgttagattctt

SEQ ID NO: 13020 - DNA, 1134 bp, Arabidopsis thaliana columbia
  Clone ID: JC-ATXLIB327426P1F09_FLI
tacggctgcgagaagacgacagaagggtacggctgcgagaagacgacagagggaggagacagcaaagtcaagagaagggaactgcaggctctttggcattcctctgaccaacaacatgaatgggacagactcaaccatgtctcagagaaacaacttgaatgatgctgcggggcttacacagataacatcaccaaaggttcaggacctttcagatcagtcaaaagggtcaaaatcaacaaacgatcatcgtgaacagggaagaccattccagactaataatcctcatccgaaggatgctcaaacgaaaaccaactcaagtaggagttgcacaaaggttcacaagcagggaattgcacttggccgttcagtggatctttcaaagttccaaaactatgaggagttagtcgctgagctggacaggctgtttgagttcaatggagagttgatggctcctaagaaagattggttgatagtttacacagatgaagagaatgatatgatgcttgttggtgacgatccttggcaggagttttgttgcatggttcgcaaaatcttcatatacacgaaagaggaagtgaggaagatgaacccggggactttaagctgtaggagcgaggaagaagcagttgttggggaaggatcagatgcaaaggacgccaagtctgcatcaaatccttcattgtccagcgctgggaactcttaaacaaacaaaataaccaacaaccctttgctgcaagccgaggatgggggtcgattggtggagactggagagcaaaatgggatgatgggtttaagataagatattaaaaatgcaatttttgaagtattttgttggccacttagataattagcatcttccatcacccttattatctatctaataataattaatagatattataaagtaaaacataaaaaggttacaggtattatatagtagaatatgaaaagctcttttataagtagaatatgatggtgtggagttgtagtcggaggctggtatcggttcattttatggatgtattttttttccttcttccaaagatctcttgaagtctttttattgtttatattaatcccaatgtacataagttttcaagctcttgcccttttttaattatcttgtcgattcac

SEQ ID NO: 13021 - DNA, 1142 bp, Arabidopsis thaliana columbia
  Clone ID: JC-ATXLIB327426P2B11_FLI
acataatataatatcatcagagaaaaacaaaatggataattcaaatttcgaaacacttcctgaagatctacaaaaggagattttgttatggttgtctccaaaatccttggtgaaattcaccctcgtctcaaagaaatgtgcatctattatccgtggggaagaattcaaagctctttacatgcgccgatcaatgacaaggcctcgtgtgttgatcgttgccaatgaaagcacaggtgagaagtcattggtgtttcacactttgtatcaagaggaggaaccattgttgtcatcttgtcatcaacaacctatgcgtatcaccaacaatgcaccacgttttattgcttctcaaccaatcctaggtttgatctgtcttcgaaatggtagtgaggttgtcattcacaatccgggtacaaaaatattcagactttaccgaagatcaaagctccatcattaagtttcaaaaaaacttttttcggatacgatggagttacggaagtattcaaggtgttatgtataacagggccccgcgggtttaagccctctaggaaatgccatgtttacacgatggggtccggtaaaaattcttggagacggttcaaatgtaggaaacgtcattatccatctactgaagtactatgtaaagaaggaaatttgtactatggagctcagtccattagtcgcaaatctctattaatgaggtttaatgtgaggtcagaagagtttagtgtcattaaattacctaatcagcaagttaacttttgtcgtggttggaacttggttaattacaatggtaaaattgccgtagcgaagaatgttgacgtcgacactggagatttgcaaatgtgggttctagatgacatgggagaatggttaagcgaaatcattacgattcctcgttggaaagaaactaccaataattgcacgtatcatttcaaaggtaccattggaacaggagaacttgttttcatagcacgctattttgttgacgaatcacccattgtgttgtattacaataagaacacgaagaatctcagaagatttacgcttgaggagttgtttaaggatcttcctccgttgaatcattcttcttatcataatattcaaatcttcttgaatcatattgatagtacttggcttatgtg

SEQ ID NO: 13022 - DNA, 1026 bp, Arabidopsis thaliana columbia
  Clone ID: JC-ATXLIB327426P3B12_FLI
tcgcgtacacaactgcgaatgttgagatcttggaagcaatagctggggaaaccagagtccacattatcgattttcagattgcacagggatcacaatacatgtttttgattcaggagcttgcgaaacgccctggtgggccgccgttgctgcgtgtgacgggtgtggatgattcacagtccacctatgctcgtgggggaggactcagcttggtaggtgagaggcttgcaactttggcgcagtcatgtggtgtcccgtttgagtttcacgatgccatcatgtctgggtgcaaggtgcagcgggaacatctcgggttggaacctggctttgctgttgttgtgaacttcccatatgtattacaccacatgccagacgagagcgtaagtgttgaaaatcacagagacaggctgctgcatctgatcaagagcctctccccaaaactggttactctagtagagcaagaatccaacacaaacacctcgccattcctgtcacggtttgtggaaacgctggattactacacagcgatgtttgagtcgatagatgcagcacggccacgggatgataagcagagaatcagcgcagaacaacactgtgtagcaagagacatagtgaacatgatagcatgtgaggagtcagagagagtagagagacacgaggtactggggaaatggagggtcagaatgatgatggctgggttcacgggttggccggtcagcacatctgcagcgtttgcagcgagtgagatgctgaaagcttatgacaaaaactacaaactgggaggctatgaaggagcgctctacctcttctggaagagacgacccatggctacatgttccgtgtggaagccaaacccaaactagattgggtaagttatagtgatgatggttacttgagtggataaagaagagcacaacaaaaacacatctgtcgctgtaaattttttaggatgtgcaatgatgttttaagttgtaacacaacctaagttatatatgtatacaaaccaaacctggtggttgtttttctctt

SEQ ID NO: 13023 - DNA, 683 bp, Arabidopsis thaliana columbia
  Clone ID: JC-ATXLIB327426P3C09_FLI
gggtcaaaacatgaaccaacattatccatcttccccggtgagacaaccgccatctcaacacgggttcgaatcttcagcagctgcagcggttgcagtgatgaaagcgagatcaaccgcctttgcgaaacgtagcttgagcttcaaaccagctactcaaacagcaccacagtcgaatctctcggattggggatctccaaacgggaagctggaatggggaatgataggagaagagctgaataagatgagaagaagtgtttcctttggaatccatggaaacaacaacaataacgcagctagagactacagggacgagccagatgtgtcatgggttaactctttagttaaagacagtactgtggtgtctgagagaagctttggaatgaatgagagggttcggataatgtcgtgggctgagcaaatgtacagagaggaggagcagactgtggtgtaaacacacacaaagatggtttcttatatatattgcttttgggccatctctgcaaatttgattctttaatttttgtgactttctttagttgttactgttattagtagtatatggtttgttgtcactacgagtctacgtgatgaaaagatagaagttaattgcattagtttctatattcgtttctcatcctcttgtaatttatcaaaccatgaaatggctaagcaatccaaaccac

SEQ ID NO: 13024 - DNA, 890 bp, Arabidopsis thaliana columbia
  Clone ID: JC-ATXLIB327427P2E07_FLI
gacaggaactctcttccttgcaaaaaaataaaacactatttcctccaaatacacgtagagagatacatatatacatatagagatcaacaaagatgggaagatcaccatgctgcgagaaagctcacatgaacaaaggagcttggactaaagaagaagatcagcttcttgttgattacatccgtaaacacggtgaaggttgctggcgatctctccctcgcgccgctggattacaaagatgtggtaagagttgtagattgagatggatgaattatctaagaccagatctcaaaagaggcaattttactgaagaagaagatgaactcatcatcaagctccatagcttgctcggtaacaaatggtctttaatagctgggagattaccaggaagaacagataacgagatcaagaactattggaacactcatatcaagaggaagcttctcagccgtgggattgatccaaactctcaccgtctgatcaacgaattcgtcgtgtctccgtcgtctcttcaaaacgatgtcgttgagactatacatcttgatttctctggaccggttaaaccggaaccggtgcgtgaagagattggtatggttaataattgtgagagtagtggaacgacgtcggagaaggattatgggaacgaggaagattgggtgttgaatttggaactctctgttggaccgagttatcggtacgagtcgactcggaaagtgagtgttgttgactcggctgagtcgactcgacggtggggttccgagttgtttggagctcatgagagtgatgcggtgtgtttgtgttgtcggattgggttgtttcgtaatgagtcgtgtcggaattgtcgggtttctgatgttagaactcattagagagtcaatcgagaattctttagc

SEQ ID NO: 13025 - DNA, 2741 bp, Arabidopsis thaliana columbia
  Clone ID: JC-ATXLIB327427P2G01_FLI
cttcatcatcttctttctagtctctctctctctcttcaccgcgtacacagtaacacagaccctttttccctcttactcaaggttcttctttgtcatcttgttgccgaatccacaaagaggagaataaagattcgacctttattagatattaacgactctggatttttgggtttttggagttggatccacatgggttcttatccggatggattccctggatccatggacgagttggatttcaataaggactttgatttgcctccctcctcaaaccaaaccttaggtttagctaatgggttctatttagatgacttagatttctcatccttggatcctccagaggcatatccctcccagaacaacaacaacaacaacatcaacaacaaagctgtagcaggagatctgttatcatcttcatctgatgacgctgatttctctgattctgttttgaagtatataagccaagttcttatggaagaggatatggaagagaagccttgtatgtttcatgacgctttggctcttcaagctgctgagaaatctctctatgaggctcttggtgagaaatacccttcttcgtcttctgcttcttctgtggatcatcctgagagattggctagtgatagccctgacggttcttgttcaggtggtgcttttagtgattacgctagcaccactaccactacttcctctgattctcactggagtgttgatggtttggagaatagaccttcttggttacatacacctatgccgagtaattttgttttccagtctacttctaggtccaacagtgtcaccggtggtggtggtggtggtaatagtgcggtttacggttcaggttttggcgatgatttggtttcgaatatgtttaaagatgatgaattggctatgcagttcaagaaaggggttgaggaagctagtaagttccttcctaagtcttctcagctctttattgatgtggatagttacatccctatgaattctggttccaaggaaaatggttctgaggtttttgttaagacggagaagaaagatgagacagagcatcatcatcatcatagctatgctcctcctcccaacagattaactggtaagaaaagccattggcgcgacgaagatgaagatttcgttgaagaaagaagtaacaagcaatcagctgtttatgttgaggaaagcgagctttctgaaatgtttgataagatcttggtatgtggccctgggaaacctgtatgcattcttaaccagaactttcctacagaatccgctaaagtcgtgaccgcacagtcaaatggagcaaagattcgtgggaagaaatcaacttctactagtcatagtaacgattctaagaaagaaactgctgatttgaggactcttttggtgttatgtgcacaagctgtatcagtggatgatcgtagaaccgccaacgaaatgctaaggcagatacgagagcattcttcgcctctaggcaatggttcagagcggttggctcattattttgcaaatagtcttgaagcacgcttagctgggaccggtacacagatctacaccgctttatcttcgaagaaaacgtctgcagcagacatgttgaaggcttaccagacatacatgtcggtctgccctttcaagaaagctgctatcatatttgctaaccacagcatgatgcgtttcactgcaaacgccaacacgatccacataatagatttcggaatatcttacggttttcagtggcctgctctgattcatcgcctctcgctcagcagacctggtggttcgcctaagcttcgaattaccggtatagagcttcctcagcgcggttttagaccagcggaaggagttcaggagacaggtcatcgcttggctcgatactgtcagcgacacaatgttccgtttgagtacaacgcaattgctcagaaatgggaaacgatccaagtcgaagacttaaagcttcgacaaggagagtatgtggttgtgaactctttgttccgtttcaggaaccttctagatgagaccgttctggtaaacagcccgagagatgcagttttgaagctgataagaaaaataaacccgaatgtcttcattccagcgatcttaagcgggaattacaacgcgccattctttgtcacgaggttcagagaagcgttgtttcattactcggctgtgtttgatatgtgtgactcgaagctagctagggaagacgagatgaggctgatgtatgagaaagagttttatgggagagagattgtgaatgttgtggcttgtgaaggaacagagagagtggagagaccagagacatataagcagtggcaggcgagactgatccgagccggatttagacagcttccgcttgagaaggaactgatgcagaatctgaagttgaaaatcgaaaacgggtacgataaaaacttcgatgttgatcaaaacggtaactggttacttcaagggtggaaaggtagaatcgtgtatgcttcatctctatgggttccttcgtcttcatagatgttgtttcttacgttctaagcgactgggatttatgtagggcttttctgttgatagtctctcgccaacacgagtggattaagttcagagttagggttcttgaacactagaatgttgttatattatgcttgtgacatagcgtgtgtaagagtgtagcctaagagatatagtactcattgcatgatcttttgctatatgttcatgtaatcttttgttgcataaataatgaaaagttacatttt

SEQ ID NO: 13026 - DNA, 1694 bp, Arabidopsis thaliana columbia
  Clone ID: JC-ATXLIB327428P1G11_FLI
cttcaccccaactgtattagtactgttcgtctttcagaaaaaacaataatagatagaggaaaaaagaaagaaacagagaagtgagaaaaagcccttaaaactcaaacactaaaaaattttcagtgtcgattcaaaaagttttgttatttgatctgtttctgtgtaaaaaaaatggtgaaagatctggttgggtatagattttatccaacgggagaggaattgataaaccattatctaaagaacaaaattttgggtaagacttggctcgtcgacgaagccattagcgagatcaacatctgtagttacgacccaatttacttgccttctttatcgaagataaaatcggatgatcctgtgtggtacttcttctgtccaaaggagtatacttctgcgaagaagaaggtaacgaagaggactacaagttcagggtattggaaagctactggtgttgataggaaaatcaaagataagagaggtaatcgcggcgagattgggataaagaagacgcttgtgtattatgaaggtagagttcctaaaggtgtttggactccttgggttatgcatgagtatcacatcacttgtttgcctcaagatcagaggaactatgttatctgccaagtgatgtataagggtgaagatggagacgtcccatctggtggtaacaactcgagtgagccgagtcaatctttggtctctgattcgaatactgtcagagctacgagtcccacagcgcttgagtttgagaagccaggtcaagaaaatttctttggtatgtctgtggatgatttggggactccaaagaatgaacaagaagatttctctttgtgggatgtactggatccagacatgttattcagtgacaataacaatcctactgtgcatccacaagctcctcacttaaccccgaatgatgatgagtttctcggtggattgaggcatgttaaccgagagcaggttgaatatttgtttgccaatgaagatttcatatccagaccaaccttatctatgaccgagaaccgcaacgatcacaggccaaagaaggctttgtcagggattattgttgattatagcagtgatagtaatagtgatgctgaatcgatatctgcaacgagttaccaaggaacatcaagtccaggtgatgatagtgttggtagttcgaatagacaatttctccagactggtggagatgagattctatcgtcttgcaatgatctacaaacctatggagaaccttccatcagtagtagcacccggcaatctcaactcacacgaagcatcatacgaccaaaacaagaggtgaaacaagatacatcaagagcggttgatagtgatacatccatagacaaggagtcatctatggtgaagacagagaagaagagctggtttattacagaggaagcaatggagagaaaccgcaacaatccacggtatatctatctcatgagaatgatcataggcttcattctcttgctggctctcattagcaacatcatatcggtgttacaaaacttgaacccggcgatgaagtttgatcgcgagagatagacaaaagctagcagattgatcaaagcactcgtttttactttgcttttatttatttctattttcttccgaaattttgatgtatatatgtgtgtgtatgtatgaccaagaggtatgtcttgtacctaaagttaaataaaatttagggtttg

SEQ ID NO: 13027 - DNA, 1654 bp, Arabidopsis thaliana columbia
  Clone ID: JC-ATXLIB327428P4D10_FLI
aaaaaagacagaaagaaaaaaactttttttcttttcgttaaaggctccacctttctttcttcttaacacacaacacatgaaaatccctgcatcatctcctcaagacacgaccaacaacaacaacaacactaatagtactgatagtaatcacttatcaatggacgaacatgtcatgcgttcaatggattgggattccatcatgaaagaattggagcttgatgacgattctgctcctaactcacttaaaaccggtttcaccacaaccacaacagattctactattttgcctctttacgccgtcgattcaaatctccctggctttcccgatcagattcaaccgtcggatttcgaatcgtcttccgatgtttatcctggtcagaaccaaacaactgggtacggttttaattctcttgatagtgtcgacaatggaggatttgatttcattgaagatctcatccgagtcgtggattgtgttgaatcggacgagttacaactcgctcaggtggttttatcacggcttaatcaacgcttgagatctccggcgggtagaccgttacagagagctgcgttttactttaaggaagctctcggttcgtttttaaccggatcaaaccggaatccaatccggttatcttcttggtccgagattgttcagaggatccgagcgattaaggaatattccgggatttctccgatccctctcttctctcatttcacggcgaatcaagcgatactcgattcgttgagctcgcagtcgtcttctccgtttgttcacgtggtggattttgagattggattcggtggccaatacgcatcgcttatgagagaaatcactgagaaatctgtaagcggtggatttttaagagttacggcagtggtggcggaggagtgcgccgtagagacgcgactagtgaaagaaaacctaactcaattcgcggcggagatgaaaattcgtttccagattgagtttgtgctgatgaagacttttgagatgttatctttcaaagcgattaggtttgttgagggggagaggaccgtcgttttgatttccccggcgatatttcgtcgtctaagtggaatcactgattttgttaacaatttacggagagtatcacctaaggtcgttgtattcgtggatagtgaaggatggacggagatcgccggatctggatcattccggcgagagtttgttagcgctcttgagttctacacgatggtgctggagtcgctcgacgctgcagctcctcccggagatttggtgaagaagatagtggaagcgttcgttctacgaccgaagatctccgctgcggtagaaacggcggctgacaggagacacaccggcgaaatgacttggcgggaagcgttttgcgccgccgggatgaggccgatacagctaagccagttcgccgactttcaagctgagtgtttattggagaaagcgcaagttagaggattccacgtggcgaaacgacaaggagaattggtgctgtgctggcatggaagagcacttgttgccacatcagcttggcggttttagataaaccgggtttggtttaacaatatgatatagaatagaataattgtatttaccgcctttaatatctcttttctttttgctgtttatctttcaaataaagaaataaaaatatttctt

SEQ ID NO: 13028 - DNA, 627 bp, Arabidopsis thaliana columbia
  Clone ID: JC-ATXLIB327431P1D04_FLI
cgaagcaagaggaggcagaccgagtagaactactggttcaggatactggaaagcaactggatcacctggtccagtcttttccaaagacaacaaaatgattggagcaaagaaaactatggttttctacactggaaaagcacccacaggaagaaaaactaaatggaaaatgaatgagtaccacgccgttgacgaaacagtcaacgcttccacaatccctaagctgagacgtgagttcagtttatgtcgagtctacataacaacaggaagctccagagcttttgatagacgtcctgagggagttttgcagacagagagaatgctaacaagtgatgttgcagtagctgagacatcgttccgtgtggaaagctcactggaaacttcgatttcaggaggagaacatattgatgtctctatgaacacagagtttgttgatggactatcagaaccgatgtgggactgggaacagctgacttggccttgaagctatatagattttataatcaagcaaatttaaacttgtttcaattgcttattgttagtttgaattttatgacccgaaagattctttttctttctttaccttgtaacgtgagaatttgagaaataataaatgacctagacagtgac

SEQ ID NO: 13029 - DNA, 526 bp, Arabidopsis thaliana columbia
  Clone ID: JC-ATXLIB327431P2D03_FLI
tcctcaggggaacacgtgatgaagcagccaaatccggttgaaccggtaatggatcatgctgggctagaagcttggattgagcaaatgcagctcgatcagcttgtggctcagcagaattgagagacctaaccaaagaatcacatgttcttgtctggtctctctatgtggtagataaaaacctcttttttacaggtggtggtggtagaagggtaacaagattaacaaagaagagaagagaagaaagaagatttctttgtttttggtcaattaattttcacaaaaaacagttttttttttttttatttagagaagagaagggaacaatacaagaaaaaggcttatgggaagaaaggagatgaaacaaaaccttcttggttttctttctcccattttcaatttttttttagggatttctttctcccattatcattattattattgttattaatattattattttttatatattttattgttatgactatttgttatcgtttgttataatgagtaccctgaaattaattgc

SEQ ID NO: 13030 - DNA, 1773 bp, Arabidopsis thaliana columbia
  Clone ID: JC-ATXLIB327431P2D12_FLI
gttctttctttgtctctgagttttagcttttttattgacctttttcttcttggtttcttctctgcatctcaaagactaaaaggctttagcaaaaaccgaccagctgagaagatgtcttcatcgtacaacacaattgctttgtcctccactccgaccttcctcctctcaagtgccgctgccggacccggaccaaacaactttaaccgtcaagaggctgcgatgaccatggttcaacaacaacccacttcctccgttgctccaccacccaagaagcgaaggaaccaacccggaaacccaaatccagatgctgaagtgatagcgttatcgccaaagacgataatggcgacgaacaggttcctatgtgaagtgtgcaacaaagggttccagagggaacagaatctgcagctccacaggaggggacacaaccttccatggaagctgaaacaaaagtccaacaaagaggtgaggaggaaggtgtacctttgtccggagccctcgtgcgtccaccatgaccccgcacgtgctctcggagacctcaccggaatcaagaagcattactatcggaagcacggtgagaaaaagtggaagtgcgataagtgctctaagcgttacgctgttcaatctgattggaaagctcactctaagacctgtggtaccaaagagtatcgatgtgactgtggtaccatcttctctaggagagacagttacatcacccacagggcattctgtgatgcactcatacaggagtcagcaagaaaccccaccgtgagcttcacggcaatggcagctggtggtggtggtggcgccagacatggcttttacggcggagcttcttccgctctctctcacaaccatttcggtaacaatccaaattccggtttcacccctctagctgctgcaggctacaatctgaaccgttcatcttccgacaagttcgaagacttcgttcctcaggccaccaaccctaatcccggtccgaccaacttcctcatgcaatgctctccgaaccaaggactgttagcccagaacaatcagagtctcatgaaccatcatggtctgatcagcctcggtgataacaacaacaacaaccacaactttttcaacctcgcatactttcaagacaccaagaattctgatcagacaggtgttccttctctgttcaccaatggtgctgataacaacggcccatctgctttgcttagagggctaacttcttcatcttcgtcaagtgtggtcgttaatgactttggagattgtgatcatggaaaccttcaaggactcatgaactctctagctgcgacaacagatcaacaaggccggtcccctagccttttcgaccttcatttcgcaaacaatcttagcatgggtggctcggataggttgactttggactttcttggtgttaatggaggaattgtgagcaccgtcaatggccgtggtggtcgtagtggtggacctcctctggatgctgagatgaagttttcacacccaaatcatccatatggcaaagcttgagatgatcgttatctatctacaaatcatccaaatcatcatcatctagatatgctattaagttccttggagattttattctagataaagctagatatccaaatttaagctttctttcttttgctgttttcgactattaagggtaaggattgagctttgggatttttcattataaatttcttaagctcttatttttttcttaatgtcatggtgggaggctctagagtttttccttaataatatattgtaatcttgaatcat

SEQ ID NO: 13031 - DNA, 1185 bp, Arabidopsis thaliana columbia
  Clone ID: JC-ATXLIB327431P2F03_FLI
tagaagaaaaaaaaagaacaatccgataaaaagatccggcgatgtcaaacccgacccgtaagaatatggagaggattaaaggtccatggagtccagaagaagatgatctgttgcagaggcttgttcagaaacatggtccgaggaactggtctttgattagcaaatcaatccctggacgttccggcaaatcttgtcgtctccggtggtgtaaccagctatctccggaggtagagcaccgtgctttttcgcaggaagaagacgagacgattattcgagctcacgctcggtttggtaacaagtgggctacgatctctcgtcttctcaatggacgaaccgataacgctatcaagaatcattggaactcgacgctgaagcgaaaatgcagcgtcgaagggcaaagttgtgattttggtggtaatggagggtatgatggtaatttaggagaagagcaaccgttgaaacgtacggcgagtggtggtggtggtgtctcgactggcttgtatatgagtcccggaagtccatcgggatctgacgtcagcgagcaatctagtggtggtgcacacgtgtttaaaccaacggttagatctgaggttacagcgtcatcgtctggtgaagatcctccaacttatcttagtttgtctcttccttggactgacgagacggttcgagtcaacgagccggttcaacttaaccagaatacggttatggacggtggttatacggcggagctgtttccggttagaaaggaagagcaagtggaagtagaagaagaagaagcgaaggggatatctggtggattcggtggtgagttcatgacggtggttcaggagatgataaggacggaggtgaggagttacatggcggatttacagcgaggaaacgtcggtggtagtagttctggcggcggaggtggcggttcgtgtatgccacaaagtgtaaacagccgtcgtgttgggtttagagagtttatagtgaaccaaatcggaattgggaagatggagtagagtgataagaacaagttttccctctgtttctcgggaaaataaaagtttcaggcttttcatgtatagagccagtagtagagacgacgaaaggaggaagcgaaatcaaaaaatgttttgttatcatcatcatatgatcttctttcgtgattcaattaaaagcaaagcaagatcatttattacc

SEQ ID NO: 13032 - DNA, 756 bp, Arabidopsis thaliana columbia
  Clone ID: JC-ATXLIB327431P3A01_FLI
accaactccttggtaaaaggaagatacaggatctggtttcgcaggtggatgtacatgcgaaactggatcctgatgttgaagacctccttttggaggtggcagatgacttcattgattcggtcacatcttttgcatgtagcttggctaagcatcgtaaatcatctgtattggagcccaaggatatattactccacctagagaaaaacttgcacttgacaattcctggattctcaagtgaggataaacgtcaaacaaaaactgtaccaactgatctccacaagaagcgacttgcaatggtgcgtgcattactagaatcctcaaaaccagagacgaatgcaagcaattccaaggaaactatgagacaagcgatggtgaacccaaatggtccgaatcatctcttaagaccctcccaaagttcagaacaattggtttcgcagacatccggtcctcacatattacaacacatgacacgatactaaaggacttgaatatagaagcctgagccagctctcactgctatgttcatcttcttggttgcaggagtttacacatctatggagagttgaaggcacaagtagtgaaactgtatgtattatatataaaattcatgagtcttataggcaatcaaataatacagttatttttttcgtagttgtgggactttctaactatttcgtcttcttttttagtgggtttttgttttttccttttgtaattttagttgtcctctccattttaagcttgaaagttttagct

SEQ ID NO: 13033 - DNA, 1247 bp, Arabidopsis thaliana columbia
  Clone ID: JC-ATXLIB327432P3B08_FLI
caattttttctaaacaacaaatccagcatcgagaaaagtttctatttttggattttccaaatattaacagttatagcttcgtgacttcaagaaatatccatttcaagattatttaacctttttttgtctagcaagtcatcgtattctactttgttgttgcaaatgggaagttcatgtttacctccagggttccggtttcatcctacggatgaagaactcatcgaatattacttgaaaagaaaagtcgaaggtctcgagattgagcttgaagtcattcccgtcatcgatctttatagtttcgatccttgggagttaccagacaagtcgtttctcccaaaccgggacatggaatggtacttcttctgctcaagggacaaaaaatatcctaatggttttcgtacaaatcgaggaacaaaggctggttattggaaagcaaccggaaaagatcgaaaaattacttctcgttcatcttctataattggttatagaaaaactctagttttctacaaaggccgtgccccgttaggcgatagaagcaattggatcatgcatgaatatcgactatgcgatgatgatacatcacaaggatcacaaaatttaaagggagcttttgtgttatgtcgtgttgctatgaagaatgagatcaaaactaatacgaaaatccgaaaaattccaagcgagcaaacaatcggatcaggagaaagctcgggtttatcaagccgagtaacgtctcctagtcgcgatgaaacaatgccgtttcactcatttgccaatcctgtatctactgaaactgattcttccaacatttggatttcacctgaattcatcctcgattcttcaaaggactatcctcaaatccaagatgtcgcatctcagtgcttccaacaagactttgattttccgatcatcggtaaccaaaacatggagtttccagcgagtacaagcttagatcagaacatggatgagtttatgcaaaacggttattggacaaattatggatacgatcaaaccggtttattcggttactcagatttctcctagacggaagtatttggtctctctttacgacaaaaacaccttttatcgttttaagtattggaagacttttggcattggtctaaatatatgaatgagtttcataattctgtttttttttcttttactttttatgggattattatattttatatgaaaatgtttaccgttagttatatatcttatatatatgaagctgtattttatattcc

SEQ ID NO: 13034 - DNA, 932 bp, Arabidopsis thaliana columbia
  Clone ID: JC-ATXLIB327432P3D03_FLI
cttactctctctctgatcgtcgtctttttcttttgattctgcttttttccgctaggtttctgagatcttccattcgtctcgaattaagttgctacgatgaaaacagcaaaggggaaagataaagttaagaccacaaaggaagccttgaagccagttgatgacagaaaggtgggaaagaggaaggcaccggctgagaagcctactaaacgagagactcgtaaagagaagaaggctaaaaaggacccaaacaaaccaaaaagagctcctagtgccttctttgtctttctagaagattttagggtcacgttcaagaaagaaaatccaaatgtgaaggccgtctctgctgttgggaaagctggagggcagaaatggaagtcaatgtctcaagctgaaaaagctccatatgaagagaaagctgcaaaaaggaaagctgaatatgagaagcaaatggatgcatacaacaaaaacttggaggaagggagtgatgaatctgaaaagtctagatctgagataaatgatgaagatgaagccagtggggaggaagaactattagagaaggaagcggcaggtgatgatgaagaagaagaagaggaagaagatgacgatgatgatgacgacgaggaagaagactaaatcagggatagaaatcagattttgtatctcaagcttaactgcagatccttaagcagaagtaagtattttgtaatttgtgtggacgagaactatagatctaaaatcgtgtgtttttttgtttttcttttcctaagaaagcgaaacagttgttagcatctctcaggatgtctgtttcagctttttgccacaacaaacaatgtaccaatgtctgcgttagtgatcatccaaaccaaaacataaactaatgtacatatgaaaatctcccttctctcaggatgtttgtttcagctttttgccac

SEQ ID NO: 13035 - DNA, 1813 bp, Arabidopsis thaliana columbia
  Clone ID: JC-ATXLIB327432P4F01_FLI
ttgagagtaattcactacacacacacaaaaaataaattgagtgcctcccccaaaaacaaaattggtagataacgagcaattgttttttttcagatttgatcctgaatttttacatttttttttttgcaatctccccctaatctgttgtttctcgcttcttcttctgttaatcatctgtctttcaaaaagaaagaaaaaagaaaaattcgatttctgggtttgtttttgtcatacagaaaaaaatcaagcttatgaatttgtgtttaattttttgttttaatttgaaaggcaggttttttcagaacgagatcgttttttcaaatttcttctgattttacctctttttttcttcttagattttagtgaatcgagggtgaaatttttgattccctcttttcggatctacacagaggttgcttatttcaaaccttttagatccatttttttttaattttctcggaaaaatccctgtttctttacttttttataagtctcaggttcaattttttcggattcaaatttttattttaaatggcagctgctatgaatttgtacacttgtagcagatcgtttcaagactctggtggtgaactcatggacgcgcttgtaccttttatcaaaagcgtttccgattctccttcttcttcttctgcagcgtctgcgtctgcgtttcttcacccctctgcgttttctctccctcctctccccggttattacccggattcaacgttcttgacccaaccgttttcatacgggtcggatcttcaacaaaccgggtcattaatcggactcaacaacctctcttcttctcagatccaccagatccagtctcagatccatcatcctcttcctccgacgcatcacaacaacaacaactctttctcgaatcttctcagcccaaagccgttactgatgaagcaatctggagtcgctggatcttgtttcgcttacggttcaggtgttccttcgaagccgacgaagctttacagaggtgtgaggcaacgtcactggggaaaatgggtggctgagatccgtttgccgagaaatcggactcgtctctggcttgggacttttgacacggcggaggaagctgcgttggcctatgataaggcggcgtacaagctgcgcggcgatttcgcccggcttaacttccctaacctacgtcataacggatctcacatcggaggcgatttcggtgaatataaacctcttcactcctcagtcgacgctaagcttgaagctatttgtaaaagcatggcggagactcagaaacaggacaaatcgacgaaatcatcgaagaaacgtgagaagaaggtttcgtcgccagatctatcggagaaagtgaaggcggaggagaattcggtttcgatcggtggatctccaccggtgacggagtttgaagagtccaccgctggatcttcgccgttgtcggacttgacgttcgctgacccggaggagccgccgcagtggaacgagacgttctcgttggagaagtatccgtcgtacgagatcgattgggattcgattctagcttaggggcaaaataggaaattcagccgcttgcaatggagtttttgtgaaattgcatgactggcccaagagtaattaattaaatatggattagtgttaaatttcgtatgttaatatttgtattatggtttgtattagtctctctgtgtcggtccagcttgcggttttttgtcaggctcgaccatgccacagttttcattttatgtaatctttttttcttttgtcttatgtaatttgtagcttcagtttcttcatctataatgcaattttattatgattatgt

SEQ ID NO: 13036 - DNA, 1791 bp, Arabidopsis thaliana columbia
  Clone ID: JC-ATXLIB327433P1D10_FLI
aaatcgtgtcaaattttagggttttttcttttcgtacttcatcaaattctggaatctggttttttcttagttttcttctatatacctttgaatcgcatctttgatccaaattcattttagatatcaccttgaagtcgaatttgtgattttttcttttcctctcgaattctcaaagtctcacgcaactatgaaagaagacatggaagtactatcgctcgcttcactaccggttgggttcagatttagtccaacggacgaagagttagtccggtactatctccggctcaagatcaacggtcacgataacgacgttagagtaattcgtgagatcgatatctgcaaatgggagccttgggatttgcctgatttttctgtggtgaagacaacagactcagagtggctcttcttttgtcctttggaccggaaatatccgagtggaagtcgaatgaatagagctactgtggctggatactggaaggcgacgggaaaagaccgtaagatcaaatcaggaaagactaagattataggtgttaagaggactctagtgttttatacaggtcgtgctcctaaagggacacgaacttgttggattatgcatgagtatcgtgctactgagaaggatcttgatggaacaaagtctggccagaatccgtttgttgtttgtaagttgtttaagaagcaagatattgtgaacggagctgctgaaccagaagagtcaaagtcatgtgaagttgaaccagcggtatcgtctccaactgttgtggacgaggttgaaatgtctgaggtatctcctgttttccctaaaacagaagagactaatccttgtgacgtcgcagagtcttctcttgtaatccccagcgaatgtcgtagtggatactctgtccctgaggttacaaccaccgggcttgacgatatcgattggctctcgtttatggagtttgattccccgaagctgttctctccgttgcactctcaggtgcaatctgagctcggttcctctttcaatggcttacaatctgagtctagtgaattgttcaaaaaccacaatgaggattacattcagactcagtacggtacaaatgatgcggatgaatatatgtccaagttcttggattcttttcttgacattccctatgagccagaacagatcccatatgagccacagaatcttagctcatgcaacaagatcaatgatgaatctaagagaggaattaagattagagctcgacgagcacaagccccgggttgtgctgagcagtttgtaatgcagggcgatgcctcaagaaggctgcgtcttcaggttaaccttaacagccacaagtcagaaactgacagtacacaacttcaatttatcaagaaagaggttaaggacacaacaacggaaactatgacgaaaggatgtggaaatttcacaagatcaaagagcaggactagtttcatattcaagaaaattgcagccatgggatgttcatacagagggcttttcagagtcggtgtggtagcggttgtgtgtgtgatgtcggtctgcagtctagtcgcataaatccgctgaatgtgatgtttgttccgatcaattcatatagtaagaataaagaaagtggtttttacgggtggagagagcgcggatttgtgtgtataacaggggttttggcctggttctgcatctgttgttattgttgttgtttttgtcggcttaagcttaaccatggtcggtttaggagtgtagtagacttgtagttaacatgtacgacgactcataatattcagatggtaatgtttggaaattttttt

SEQ ID NO: 13037 - DNA, 827 bp, Arabidopsis thaliana columbia
  Clone ID: JC-ATXLIB327433P1F02_FLI
atggccgtgatgagcctgagagaggaaactctaatcagcagtttacgcaggatttatttgtgccatcttctgggaaacgaaaacgtgatgattcatctgcacactatcaaaatggtggatctatacctcaacaagatggtgcaagcgatgctatccctgaggcaaactttgaatgtgctgcactccgtataacctatgttggcgatagaaagatcccacgagatttgattggctcatcatcgaagattccccaagttgatgggccaatgcctgacccgtatgatgaaatgttgtccacacccaatatatacagttatcaaggacccaatgaagagtttaatgaggccagaactcctgctccaaacgaaatccaaacgagcactcctgttgctgtaccaaacgatatcattgaagatgatgaagagctgttgaacgaagatgatgatgatgacgagttggacgacctagaaagtggcgaggatatgaacacacaacacctggttttagctcaatttgacaaggtgacgcgcacaaagagcaggtggaagtgcagtctgaaagacgggatcatgcatataaacgataaggacattctcttcaacaaagcaacaggcgagttcgacttctgatcttgacactagtaatgcttctaggaaagtcagagtccttcaaatgtcggatgtctttctttgtaccttatgatttagaccgacctccgagtgagagacatgattatttatgggaatatgtactctggttggcttgttgtacaaaaagaacagatttttccggccgaagaaggcttatcaactttgacttgtttcatg

SEQ ID NO: 13038 - DNA, 1244 bp, Arabidopsis thaliana columbia
  Clone ID: JC-ATXLIB327433P2A08_FLI
atttgatctcatctttaaatttttttgtttcccatttctctcagaaagtgttctgttctttttttcttttgtaatcactaaatgcttcaaaagtttgtccacaattatatttgaaaaaaatgtctgtatctgtagcagcagagcatgattacataggtttgtcagagtttccaaccatggaagcaacaacaatgtctgacaaaaccaaaaccagagacaataacaacggtctcaatttcaaggctaccgagttaagactcggtttacccggttctgagtcgccggagcgagtcgactcaagattcttggctctcaacaagagtagctgtcccgtgtcaggtgccaaaagggtgttctccgacgctattaacgactctaacaaatgggtcttctctcctggatccactactgctactggtgatgtcggctcgggttctggtccccgtacctccgtcgttaaagatggaaagtcgacaactttcactaaaccggctgttccggttaaggagaagaagagctctgctacagctccagcttcaaaagcacaagtggtgggatggccaccaataagatcattcaggaagaactcaatggcttcttctcaatctcagaaacctggtaataactcagagactgaagaagcagaagctaagtctggaccagaacaaccttgcttgtatgtcaaagtgagtatggaaggtgctccttacttgaggaaaatcgatctcaagacttacaaaagctaccttgagctctcttctgctcttgagaagatgttcagttgcttcaccattggtcagtttggttctcatggagggtgtggcagagatgggttaaacgagagtcgcttgactgatctcttgcgtggttctgagtatgttgtaacctatgaagataaagacagtgactggatgctggtcggagatgtcccttgggaaatgtttatatgctcctgcaagaagctgagaatcatgaagagctctgaggctatcggcttagctccaagggtgatggagaagtgcagaagcaggaactaggaaaagcccttttatgtgataatatatgatttgaaaaaatatgtttttaagaaattgaatagccattttgttttgaagtattcttgtgtgtttgtgtgctaggagtgatgtttgatctttcttaaaccagcctctactaagctctaataaggcctcttcctcttacttctttctctaatcaatctaatgaaacatatgggtttgtgt

SEQ ID NO: 13039 - DNA, 2678 bp, Arabidopsis thaliana columbia
  Clone ID: JC-ATXLIB327440P1F12_FLI
ggtgggaaagtctggaaacagctgtatctaactttttcccttttctctatgattctgttgtgaataatgcagagccgccgtgagctcaggcgccaccgtaacgaagaacaaacctgaaggagaaaaataagccatgggatgtgcggcgtccaagctcgataacgaagatgctgtacggcgttgtaaggatcgccgccgtctgatgaaagaagctgtctacgctcgtcatcatctcgccgccgctcacgccgattactgccgatcgcttcgtatcactggatctgctctttcctcattcgcctccggtgagcctctctctgtatctgatcaaactccggctgttttcctccatactccccctcctccgctttctgaacaatctccggctaaatttgtccctccacgtttttcgccgtcgcctgctccttcttctgtttatcctccttcgacgtctccttccgtcgccagttctaagcagccttcagtcatgtccacctcttccaatcgacgccggaaacagcaaccaaaacctagactgcctcatattctctcggagtcaagtccttcttcttctccgagaagtgagagatccaatttcatgcccaatttgtatcccagtgcttatcagaactctacttactccgctactccttctcatgcctcctccgtctggaactgggagaatttctaccctccttctcctcccgattccgaattcttcaacaggaaggctcaagagaagaaacataactccgataatcgattcaacgacgaggatacggaaacagtgaggtcagagtatgatttcttcgacacgaggaagcaaaagcagaagcagttcgaatcaatgagaaatcaggtggaggaagagacggagacggagagagaggaagtacagtgtagtgaatgggaggatcacgatcattacagcaccacgagctcctcggacgcagcggaggaagaggaagaagatgatgatagagaatcaatttccgaggtcgggacacgctccgagtttggatctacggtgagaagtaattcgatgagacggcatcatcaacaaccttcaccaatgccgcaagtatacggcggcgctgaacaaagtaaatatgataaagcagatgatgctacgatatcttctggtagctatagaggcggaggagatatcgctgacatgaagatggtagttaggcatagggatttgaaagaaatcatcgatgccattaaggaaaatttcgataaggctgctgcctcaggggagcaagtctctcagatgctcgagcttggcagagctgagctcgatcgtagtttcagccaattgaagaaaacggtgattcattcgagtagtttattaagcaacttgagctcgacatggacctcgaagccgccattggcagtcaagtataggatagacacgactgcgctggatcaaccgaacagttcgaagagcctttgttccactcttgaccgtctcttggcatgggagaagaagctttatgaagaaattaaggctagagaaggtttcaagattgagcatgagaagaagttatcacagcttcaaagccaagaatataaaggggaggatgaagctaagttagacaagacaaaggcctctataacgaggttacagtcactgatcattgttacttctcaagctgttactaccacatctactgccatcatccgtcttcgtgatactgaccttgttccacaactcgttgagctctgtcatggctttatgtacatgtggaaatctatgcatcaataccatgagactcagaacagcatcgtggagcaagtccgggggctcattaacagatcgggcaaaggcgaatcaacatctgagctacaccgacaagctacacgtgacttggaatcagctgtctcttcttggcactccagtttcagtagtttgattaaattccaacgtgacttcatacactcagttcacgcctggttcaagctgacccttcttccggtttgccaagaagacgccgccaatcatcacaaagagccgctcgatgcttacgccttctgcgatgagtggaaactcgctctagatcgtattcccgatacagttgcatctgaggcaatcaagagcttcatcaacgttgtacacgtgatatccgcaaaacaagccgatgaacacaagataaagaaaagaacagaatcagcatcaaaagagcttgagaagaaggcttcgtcggttagaaacctagagagaaaatactaccagtcatactcaatggttggtgtcggtttaccagagtcaggacccgataaccaacacatgttagacgctcgagacccgttaagcgataaaaagtcagagcttgcggtttgccaaaggagagttgaggaagagatggtgaaatactcaaaggcaatagaagtgacaagagccatgactttgaataatctgcagacagggttgcctggtgtgttccaatctttaacaagtttctctgctttgttcatggagtctcttcaaacggtatgcactcgctcatactctatcaaataggacattatatattatatatatatatatattgatatgcttacagagtttacagtaacaattgtgaggtcagttattgtaatgttccttttttaccaagaaagtgttggatacatttctattttttacaaggagaatgtatataaacaaagttttg

SEQ ID NO: 13040 - DNA, 544 bp, Arabidopsis thaliana
  Clone ID: JC-ATXP108C144I3T7089_FLI
ctaatccgcatcttcaagatcgggacggtgcagctccgattcattatgcagttcaagttggagccttgcagactgtaaaactactattcaagtacaatgtagacgtcaatgttgcagataatgaaggatggactccgttacatatagctgtacaaagccgaaatcgagacattacaaagatattgttgaccaatggtgctgataaaacaagacgaacgaaggatgggaaattagctttggacttggctctgtgctttggaagagatttcaagtcatatgatctggtcaagctattgaagattatgcccaccggggatatatagaaagagctggtgagattttgaatgatcaggttgagattactaaactgcatttgccattgcttggtttgattgtaatctacaccggtataagtggttaaggtagaagaaacccgattgagtttgtaattactgcttttatatattcgtggatgaacttgttattcgggtgtgtgtatcataatgtgcataacaaagatacacattgttatgtcatatatatt

SEQ ID NO: 13041 - DNA, 544 bp, Arabidopsis thaliana; identical to SEQ ID NO: 13040
  Clone ID: JC-ATXP108C175O12T7093_FLI

SEQ ID NO: 13042 - DNA, 1140 bp, Arabidopsis thaliana
  Clone ID: JC-ATXP118C144L6T7022_FLI
ctctcttctcttctgtctctctcttgttagttcactccacataataaacaccaaagatttcattctcttctccataatttcgaagtttcttgaattgggtttgtttcttgatttgtttcttgaattgggttttggtcttcttttcttactatatttggatatgatgatgggtcaagatgaggttgggagtgatcagacgcaaatcataaaagggaaacgtacgaagcgacaaagatcgtcttcgacgtttgtggtgacggcggcgacaacagtgacttcaacaagttcatcggccggtggaagtggaggagaaagagctgtttcagatgaatacaactcggcggtttcgtctccggtgactactgattgtacgcaagaagaagaagacatggcgatttgtctcatcatgttagctcgtgggacagttcttccatcgccggatctcaagaactcgagaaaaattcatcagaagatttcgtcggagaattctagtttctatgtgtacgagtgtaaaacgtgtaaccggacgttttcgtcgttccaagcacttggtggacacagagcgagccacaagaagccgaggacgtcgactgaggaaaagactagactacccctgacgcaacccaagtctagtgcatcagaagaagggcaaaacagtcatttcaaagtttccggctcagccctagcttcacaggcaagtaacatcatcaacaaggcaaacaaagtacacgagtgttccatctgcggttctgagttcacttccgggcaagctctcggtggtcacatgaggcggcacaggacagccgtaaccacgattagccccgttgcagccaccgcagaagtaagcagaaacagtacagaggaagagattgagatcaatataggccgttcgatggaacagcagaggaaatatctaccgttggatcttaatctaccagcaccagaagatgatctaagagagtcaaagtttcaagggatagtattctcagcaacaccagcgttaatagattgtcattactagttgttttttttactacataatatgatgaaatatttgtgaattcttcttacttactactatattgttgatcattggaattattttttttttaaattgaatcaaatattatcatttttaag

SEQ ID NO: 13043 - DNA, 676 bp, Arabidopsis thaliana
  Clone ID: JC-ATXP119C195P24T7076_FLI
cttccgatactttcaatctctctaaactctcaatttcagtaatcgataaccgtagcaatggaatccaccggaaaagtgaagaaagctttcggaggaagaaaaccacctggtgccccaaaaaccaaatcggtttcgaaatcgatgaaagccggtcttcaattcccggtgggaagaatcactcgtttcctgaagaaaggacgatacgctcagagacttggtggtggtgctccggtttacatggccgccgttcttgaatacctcgccgcagaagttctggagcttgctggtaacgctgcgagagataacaagaaatcaaggataattccgaggcatcttcttctcgcgataaggaacgatgaagaattggggaaacttctgagtggtgtcacaatcgctcacggtggtgttttgcctaacatcaactctgttctattgcctaagaagtctgccactaaaccagctgaagaaaaggctaccaaatcaccagtcaagtctccaaagaaagcttaatctgctagagttttcgttgctagtttgtgtttgagctctggtgaatgtagaaatttgaagcttttggatcttagtttctatgtatttggtgatttagaatgttgttcaaaatccttttcctaatcataagactttatgatctatctattatacgcttcgtctaatc

SEQ ID NO: 13044 - DNA, 944 bp, Arabidopsis thaliana
  Clone ID: JC-ATXP11C97E11T7004_FLI
catgaaggaggtctacctaactttgatccacaacagtatatgcagacaatgcagcaggttatggagaatcctgagtttagaacaatggctgagcgtcttggtaacgctttggtgcaggatccacaaatgtctccctttttggaggctcttggtaaccctgcagcatcagagcagtttgcagagcgtatggcgcaaatgaaagaagatcctgaattgaaacctatactagctgagattgatgctggtggtccttctgctatgatgaagtactggaatgataaagatgtgttggcaaagctgggtgaagcaatgggtatagctgttggagcagaccagactgttgcagctgaacctgaagaggccgaagaaggggaagaggaagagtctattgttcaccagaccgctagtcttggtgatgtcgagggtttgaaagctgccttggcatctggtgggaacaaagatgaagaagactctgaaggaaggactgctttgcattttgcatgtggatacggcgaggtgagatgtgctcaggttcttctggatgctggagcaaatgcaaatgcgattgacaaaaacaagaacacaccattgcactatgctgctggttatggaaggaaagagtgtgtaagcctcctcctagagaatagtgctgcagtaactcagcaaaacatggacaataaaaatcccattgatgtggccaggctaaacaatcagctagatgtggtgaaactacttgagaaggacgctttcctctgagctgctttgactcttgaaggatatgtttcttctctgtcatgtaatagtgtcacagagtctgattgcaaccttgtcttctgtgggggttttcatcattaaatctggaaaaaagatggagaaaatggatgtttattatggttttgtaatgaattattttcttcttgaattggttttttcttttggctctt

SEQ ID NO: 13045 - DNA, 816 bp, Arabidopsis thaliana
  Clone ID: JC-ATXP124C121G24T7_FLI
ctagaaccatcaccaaccaatcccctaaaccgaattcgactcttaaccagcgtaaaccgcccttaccgaatctatccgtctcgagaacggtttcaacaaagacagagaaagaggaagaagagaggcactacaggggagtgagacgaagaccgtggggaaaatacgcggcggagattagggatccgaacaaaaagggttgtaggatctggcttgggacttacgacactgccgtggaagctggaagagcttatgaccaagcggcgtttcaattacgtggaagaaaagcaatcttgaatttccctctcgatgttagggttacgtcagaaacttgttctggggaaggagttatcggattagggaaacgaaagcgagataagggttctccgccggaagaggagaaggcggctagggttaaagtggaggaagaagagagtaatacgtcggagacgacggaggctgaggttgagccggtggtaccattgacgccgtcaagttggatggggttttgggatgtgggagcaggagatggtattttcagtattcctccgttatctccgacgtctcccaacttttccgttatctccgtcacttaaaacttcggaaaagtcaacgtacgatgacgttttcacttgcgtcactctcatgatttcatttattcttgtataatataaaggtagcggtagtgtgcaaatatcaaataagtagtttaattagtaccaatcattttattcattattttttttagtagaatatttggatgttgaaaatataaatttaattttgtatttgttgatgttataaatttattgattgtat

SEQ ID NO: 13046 - DNA, 1114 bp, Arabidopsis thaliana
  Clone ID: JC-ATXP1C64A5T7_FLI
gagaggtttatcgagaaaaatccaagatttactaaaaaaccactatctctctgctcttcctctgtctacattaatgtaattttgatcatcggattgggtgaaagaaacatcaaactcctaaaagagaagcctttaaagttttttttaatcaaaaacaaaaggaagaaaattttcctttttgttttagatggcatgaatcatcatcatcgctttgctttcttgattctctatttcgtttgatgggatttgtttttctgggaatttattcattcacctgctgccatggctaaattatctttcaaggattctcttaaagctcttgaagccgatattcaacacgctaatacactagctttagattatcctcgggagaaggatggagcgcgcgttcagatgagattatcatacagcccgactgctcaattttttctttttcttgtacaatggactgattgtaagcttgctggtttcctcggtttactcagagttcttatttatatgacttatgcagatgggaaaacaaccatgtcggtttacgaaagaaaagccagtattagagagttccaagctgtgatattaccatctttgtcacaactacaaaggggtgttacagacatagatgacagcaaacaaaaagaggtatgcaagatgcgatacagaaagaaggatgagagcgaaatgtcggagattgagatcgagagggaagaagaatgtggaatctgtatggagatgaacagcaaggtggtgctaccaaactgtactcattctttatgcatcaagtgttaccgcgattggcgagggagatcacagtcatgcccgttctgcagagacagccttaaaagagtagattcaggtgatctctggatgtttttggaccaaaacgatacagtgaatctcactgcaatcgctagagagaaccagaaacgattgtttatgtacattgagaagttaccactagtggttccagatcaagtgtatgcgtcttctccttacgatttccatgtgagatgaaggcggaaaaccggttctggtaaatctttatctgtatacttggggaaaaggaggacttgttttgtaaatgtattagagttagtacaagtagtagtaatcagtc

SEQ ID NO: 13047 - DNA, 1104 bp, Arabidopsis thaliana
  Clone ID: JC-ATXP25C125G4T7_FLI
ctctccatctccttccatatctattgttctctctctcttcatgcccgaacgcatcgggtctcaaaaaccattgatacagacatcgatccttgtcaactagtactgatctataaatcttataaaaatctgtagagatatggccgccgcagccgtttcctctaaccctcgcaccgttgaagagatcttcaaagattattccgctcgtcgtgccgctcttcttcgtgctctcactaaagatgttgatgatttttactctcaatgcgatccggaaaaggagaatttgtgtttgtacggacaccctaatgagtcatgggaagtgaatctaccagcagaggaagtgcctccggagctacctgagcctgctcttggtatcaatttcgctagagatggtatgcagaggaaagattggctttctcttgttgctgttcacagtgattgttggttgctctctgtttctttctactttggagctcgtcttaatcgcaatgagaggaagcggttattcagtctgatcaacgatctcccaactctcttcgatgtagtgactggtaggaaagccatgaaagacaacaagccaagctcggactcaggaagcaaatccagaaatggcactaagagatcaatagacgggcagacaaagagctcaacaccgaaactaatggaagagagctatgaggaggaggaagaagaagacgagcatggagacactctctgtggaagctgtggaggtcattacacaaatgaggagttctggatttgctgtgatgtttgtgaacgttggtaccatggaaaatgcgtcaagataactccggctaaagcagagagcatcaagcagtataaatgcccgccttgctgtgcaaagaaaggaagacagtgatgctgatcaattgatgatgatgatgatgatgatctctcagagagactctggttctcatgttttaatcaatatgttaatcaactttttttcttttcttctctttttttctttaaccttcttaattttaaagctttcaaaactctctctttagatctcaagaaagggatttcaagaagttgagggagagagtagcaaactgtttgaataatattattattattcatatt

SEQ ID NO: 13048 - DNA, 1940 bp, Arabidopsis thaliana
  Clone ID: JC-ATXP30C142L2T7_FLI
catatattctcctcatcgtcttcttcgtcgtgacgtctctcctccatcatcgtcacttgcaaatccagctctccatttcaactccacatcttcttcttctttagatccctcatctttctctccttctcctccttcctctcattcttctacttcgtcttttcctttgttcatttctctctctctctctagcttccaccttcactttaacttctcattaccctaatttttcaagacatatcaattgaaattgaaaagttgctcagaactctaatcatccccttcgttctcagttcttccaatcttcaatttcataaaaaccctaattttaactggtttgttttttggaaattggatttgtctacgttttggaattggctggaaacgcagcgaaggataacaagaagactaggcttgtgccacatcacatacatcttgcagtgagaaacgatgaggagccgaggaagttgcttggtgatgtgatgattgcaaaggtttgattttagcataattttgttcagaaaattcaaatctttttggagatatttgttttgaaattgattttatttattgcattttacgttatggctcatggagaaagcattgtaagaaatcttaggggttctatttttagagttatttacgcacacaaggtgtttgatgaattgacggtgagagagaaatcaagaaacgactctcccaacatgtcttacgcgatgtttgaagaagcctaataggaaatgtgactagactttatagaaggtcagatcccttgttcatcttggtattttttgtttaatggaagttttaaagattgaggaaggggacaaatatgttaaaatagttgaagataagaagaaactttttgcaaatttgagtcaagtcttgacgagaatttagtcttattaatttttttttgttcggttttgtagtgaggattaaggttcacggaggtcggtgttgattatgtgtcattgagaatgacatacctaatattgtagtcttccttattaacaccacttatagtcttagtcttccttatgaacgtcacttatagtcttagtcttccttcaaatttattaacgttgcttataaggaagactatgagttatattacttcagtccagcatctcgacttatatttactaaccttgcaggtatttcctgttacctctaagttatttttttaatcactcttttgtttttgtttttttaattgagaattaggttagtgtagtctcttttgcaggatgattatcatattggtagtatcttcccctgtcttttacgtttaaaaatatgcacatgtgagacaaaatggttgaatctacttatgcgtgaacttaaagattcacctaaatgaaaagctctcaaacttggacaggtatatatttcaaaccagtttattaagtgtcttttgctagtttatattttttggtactaatatctctatatgtgtggatctaatgtatacactgatagtaagtcatcacttgtttaatcatcctagttctgagtagtttctgtatcttaagttgttttttgaatcgtgaatctcttgtaatctctttttcaattaaattttatttcagtatctttgacttataaagtctctttgttgggagaatgtaggagtgaggactacaattacaacctttaaagacgtagatgtgtacgacgtgaagtattgtgcttgtgacaaactaagaagacagatcttgagtaaagatgtgtctactaaagctggagactttgagaattttaagaaggctaaagaaaagtttatgttcaacaagaaagtaggagtttctgaaagttttaacggtctctctcatgaacttgttttgatgttatctagtaacttagtataagacttggtatgtaggttttgtacaatttatctaatataattatttttaataaattcaactaaatatttatgt

SEQ ID NO: 13049 - DNA, 1792 bp, Arabidopsis thaliana
  Clone ID: JC-ATXP31C147B23T7_FLI
caattcctgaaactcctgccagaagttctcgtgctattgcaccaccagaattatctcctaggattgcctctgaaatttcaatggcacctcctgctgttgtttcgcagcctattcccaagtctaatgattcagagaaaatatggcattacaaggacccatctggtaaagttcaaggacctttttcgatggcgcagctccgtaaatggaacaacactgggtacttccctgctaagttggaaatctggaaagcaaatgagtcaccgttggactctgttctactgactgatgcattggctggactatttcagaagcaaacccaggcggtggataatagctatatgaaagctcaggtagcagctttttctggtcaatcaagccaatctgaacccaatttaggttttgctgctaggattgctccaacaaccattgagattcctaggaattcccaagatacttggagtcaaggtggtagtcttccatcccctactccaaatcaaatcacaactccaacagcaaaaaggcgaaattttgagagcagatggtctccaaccaagccatctccacagtcagctaatcagtcgatgaattattcagtagcacaatctggacagagtcaaacttctaggatagatatccctgtggttgtaaattctgctggtgctctacagcctcaaacttaccctattccaacaccagatccgatcaacgtttctgttaatcactctgcgactcttcattctccaacaccagcaggtggaaagcaaagctgggggagcatgcagacagatcatggaggaagcaacactccctcttctcagaataactctacgtcttatggcaccccatctcctagtgttctcccctcacagagtcaaccaggatttcctccatctgattcttggaaggttgcagttccaagccaaccgaatgctcaggctcaggcccagtggggtatgaacatggtgaacaacaaccaaaactcagcacaacctcaggctccagcaaaccagaacagcagctggggtcaagggactgtaaatccaaacatgggatgggttggtcctgctcaaactggagtgaatgtaaattggggtggatcttctgttccctcaactgtgcaaggaatcactcattctggctgggtcgcgcctgtccaaggacaaacacaagcttatccaaatccaggatggggcccaacaggccaccctcaatctcaatcccagtctcaagttcaagctcaagcgggtactacgggctcgggatggatgcaaccaggtcaagggattcagtctggaaacagtaatcaaaattggggaactcaaaatcagacagcgatcccaagcggagggtcaggagggaaccaagccggttactggggaaaccaacaacagagccagaatggagattctgggtatggttggaacaggcagtcaggtgggcagcagaacaacttcaagggacaaagagtatgcaagttcttccgcgaaaatggacattgtcggaaaggagcatcctgcaattacctccacaactaaaacaccacttctctctctttctctctttctctctatgcttttgggttatgtatgcatcctaaaaagcagcgttaggcgtttttagccacttagttttttatgcactacagtcttttgttgggagcctttcactcagaattagctttaacatgtttattttttggggggttaggggcttagtagtatttaaatcttgtgatggtggatggtggatatgatagttataacctcttgcatataatatttgctaggccaac

SEQ ID NO: 13050 - DNA, 1751 bp, Arabidopsis thaliana
  Clone ID: JC-ATXP34C153D10T7_FLI
gggagcttccgattaatacgagttggttggtttttgctgaattttcgaagctttgtttcttcaatctttgatgctagaaaggtgttttctgcaacaagcaatatgcgacaaagaaatatgatgactggttcagacatggagcagaattctcaaagctttgttccccatcctgaacctcgcattggaactaactatctgtatccagatatcccaccagtgaacactgttcctcatttagaagctcattctctgcaagaaccttatgacaacaactcaatgttctacgggcctccacagtaccatcatcaacatgcttcaaatcttggttctggcatgtcaaccgcaccaaatttctatgtcccttatgtgaattatgaagctccgccgagttttctgttgtctcatggaagtaatggtgcagttgttggagttacttccactgaacatgagagaaatgcccattttatggatcacggattcaaaagaaagagttctgaagtaatacctggaaattctcagtatccagttgctccttgttctttccctcaattgaatacatcggagacagcacctatttcattcccacattttggtacttatccacaaccactagatcagagaagtgtgaggaacagagcaggagcagctacaatggatccacttctctctcatggtcataacaacttcagtcaaggaaactatgcagctcatccttttccacctcctggctcagtctggtatgaccaacactgtaatggcaacagatctgatggatcatcttcgctttggtctcaagcacctgccgtaccttatatgcatggtaacattgctactggatctatagactctggtaatgtctgcttcccaagataccatgaaacatctagtagcagaaaccccacaccatctgtataccaaaggaaccactatattagccatcacccggtacctcctcctcctattgcataccctcacatgccttcagcctcatacgctgagactatgcatcctacttcatacagtcatgtgggacaggttcaatcaaccggattcaggataaaccaatatcccggagaagattttgtacctgcagcaattctaagacaccgtgaattgcctcactttagagcaatccccgcgaatgaagatgcattttgggaagtaggctacgatgctgttaattatgttgatcatcatcaagacatgcgcttagacatagaagatatgtcatatgaggagcttcttgctttgagcgaccagattggaactgtgaaaactggcttgtcatcagaagatgttaaagaacttctggaaagaagaacctcgaccagaatcaacctggaagaaggtccatctactgatctagagactgattcttgcacgatatgccaggaaaactacaaaaacgaagataagatcgcaacgctggattgcatgcacaaataccatgcagaatgcttgaagaagtggttggttatcaagaacgtttgcccaatctgtaaatcagaggcattggtaatggagaagaagaagaagctaaggttaagtagtagatgagaagaggttgctgctgattcaacctaaaagaggttatcgctgatggtttttaagacgctttttatctattggttttataagagagaaacagagtcagggtatgtttcagcccccaaattctgtaaatttgtacttttgtgcacattaaagtgacagtctaaagctaagattggcttagtgactttaaaaactgt

SEQ ID NO: 13051 - DNA, 1708 bp, Arabidopsis thaliana
  Clone ID: JC-ATXP38C158D14T7_FLI
ctcagagcaaaaaaacaaaaaaaaagaaaaaaaaaccctaaatctaaatctcaccttccacctctgtcttttttttttttgttcttttttttttttttactgtatcttctcttctctttgctctgcaaaaatctcacatccatggatccatctcttggtgatcctcatcatcctcctcagttcaccccttttcctcattttcccacctccaatcatcatcctttaggaccaaatccgtacaataaccatgtcgtcttccaaccgcagccgcaaacgcaaacgcaaatcccgcaaccgcagatgtttcagttatctccacatgtttcaatgccccaccctccttactccgaaatgatttgcgctgcgattgcggcgttaaacgaaccggatggttcgagcaagatggcaatttcgagatacatcgagagatgttacaccggtttaacttctgctcatgctgctttgttgactcaccatctcaagactttgaagaccagtggtgttctttctatggttaagaaatcttacaaaattgctggttcttctactcctcctgctagtgtagctgttgctgctgctgccgccgctcaaggtctcgatgttcccagatctgagattctccattcaagtaacaacgatcccatggcttctggctctgcttctcagcctctgaaacgaggtcgtggtcgtcctcctaagcctaaacctgaatctcaaccacaaccactacagcaacttccaccgaccaatcaagtccaggctaacggacagccaatctgggaacagcagcaagttcaatcacctgttccggttccgactccggttacagagtcggcgaagagaggacctggtcgtccaaggaagaacggttctgctgctcctgctactgcaccaatcgttcaagcttcggttatggctggaattatgaaacgtagaggtagaccaccgggtcgtcgagctgctgggagacagaggaagcccaaatccgtttcttctactgcctctgtgtatccttatgttgctaatggtgctagacgcagaggaaggcctaggagagttgttgaccctagcagtattgttagtgttgctccagtaggtggtgaaaatgtggcagcggttgcgccagggatgaagcgtggacgtggacgaccacctaagattggtggtgttatcagtaggcttattatgaagcctaagagaggacgaggacgtcctgtaggtagacccagaaagattggaacatcagtcacgactgggacacaagattctggagaactcaagaagaagtttgatatttttcaagagaaagtgaaagaaattgtgaaggtgttgaaggatggagttacaagtgagaatcaagcagtggtgcaagccataaaagatctggaagcactaacagtgacggagaccgttgagccacaagttatggaagaagtgcagccagaggagactgaagctcaacaaactgaagctgctgagacacaaggaggacaagaagaaggacaagaaagagaaggagaaacacagacccagacagaagcagaggcaatgcaagaagctctgttctgaagaataataatgatctagaaaacaacctagacataatagccttggtgtttggcgttaggagtgtttttttttagttgttttaggtgttggaatcgcatcttaaattatataaaaatctataaggaattttaatttttct

SEQ ID NO: 13052 - DNA, 968 bp, Arabidopsis thaliana
  Clone ID: JC-ATXP44C171F7T7024_FLI
gtttagggattttaagggtcgtagagctggcatgattaaggctttaaccactgatgttcaggagtttttccgactttgtgatcccgaaaaggagaacctttgcctttacggacatccaaatgagcactgggaagtgaatttgccagctgaagaggttcctcctgagctcccagagcctgtcttgggtatcaattttgccagagacgggatggcggaaaaggattggttgtcccttgttgctgtccacagtgatgcttggcttcttgctgttgctttcttttttggagccaggtttggatttgacaaagctgataggaagaggcttttcaatatggtgaatgacctcccaacaatctttgaggttgtagctggcactgctaagaaacaaggaaaagataagtcctctgtttccaacaacagcagcaacagatccaaatcaagctccaagcgaggatctgaatcccgtgccaagttctcaaagccggagccgaaagatgatgaggaggaggaagaggaaggtgtggaagaggaggatgaggatgagcaaggtgaaacacagtgtggagcatgtggtgagagctatgcagctgatgagttctggatttgctgtgacctctgtgagatgtggtttcatggaaagtgtgttaagataacaccagcaagagctgagcacatcaagcaatacaagtgcccttcttgcagcaacaaaagggctcgttcctaaatttgttgaccgctcgcttctgtgtatctacctttgcatatgatgatgaacagcttaactgtttggtttagatcagatttgtcatatggatttggtaatttaggaagacattttagttttttcattgttacattttggcgattgaagggataactctttgtttaggggtaatgatcttttgctctgttttatgtttgtttattaacattcttcaaactcaatcaaaagtattttggttagtctt

SEQ ID NO: 13053 - DNA, 545 bp, Arabidopsis thaliana
  Clone ID: JC-ATXP46C173N12T7054_FLI
cttctacagacatcaatttctctcgagataaactaaatcttcgctgaaaaaatgtcgggtcgtggaaagggaggaaaaggtttgggtaagggaggagccaagcgtcacaggaaggttctgagagacaacatccaaggaatcaccaagcctgcgattcgaagattggctcgtagaggtggagtcaagcgtatcagtggtctcatctacgaggagactcgtggcgtcctcaagatctttctcgagaacgtgattcgtgatgctgtcacttacaccgagcacgctaggaggaagactgtgaccgccatggatgttgtctacgctctcaagaggcaaggaaggactctttacggattcggtggttaattagagtttttcagatccgcgtttgtgttttctgggtttctcacttaagcgtctgcgttttacttttgtattgggtttggcgtttagtagtttgcggtagcgttcttgttatgtgtaattacgctttttcttcttgcttcagcagtttcggttgaaatataaatcgaatcaagtttcacttt

SEQ ID NO: 13054 - DNA, 1229 bp, Arabidopsis thaliana
  Clone ID: JC-ATXP47C172M1T7_FLI
caaacatataaaccataaggaaaacagagaaagagagatggaggacgacaatagtaacaacaccaataacaacaacgtgatcgcacctttcatcgtgaaaacatatcagatggtcaatgatccttccaccgattggctcatcacttggggacctgctcacaacagtttcatagtcgttgatccactcgacttctcgcaacgaatcttacctgcttatttcaaacacaacaatttcagcagttttgttcgtcaactcaacacctatgggtttaggaaagtggatccggaccggtgggagtttgcgaacgagcattttctaaggggacagaagcatttgttgaataacatagcgcgtaggaaacacgcgcgggggatgtacggtcaagatttggaggacggtgagattgtgagggagatcgaacggttaaaagaagagcagagggagctagaggcagagattcagaggatgaaccggaggatcgaagcgacggagaagagaccggagcagatgatggcgtttctttacaaagtcgttgaagatcctgatcttcttccaagaatgatgctcgagaaagaacggacaaagcaacaacaacaagtttccgacaagaagaagcgtcgtgtcacgatgtcgacggtgaagtcagaggaagaagaagggaagaagatgaagggagggtctttagggttatgtcatcatcaataccgtcgccgtcatcaacggagaatctttaccggaatcattcaccggatgggtggattgttcctatgacgcaaggacagtttggtagttacgagacgggtttggtggcgaagtcgatgctctcgaattcaacgtcgtcgacgtcatcatctttgacgtcgacgttttctttgccggagagtgttaacggaggaggaggaggaggatgtgggagtattcagggagaaagaaggtataaagaaacggcgacgtttggaggagtggtagagtcaaatccaccaacaacaccgccttatccattttctctgtttcgaggtggcttttagcgtttagcttcacatgatatatgatctttagactttattatggttatattattattattatttattttttgtgtgtttgttcttaattattttatgtataaccaaaagaaagaaagaaaataaggacagatccatagttgagtcagtagtcatcgtttgtagaaagttttgacagtatataatttctgattatatttgtt

SEQ ID NO: 13055 - DNA, 991 bp, Arabidopsis thaliana
  Clone ID: JC-ATXP49C178N3T7_FLI
ttattgatgataagacttgtgaagagaggctttggaagatgaaacaccgtggcgagacaaacttttatttatgtgagataaccagagatatggttattgatgctactcataagggaaacaaatcaagatatattaatcatagctgcaaccctaatacgcagatgcagaaatggataattgacggcgagaccagaatcggcattttcgccacccgtggtatcaaaaagggagagcatttgacctatgattatcagtttgttcagtttggtgcagatcaagactgccattgtggggctgtaggttgcagaaggaagcttggtgtaaaacctagcaaacctaagatagcctcggatgaagcttttaatctagtggcacatgaattggcccagacactgcccaaggtgcatcaaaatggacttgtaaatagacacatagatgcaggaaaatcatggaacaatcttagtcaaagggatacatgttcgcgtaattgcattggtgtggtgatcaggttatctcgccccacgagtgataggtgttttggcctcgttagacattttgatgagtattcaagaaagcactcggtgatgttcgaggatggtgttaccgagtttgtcgacatgtcgagagaagactgggagattgtctaatattgttttcagattgctttgaagttgagaaaccaaaataacctgtcttggtaaactaaaggtatcccaaaaaacccgggtctgactgactgggattggtgcagtgacattgtttgttgcgtctaacttgtgacctgtgtttgtacaaccattataagagatatcatatatctacttgtgtaaccacatctgtactttcttctccttccttcttttttcatggggatctcaaatgatgatgtcttgcaagaaccttcgtggtgtgtaattgactttgtaagaaccggtaatctcatatccggtttagcttttaaaaatttgtatccaaagaccggtttgttctt

SEQ ID NO: 13056 - DNA, 810 bp, Arabidopsis thaliana
  Clone ID: JC-ATXP62C201N18T7_FLI
ctttgcgatgcagaagttgcgctcattgttttctccactcgtggccgtctctatgaatacgccaataacaacataagatcaaccattgagaggtacaagaaagcttgttctgatagcaccaacactagcactgtccaagaaatcaatgccgcgtactatcaacaagaatctgctaagctgagacaacagatccaaacgattcaaaactccaacaggaatctgatgggagactctttgagttccttaagtgtcaaggaactaaaacaagttgagaatcgccttgagaaagctatctctaggatcaggtccaagaagcatgagttgcttttagttgaaatcgaaaacgcgcagaaaagggagattgagcttgacaatgagaacatctatctaagaactaaggtagcagaagtggagaggtatcaacaacaccatcatcaaatggttagtggttcagagattaatgcaattgaagctttagcctcacgcaattactttgctcatagcattatgactgctggttctggatctggtaatggaggttcttactctgatcccgacaagaaaattcttcatctcggataatctcgtctgcgaaaaaccgagctgcaataactctctgcatgcatctggggattctttgctcagatttatctctacataaaatatgttttggtgcaaaataattcaaagtacaatgaaggtattggtccttcaagactcattgcaatttgtgttgtgtaatgattaagacatactctagtttttattgcttcgtatcatagtatctattctatggtatcttatttagtg

SEQ ID NO: 13057 - DNA, 1073 bp, Arabidopsis thaliana
  Clone ID: JC-ATXP71C222M6T7044_FLI
ctcaccgcttctccacgccgccgcatccaactggacgcaacacagaactactaagttcgctttgataatcagaggcgaatgttcttttgaggataagctgctcaatgcccagaactcaggttttcaagctgtgattgtctatgacaacattgacaacgaagatctcatcgtcatgaaggtgaaccctcaggacattacagttgatgcagtcttcgtttcaaatgtcgccggtgagattttgagaaagtacgcgagaggccgagatggtgaatgctgccttaatccgccagacagagggagcgcttggactgtgttggccatctccttcttctctctccttcttatagtcactttcctgttgattgccttctttgcacccagacactggacccaatggcgagggaggcacaccaggaccatcaggttagatgcaaagctcgtccacacactcccctgcttcaccttcactgattctgctcaccacaaggccggggaaacatgtgctatatgtctcgaggattacagatttggagaaagcctcagacttctcccctgccaacatgcttttcacttgaattgcatcgactcttggttgacaaaatggggtacatcttgccctgtgtgcaagcatgacataagaaccgagactatgtcttctgaggtacataaacgagagagtccgagaacagatacaagtacgagtagatttgcctttgcccaatccagtcaaagccgttagagttattatcggcttagcagctgaacactcatatcagtgctcggttacctggatcaggtccaggtttgcatcttatattgaatggttaatcatggtgggataagtttaggtaaagggaccggatctgccatactggtcgtgctttgctggattcccagatcaaaaagatatgagttgctttgcctctttttctttgcatgtgtacatttacatacgctctgagtcatgtgtacatttgatcattgtgtgtgtgtgtgtgttatagattgaaaaaatgtgtgtgatagtacagatatgcaaacaaattgatagaaaacaaatgttggtctaatca

SEQ ID NO: 13058 - DNA, 1404 bp, Arabidopsis thaliana
  Clone ID: JC-ATXP75C225K13T7_FLI
catccaagcaaatcaaatacccaactctcacacgttctcaaacaaaaacttcaaagagagagagagagagagttttgtgaactcaagaaaataaaaaaagttatagttaatgggattcggcttagagagtatcaaatcaatctccggcggatggggcgcggcggcgcgttcctgtgacgcttgtaaatcagttaccgccgccgtgttctgtcgagttgactcagctttcttatgcatagcatgtgacacaagaatccattccttcactcgccacgagcgcgtgtgggtttgtgaagtttgtgaacaagctcccgccgccgtcacttgcaaagccgacgccgccgctctttgcgtcagttgtgatgccgatattcactctgctaatcctctcgctagccgtcacgaacgtgtccccgtcgaaactttcttcgactcagccgaaaccgccgtcgccaaaatctcagcttcttcgacttttggtatccttggctcatccaccaccgttgatttaaccgctgttccggttatggctgatgatctcggtttatgtccgtggttacttcctaatgatttcaacgaaccggctaaaatcgaaatcggaactgaaaacatgaaaggttcttctgactttatgttttctgatttcgatcggcttattgatttcgagtttccgaattcgttcaatcatcatcaaaacaacgccggaggagatagtcttgttccggttcagacgaaaacagagcctctcccgttaactaacaatgatcattgcttcgatattgatttctgcagatcaaagctctctgctttcacttacccttctcaatcagtcagccacagtgtttcgacttcttctattgaatacggtgtagttcctgacggaaacacaaacaactctgttaaccggagcacgatcactagctcgacgactggtggtgatcatcaagcgagctctatggatagagaagctagggttttgaggtacagagagaagagaaagaacaggaaatttgagaagacgattcgttacgcttcgaggaaagcttatgcagagtcacggccaaggatcaaaggccggtttgcgaaaagaacagagacagaaaacgacgacattttccttagtcatgtttatgcttcagcagcacacgcacagtacggtgtcgtaccaacgttctgattcgaatctacggtggataaacaatcaacctgaagacttcatatcttccaccgttgatttacagtcggtgtataataagtatagtgagtcttaccgtagacaaacatcttatcctctttaccgttttaattactttttttttacgcgctctcactgccactgtaactctttttttttttcttcctatatatgtatgcttatttttatttagaaaatgttatgaaatc

SEQ ID NO: 13059 - DNA, 1243 bp, Arabidopsis thaliana
  Clone ID: JC-ATXP88C242A6T7_FLI
cgtatgagttgcttaaaccataaacctcaagctcaaaattttatcaaccttataaagtttcgttttctcgagattttgaatcttttcagctaaaaaagatcacagctttttgcgttttctggatgagtttgagataagagaagatgaagattcagtgtaacgtttgtgaggcggcggaagcgacggttctatgttgcgccgacgaggctgctctttgttgggcttgcgatgagaaaattcacgccgctaataaactcgccggaaaacatcagagagtccctctctctgcctctgcctcttccatacccaaatgtgacatttgtcaggaagcatctggattcttcttttgtctgcaagatagagctttgctatgtaggaaatgtgatgttgcaatccacactgtgaatcctcatgtttcagctcaccagagatttcttctcactggaatcaaagttggtcttgaatctatagacactggtccttctactaaatcctcacctaccaatgatgataaaaccatggagaccaaaccttttgttcaatctatacctgagcctcaaaagatggccttcgatcatcatcatcaccagcagcagcaggaacagcaggaaggagttataccgggaactaaagtcaatgatcagacatcgacaaagcttcctctcgtaagtagcggatcaactactggaagcattcctcagtggcaaatagaggagattttcgggctaaccgactttgatcagagctatgaatacatggagaataatggatcatctaaggcggatactagtagacgaggagattcagacagttcttcgatgatgagatctgcagaagaagatggagaagataacaataactgcttgggaggtgagacatcatgggcggttccacagattcagtctccacctacagcgtctggtctaaactggcctaagcattttcaccaccactctgtgtttgttccggacataacttcttcaactccttataccggttcatccccgaatcaaagggttgggaaacggcggcgacggttctagcatttgtaattatcttttagccgcttgagaaaagagattggcagctttctcagtagatgtaagatcacataaatgatttggaaacttgtaatgtagtgatactgtgagagtcggtgttctttgttagctgaaaaaacaaaaagatgtttatttggttgaagattataaggggttaaattactaagttatcaatttggctt

SEQ ID NO: 13060 - DNA, 663 bp, Arabidopsis thaliana
  Clone ID: JC-ATXP89C245B19T7060_FLI
gaaacgatccaaacgttcgagatctgatcttcatcataaccaccgtctcactgaggaagagtatctagctttctgtctcatgcttcttgctcgggatggcggcgatcttgactctgtgacggttgcggagaagccgagttataagtgtggcgtttgttacaagacgttttcgtcttaccaagctctcggcggtcataaagcgagccaccggagcttatacggtggtggagagaatgataaatcgacaccatccaccgccgtgaaatctcacgtttgttcggtttgcgggaaatctttcgccaccggtcaagctctcggcggccacaagcggtgccactacgatggtggcgtttcgaactcggaaggtgtggggtctactagccacgtcagcagtagtagccaccgtggatttgaccttaatattataccggtgcagggattttcgccggacgacgaagtgatgagtccgatggcgactaagaagcctcgcctgaagtaagtctttgttgaagacctggaagtttatcaaatgtaaatatcaaatttcaatttcaaggaacagttttgttgattctattaccaatacacaatacgattcaattcctttgtttctgaagtaacagcatactaaattcattagaaaaccgaatcgaaaatatttac

SEQ ID NO: 13061 - DNA, 823 bp, Arabidopsis thaliana
  Clone ID: JC-ATXP89C245B2T7_FLI
tcggtttcctgatgcaactcctgaagaacttagttcaaatgatgccacttgtatcatatgtcgtgaagaaatgacctcagcgaagaaattagtatgtggccatctatttcatgtacattgtcttcggtcatggttggaacgacagaacacatgtcccacttgcagagcactggttgtcccagctgagaatgctacatcaacagcttctggaaaccgtgggccacaccaagaatccctgcagcaaggaaccggtacttcaagttctgatggtcagggttcttctgtttctgctgctgccagtgagaatatgagcaggcacgaggctaggtttcaagccgctgcttctgcagcctctatatatgggagatccattgtttatccatcttctgcaaacacactagtatggtctcaaggtaattcattacttcctcagacggaggtagaagctcaaagaagatttcttgagtcccaaatcgaggtgttaacgaaccaacttcggcttttggagaaaccgacaactgtagatacgaaaggaaagtccgttgcggatactgcatagtggtgaaccattaacgcaaatgtggtggtctcatcagaggtcatttgcgtaaacaaaaaacaaaatgtggtaaagaagagttaggatttcggagtaaagagagaagtaagagtaaacttcagattgtgtgaatggttttgctatagagaggatttgaaaatgtaaatgttgggtgtctcatagaagcttggaacttaaaagtagcaaactggtcttctgtttaccttaccacacttgtctctctatctataatagtttttcttt

SEQ ID NO: 13062 - DNA, 643 bp, Arabidopsis thaliana
  Clone ID: JC-ATXP96C248A10T7_FLI
cttcatcaaatctcacaaatcttcaacacttaatcacaaatctcaaagcttcggataccaaatggctcgtaccaagcaaaccgcaaggaaatccaccggaggaaaagccccaaggaaacaactcgcaacaaaggcggcgaggaaatcagctccggcgaccggaggagtaaagaagccacacagattccgtcctggaactgttgccctaagagaaatcaggaagtatcagaagagcactgagcttctgatccgcaagcttccgttccagcgtttggttcgtgagatcgctcaggatttcaaaacagatctgcgtttccagagcagcgccgtcgcagcacttcaggaagcggctgaagcatacctcgttggattgtttgaagacaccaatctttgcgcgattcatgctaagagagtcactatcatgcctaaggatattcaattggcgaggagaattagaggcgagagggcttaagaaggagattgaagtactctagactgtgatcgttatgcttatgtatatctttcgttttccctaatttcgtgttttagggttggattaggttttgcgtttatgttgttcgatatctaacggatcaaaatctctccttccttagcaaagtttgaaaactccctccacattttc

SEQ ID NO: 13063 - DNA, 807 bp, Arabidopsis thaliana
  Clone ID: JC-ATXP97C251A23T7_FLI
atttctctcatctctctattagaaaaattattagcaattatgttgtccactgcaccggccttttcattctccgaaccgggtttggttaatcaattctcgggtttccaaaccgggttcactccttgggaatgggattgctctgatctctttttcgtggaccaaatgtctcttgaaccggccatccctagtccttgttatggtgaatccgacactggttccgtcaaaattaattccggttctcatgacatgaaaaccggttctgacgaatcttgtgccggtttcgtcaaaattaatcctcgttgtgacgacgccgacatatcaaacgatctaccgtgctctcaagcagatgaaccggactcggacgacacaaaacaattgacagccatcacaaatttcggttcgggagagaataaccataaccggaaaaaaatgatccaaccggagatgaccgacgagcggaagaggaagaggatggagtcaaaccgggaatcagcgaaacggtcaagaatgcgtaaacaaagtcacattgataacttacgagagcaagtaaaccggttggatttagaaaaccgtgagctcgggaaccgactccggttagttttacaccagcttcaacgagtgaattccgacaataaccggctcgtgacagaacaagagatactccggctaagattgtcggagatgcgtcggattctgatcattagacaacttcaacaacagcaacaatgggaactacataaccggagaatgatcatgactgaacaaaaccaccctcatcttcaatgatagatcaaaatatttaagaag

SEQ ID NO: 13064 - DNA, 2017 bp, Glycine max
  Clone ID: JC-GMFL02220050F11_FLI
acccccaccatcttggtcgttggtgcgggcgatcatggatcatcatcgtcaccctcatcacaccacccctctctccgagcccaccacccccaccacccctcgccccaccctcttcctctccacctccggcaaggccctcctcctctccaactccaacaaatccctcctcctctccaactccagcaaacgcctcgacaccccgaggaaaaaatatgtcaagcaagtcaccggccgccataacgacaccgagctccacctcgccgcgcagcgcggcgacgcggcctccgtccgccagatcctcgccgagatcgactccatcatgatggggagcttcgagttcgacgccgaggttgccagtgtcaggtccgccatctttaatgaggtgaatgagctgggagaaaccgccctcttcaccgcagctgaaaagggccacctcgacgtcgtaaaggagctcctccctcacaccagccacgacgcgctttcctctaaaaaccgctccggctttgacaccttgcacattgccgctagcaaaggtcatcttgccattgtgcaggcgctactagaccatgatcccggtttgattaagacgtttgcgcagtcaaatgcaactcctctaatctctgcggctacacgagggcatgcagatgtcgttgaagagttgttgtctagggatcctactcagttggagatgactaggtccaacgggaaaaatgcgctacatttagctgcacgccagggacatgtgagtgttgtaaagatactactacggaaggatcaacaacttgctcgaaggactgataagaaaggacaaactgcgctacacatggctgtcaaaggggttagttgtgaagtggtgaagctgattcttgctgcggatgcagccattgtcatgcttcctgacaaatttggcaatactgcgttgcatgtagccacaaggaaaaagaggacagagatagtgcatgagctgttacttctacctgacaccaatgtaaataccttgacaagagaccacaagacagctcttgacttggcggaggggcttccaatatcagaggaaattctggagatcaaagagtgtctcattcgttatggtgcagttaaagccaatgatctcaaccaaccaagggacgagctaaggaaaaccatgacacaaatcaagaaagatgtgtattttcaactggaacaagctcgaaaaacaaacaagaacgtgagtgggattgccaatgagctacgaaagctgcacagagctggaatcaacaatgctgcaaactcagtaacggtggttgctgtgctatttgcagcggttgcatttgcagcaatgttcacagttcctggtggggacaatgatcaaggggtggcagtgatggcacacactgcgtctttcaaggccttcttcatatccaatgcaatagcactctttacatcattaagtgtggtggtggttcaaatcacgattgttagaggggagataaaggctgaaagaagggttgtggaggtgatcaacaagatgatgtggttagcctctgtctgcacctctgtttcgttcattacagcatcttatatagtagttggtcgacgcagccaatgggctgcaatacttgttaccattgtaggagccgtcgtaatgggtggtgttcttggtaccatgacatactatgtggtgaaatccaaacgctcccgaaggatgaggaagttctctaagacaggaacacaattgtgtcgcctttcaaattcggatgattcggaaataaatccaatctatgccatttgatgttacttaatttgggactttaatgtaagtttgatccttctgttcaatgcttttgtatttatttttatttggcaggcattgagaaaggactcttagcttaatttggaggtttcattttgttcatagagaatggcttttatgtaagtaaaatggttcctagttactcattgtttcaaagggaacaatataaggaagccaaagtggtcagttacactgtttcttatgaaggttgatttcacatcacac

SEQ ID NO: 13065 - DNA, 2456 bp, Glycine max
  Clone ID: JC-GMFL02220051A09_FLI
gggaagctctgcaagtccacgggcaagtagtgaaattagggatggggcacaaggatgcgtcgcgtaagttgtctaaggtcttcaccttcgccgctctctccccctttggcgacctcaactacgctcgtcttcttctctccaccaatcccactctcaactcttactactacaacaccctccttcgcgccttctcccaaacccccctccccacccctcccttccacgccctctcccttttcctctccatgccctccccacccgataacttcactttccctttcctcctcaaatgctgctctcgttccaaactccctcctcttggtaaacagctccacgctctcctcaccaaactcggcttcgccccggatctttatatccagaacgtcctccttcatatgtactccgagttcggcgacttgctcctggctcgctccctgtttgatagaatgcctcacagagacgttgtttcctggacctccatgattggcggccttgttaatcatgacttacccgttgaggccatcaatttgtttgagagaatgctgcaatgtggtgtagaggtgaatgaggccacggttatttctgttttgagagcctgtgctgattctggagccttgagtatggggaggaaggtccatgctaatttagaggaatggggaattgaaattcactctaagtccaacgtttccactgctcttgttgatatgtatgccaagggtgggtgcatagcgagtgcgaggaaggtgtttgatgatgttgtccacagagatgttttcgtttggactgcaatgatttctggcctcgccagccacgggctttgcaaggatgccattgacatgtttgttgacatggaaagttctggggtaaaacccgatgagaggacagtgaccgcggttttaacagcgtgcaggaatgcaggcttgattcgcgaaggtttcatgttgttcagtgatgtgcaaaggcgttatgggatgaaaccttcaattcagcattttggctgtttagtggaccttcttgctagagcagggcgtttgaaggaagctgaagattttgttaatgcaatgcccattgaacctgatacagtcctttggaggaccctcatatgggcctgtaaagttcatggcgatgctgacagggccgagcggttgatgaagcaccttgagatacaagacatgagggctgatgatagtggaagttacatacttgctagcaatgtttatgcatccacgggaaagtggtgtaacaaggcagaagtgagggagttgatgaataagaagggactagtgaagccgccaggaactagtaggattgaggttgatggtggtgtgcatgagtttgtgatgggagattacaatcaccctgaggcggaggaaatatttgtcgaattggctgaggtggtggataagataagaaaagaagggtatgatcccagagtttcagaggtcttgcttgagatggatgatgaggaaaaggccgttcagttgcttcaccatagtgagaagctggctcttgcttatggactaatcagaataggtcatgggtctacaatccggattgtgaaaaacctaaggtcttgtgaggactgtcacgagtttatgaaactaatctctaagatatacaaaagagatatcatagtaagagacagaatacgtttccatcattttaaaaatggagagtgctcttgtaaggattattggtagcttcagaattgtccttgtgaagaatgcccactgtactgtcacattgacaaatgcagatgccaaagaatgttccacagtagcatggcaaacaaaacatgcgaacaaaaaaaagttgtgaagaatgtcccgtgtacagtcacatgacctactagctttgatgcctaatacgggcattgatgaatgcaaatgccaaagctgagccgtgatcgcagattctgatcaaatgtcaataaacgggaaatgttgttatcaataaggttcgttatattggataatgagcattccagatcggatatacttcgatctataatccatgacaaacgtccacgttcagagtgtatattagtcatcataataatttttgggacaaattcattggtttctaatttctattcggttatgcctaataaaactaattcagaaagtatataaaagaggagcagctgcaatcattctttggaggttctttggtcagatactgtgagcaatttacagaactgcaggtatggggtaaggatgtgtttgtaacgctacgctgtgcttttgcataatgataattatgtaattatgtgtattgcattctttttttagttaaagatgttgacaataatattgagtgcatttagtaatcatgagggcttttgcataattatgtgtgttgcattctttttttagctaatttgtattattgagtttatactttgatctaatcgcatattgtcaaatcattaaaaggtttaacaattattggttatt

SEQ ID NO: 13066 - DNA, 1304 bp, Glycine max
  Clone ID: JC-GMFL02220051B06_FLI
ttctaatgtctagttctgagagcacaaacgcgagaactagaacagcgtcatggttttctaccccattctttgttatcgttctcccggtggccgtggctgcgcttctctaccggctcgaaccattcaagccggttcttttgccggtccagctgggccggtccaccgtggcggttccggctcgtaacggccacatgcaagatggatcggaacgtgtgggtgagggacacttggagggcccggaagacttggcctacgacgctgcggcacgtgtcgtttataccgggtgtgaggatgggtggatcaagcgagtcacggtgaatgactcggtggttgactcggcggttgaagattgggtcaacacaggaggaaggccacttggactagttttgaagccgaatggagaactcatagttgctgatgcggaaaagggactgctgagagtgtcaagtgagaaggagattgagttgctggtagatgagtttgaggggttaaaattcaaactcacagatggtgttgatatagcagatgatggtacaatttatttcacagatgcatcacacaaataccccgtgaaggatgctgtgtttgacgtcttagaagggaagccaaatggaagattcttcagctataatccagcaacaaagaagacaaccctgcttgcccaagacctctactttgccaatggggttgcagtttcagcagatcaacaatttgtggtcttctgtgaatctgtcttgatgagatgcaataaatatttcgtcctgggccctaaaacaggaaccatagagaagttctgtgacctgcctggcatgcctgataacattcattatgatggacaagggcactatttgattgcaatgttcacggccctttctcccgaattggaattggcatatagataccctttcattaggaaggcttttgcaatgtttacaaagtatgtagggagtctatctatctcgaagaatggaggagttctagtcgtggatttagaaggaaaaccaactgcacattattatgatcccaaattagcattgactagtgcgattaaaattgggaatcatatatatgctggttccattttctacccctttgtaacacgttttgatgttgagaaatatcctgctctccccacagtttgagcaacagtgaacatcttgtaaggttaatgatgtacaagaaaatgtttagtttctggagtgtcatgatgtgaaaatgtttagtttctggagtgtcatgatgtgaaaattccattcatgaatctgttatatatatttttatataataaaaatggaatttctttt

SEQ ID NO: 13067 - DNA, 2108 bp, Glycine max
  Clone ID: JC-GMFL02220051B10_FLI
ggaagaaggagtatacggcatcccattcgaggaatggccaggagaacccagactggaagtattaacagacactgggacagagaattcaccaattgagccttcagaagcactgtccgagagaagttccattacagctgtgtgccatgccctgattttaggaaaggggcttgtaggcgcggggacatgtgtgaatatgctcatggggtgtttgagtgctggctgcacccggctcagtatcggacacgcctctgcaaagatggtaccagttgcaatcgaagggtgtgtttttttgctcacactgcggaggagcttcgtccgctgtatgtgtccactggatctgctgtcccttcgcccaggtcatctgcctcggctcctaatgtcatggacatggctgctgcgatgagccttttgccgggctcgccttcttcggtctcttccatgtcgccatcccactttgggcaaccaatgtccccatctgcaaatggcatgtcactgtcttctgcttgggcacagccaaatgtgtcagctcttcatttaccaggaagcaatcttcagtctagtcgattgaggtcttcccttagtgcccgcgacatgccaccagacgacttgaacatgatgtctgatcttgatggccagcagcagcatcctttgaatgacttgagctgttacttacagccgcggcctggtgctggttctgtgagtagatctggtcggtccaagatcctaactccatcaaatcttgaagatctcttttctgctgagatttcttcatctccccggtattctgatccagcagcgggttccgtgttttcccctacgcacaaatcagctgttctcaatcagtttcaacagctccaaagtatgttatcacctataaatactaacttgctatctcctaagaatgttgagcatcctcttttacaggcttcctttggtgtatctccttcgggtaggatgtcaccaagaagtgttgaaccaatctctccaatgagctctcgcatatcggcatttgctcagcgcgaaaaacagcagcagcagcagcagcagctgcgcagtctcagttcgagagacctcggtgccaacagtcctgcctcacttgttggctcccctgcaaacccttggtcaaagtggggatctcctaatgggaaagctgattggtcagtaaatggagacacacttggtcgtcagatgcgaagatcatcctcgtttgagctcaagaacaacggggaagagcctgatctctcttgggtccaatctctggtgaaggaatccccacctgagatgatcaaagagaagtttgcatctcctatgcctactgcatctgctgatggaccaaattcaaattcccaaattgaatccattgaccattctgttttaggagcctggcttgagcaaatgcagctggatcagcttgtagtctagtcaaaattgaccctttacatatcttgttgagataggtatttaatttcgtaaggtacatattcttttggtgaaatttttggaaagacaagaaaggaagtgtagtaaaggaatggaggatcggttggctgcagagtcacatgaaggatattctattttttcttttataaaataattgtcattcattattttactacatagcttcaggagagctgaaaaagctctctcccttggggctgatcaattaatagtaggcgaaaaatcctatcgaggttatctatttttcttccaaaacggccccgtttcagggttttcgcccttgctatttcactagagttctgagttcacttcactatcaagcaagctagagttctgagttcactatcaagcaagctagtttggtttataatgcgacaaaaaccattattagcctgcgtttgttctaaagatttttccgaagttcaccaagttaagccaagtgaatgatttgctgtttgcctaaggttgaagaagttgtttctttctgagggaataattagaggtaatctgcactgttgaatatttacagcagataaatgagatagtgaagtttacaatgttcttcttattaagctgtattaccttgaattgtactggttatatatcatttcgtttcaaattcaaatcaaatgcaatgtttttcttttctt

SEQ ID NO: 13068 - DNA, 729 bp, Glycine max
  Clone ID: JC-GMFL02220052E03_FLI
ctctgaatttagaggaaattagcagcaagttgcctccaaaatgcagtggtagtgaaactgtacggatggctagatcacttgttgctgctcgtcatgctggtgagagactattgagatgttggggtggtgggactggatgggctgttgaagatgccaaggacaaaatcatgaagctcttggaggagtacgagagtggaggtgttgtgagtgaagcatgccagtgtatccgtgacctgggaatgcctttcttcaaccacgaggttgtcaagaaagctttggttatggccatggagaagaagaatgataggatgctggatctgctgcaggaatgtttcagtgaaggtctaataaccatcaatcagatgaccaaagggttcaccagaatcaaggacggtcttgatgatctcgctctggacattccaaacgctaacgagaaattcagcttctatttggagcatgccctgaagaagggctggctcctaccatcatttgattccactgccacagatgtctaactggcccaggctgcagcagcttcttgaggaggactatattttcattgtttctcttatatatgttgttgcactttagcttccgctgaatgtggataaatctgtgggatggttggacttctcatgatcctttgaatctgttttttcttttctttcaaaattatgtcaccgacagatattcctatgaatctcagtcgttgtgtaaatttggtcttat

SEQ ID NO: 13069 - DNA, 1248 bp, Glycine max
  Clone ID: jC-gmfl02220053d12_FLI
gtcttgaaatcaagtatcaagagaatggaccaaaggctccattgtgggaagatatatcaattgcaatgcaaaggcttgggtacaaccggagtgcaaagagatgcaaggaaaaatgggagaacatcaacaagtacttcaagaaagttagggagagtagcaaagaaaggcgtgaagatagcaagacatgtccctatttccacgagcttgaagctctatacaaagaaaagggaaaatctcagaacccctttggcatgtttcagaatatgacgccaaatgagacgatgatgatggagccattgatggtgcaaccggagcaacaatggaggcctccacctcaatcattggaagagggtatagggaaggttcgtagagagggatgtggatgagaaggttatggatacagatgattatgctacagggctatatgcaggagatgatgcagatggtgaaaaattagccagaaaggttgggcctgagattatgaatcagttgactgaaggatttgaggagatgactagtagagttttaccatcgccattagaggacgagtttttggatgcactagacatcaattatgcaattgaatttgagccagaatatttggtggagtttgataatccagacattgatgagaaggaaccaatttcactacgggatgcacttgagaaggcaaaaccattcttgatgtcgtatgaggggattcaaagtcaggaagagtgggaggaaataatggaagagacaatggcgcgtgttccattgttgaaaaagattattgatcactacagtggaccagatagggtaactgcaaagaagcaacaagaagaattagaaagagttgctaaaactcttcctggaagtgtaccatcttcagtgaaacaatttactaatcgtgctgttatttctcttcagagcaacccaggctggggatttgacaagaaatgtcatttcatggataagctggtttgggaagtgtctcagcattacaagtgacctactggcctgcttgcattttatttttattttactttgagttttgatgaaacaaactgctactactcttgtaataatgagttgttgtagcgttattgctagcaattgttacaactctcgtatactttgtaataaatgaattatcattttaattagactttcaaaggtgataaactgtgggatgataattgatgattaggaaattaatggttaaaattttgataatttcataatatgtatgtattttttcagagtgtt

SEQ ID NO: 13070 - DNA, 1505 bp, Glycine max
  Clone ID: JC-GMFL02220054C02_FLI
tggtggtgaaattgcctggccaacccaaggttgggtttaagcaatttgctggatatgttgatgtagatgccaagcatggaaggagcctcttctactattttgtggaggctgagcaagaccctcacaagaagcccctcacactttggctcaatggaggtcctggatgttcctccattggaggaggtgcttttactgaattgggacccttttatcctaaaggtgatggacgtggtctccgaagaaattcgatgtcttggaataaagcatccaaccttctttttgtggagtctccagctggagttggttggtcatactcaaatacaacttcagattataattctggagatgcctccactgccaatgatatgtatttgttcatgctgaaatggtacgagaagtttccatcttatataacaagggagctgttccttactggagaaagctatgcaggacactatatacctcaattaactaatgttttattggaccataatgctcgttcaactggttccaaattcaatattaaaggagttgctattggaaacccacttttgagacttgaccgggatgcacctgcaatttatgaatacttctggtcacatggaatgatttctgatgaaattggccttgccattatgaatgattgtgattttgatgattatgtctatgcaagtcctcacaatgtttctcaattgtgcaacaatgccatatatgaagcaaatctcattgttggtgattatataaacaactatgatgtaattctagatgtttgttatacatccattatggaacaagaactcagattgaaaaggatggcaactaaaataagtgttagtgtagatgtgtgtatgactctagaaagacgtttttacttcaatctccctgaggtccaaaaggctcttcatgcaaaccgtacaaatcttccttatagctggtccatgtgtagtcatgttctaaactacagagacaccgatggtaacatcaacatccttccaattctcaaaagaatagtccaaaaccatatcccagtatgggttttcagcggagaccaagattctgttgtgccactattgggatctcgaacactcattcgtgaactagctcatgaattgcaattcaagattacagtcccatatggggcttggttccacaaaggacaggttggaggttgggtaactgagtatggaaatttgttgacctttgccactgtaagaggagctgctcacatggtaccttatgcacaaccttcaagagcacttcatctattcagttcttttgtgcgtggcaggaggttgcccaacacaacacgtccttcaattgatgaataaggatgatagttatgccagttgtgtaacaaaaaagtggcatgctctgatgacttttctaaagcctaaaaggccatagaaaaggaaatgtgaaaggaaaaaaaagactgtttcgttataagtaaccagcgattgtatggaaaggaaaattaacgtggaaaaaaatttgcattccatcgt

SEQ ID NO: 13071 - DNA, 1073 bp, Glycine max
  Clone ID: jC-gmfl02220054d06_FLI
gttgattgttgaagtttctcttctcttgctctgactccaatatttcctttaaaataaaaatagcattctcttccttcttccttcttccattcattcattcacattccacgctttcttcagagcctgcacttgttccacccttcaacataccactcctcctcttccccaattctcttatccgtaatctggcactcttcagagaagactttgtaagataaaaagagaaatggccttagaccagtattttgatgaggctgtgccccagttggattccttggaagataaatcgtctctcgaaacatggaaatgtggcagtgacgatattgcagattcggatagaaatgcctctggtggctttgattgcaacatatgcctggagtgtgtgcaagatccagtggtcactctttgtggccatctctactgctggccctgtatttacaaatggcttaatttacaaactgcctcttctgaaaatgaagaagagaagcaacaatgtccagtctgcaaatcagaaatctcacagtcgtcccttgttccactatacggccgcggccaaaccgtgttaccatctaaaggcaaaggccaccaagtaggggttgtcataccaagaagaccccttggtcctacacttgattccgcaactgtttccccacctatttctcacgtttatcatcgccattatccgaatcatcctcaacaattcaactcaattcctggcagttacacttcaatgttcaacacaggtggttcactagcaaatgcttttgatacaacatatggagtctttggtgagatgatatatgcaagggtctttgggaaccagatgactaacacatatacatacccgaattcttatgatctttcaaggaacagtaatccgaggatcagaaggcatttaatgcaagttgatagatcactcaatagaatcacttttttcctcctttgttgcattgttttgtgccttctcttattctgactgctattgcatattttttgtgcaatacatccctgtatagaatacaagcagtatgcagattctgccagatgcatcatatactcagaagttgtttgat

SEQ ID NO: 13072 - DNA, 701 bp, Glycine max
  Clone ID: JC-GMFL02220054F11_FLI
caacacaagaaaaccaacctaattccgagaagaagaaaaacattcattgtttccataaaaaagaaaatggaacgctctacaaaactcttctcggcggcgttggttctctgcgtggttgtgatggcacaccagacagcagcacaggaactaaaaggaaagaacctaatcaacaaggtttgcacaatcaccccgagcagagacctctgcgttgggatcctctcatcggacccaatcagaagccctgacgcagacctcaaggacttggcagttatctcccttagggttgctgccagaaacgcctccggcatcctcagcgaagccaaaatgttgatcgatgacgacaacctagaccccgacgtccaacaaggtttgtctgattgcaaggagacaatcttggacgccgagagccagctcgaggacaccattgcatccttgttggtggattccgacaccgacacacagatttggctcaaggctgccttggccgccatcgacacctgcgacgcttccattcccggagacgacgacgttctctccgtcaagagtgccatgttccgcaggctgtgcaacattgccattgccatcaccaagcgcttgaacaaacctcttaaattctaaacttgtcgattgtcctttcctttaactcttttttttttttttcatcctgtgtcaatcttaatctgaatatcttccgtaatttc

SEQ ID NO: 13073 - DNA, 1172 bp, Glycine max
  Clone ID: JC-GMFL02220055C12_FLI
aagcactatagtaaaaaaaggacattcattcatctatggctacccttattgctcccagcaaccactctccccaagaagatgctgaagctctcagaaaggcttttgaaggatggggaactgatgagaacactgtcatagtaattttgggtcatagaactgtgtatcagaggcagcaaatcagaagagtttatgaggaaatttaccaggaggatcttgtgaagcgcctagagtctgagatcaaaggagactttgagaaagccgtgtaccgatggatactggaacctgcagatcgtgatgctgttttggccaatgttgccatcaagagtggcaaaaactacaatgtcattgtggaaattgccactatcctctccccggaagagcttttggcggttagacgcgcctatctcaaccgctacaagcactccttggaagaagatgttgcagctcatacctctggccatctacgccagcttttagtggggttggtgaccgcattcaggcatgttggtgatgagatcaatccaaaattggcacaatctgaggctgaaattcttcatgatgctgtaaaagagaagaagggtagctatgaagagaccattagggtcttgactacaaggagcaggacccaacttgttgcaactttcaaccgctacagagagatccatggcacttccatctctaagaaattggtggatgaaggatctgatgagtttcagagggcattgtacactgccattcgtgccatcaatgatcctattaagtactatgaaaaggtggtgcgcaatgcaatcaaaaaggttggaaccgatgaggatgcactcactcgcgtggttgtgagccgggccgagaaggacctgaagataatctcagaggtttactacaagagaaacagcgttcttcttgagcatgctattgccaaggaaatctcaggggactacaagaagttccttctcactctgttggggaaagaagactaaatattttttctctgagggcatttgtgattacgagtttaggacaccaagctatacttgtgtgtgtgtgatggttgatggtgttaatctgtgttgattttgcttgagtctgttttcagttttccttgatcatgagaacttggagttctatcttatagagtggtaatatgatagctgtttggtggcttataaattatt

SEQ ID NO: 13074 - DNA, 794 bp, Glycine max
  Clone ID: JC-GMFL02220055D10_FLI
attcttcaagattcaggtactgcgtttcggaagcagacacagatggctcgtacgaagcaaaccgctcgtaagtccacaggaggaaaggctcctaggaagcagcttgcaaccaaggctgcacgtaagtctgcaccaactactggtggtgtgaagaagccccaccgttatcgtcctggtaccgttgctcttcgtgagattaggaaataccagaagagtaccgagcttttgatccggaagctccccttccagaggctggttcgtgaaattgctcaggacttcaagactgatctgcgtttccagagccacgccgtgcttgcattgcaagaagctgctgaggcataccttgttgggctctttgaggacactaacctgtgtgccattcacgccaagcgtgtaaccattatgcccaaggatattcagctggcaagaaggattcgtggtgagcgtgcttgagttggtggttggaaagatgaagatgattggtggctgcggttggtgtttttgtttttcagattcctttttttattcaatagatggggttgttagggagggtaggttttctgctggtagtagcattaattgggatataggcaaatactgctaagtgtccgtgactgtgttttcttcctttaagaaaattggcttgtaattgatttttggacatatgtatgtgttagaatgcttctgttttagtttttacctgcgggatgttgcagccactttagaaactgtattggacaacattcagttgccatctaatctcgtttaagttagtttgttggcttgcctcgttc

SEQ ID NO: 13075 - DNA, 2648 bp, Glycine max
  Clone ID: JC-GMFL02220055D12_FLI
gttttcagcgcgcatcactctttctttcgctttctctctcttcctcgttcgcttctctccccgaaatggagcagtctctgctgagaggcgaaagcagtgaccagagtaaccggtcgcggggaatattccggcgctccgatgctatcacctacggctccaactacgagaaagccgctgcgttcatcgatctggctgaagatggtgttggtctccctgaggaaattctcgactcaccaaacttccaaaattacataagattttactttatattcaataaatgcaatctaatctggtctcttagttattttgctttgatagtcctgaatttcctggagaaacctctatggtgtaaaaagcttaccacaaattcctgcaacgatagagagtatttctatttgggacaattgccatatctaacagatgcagaatgtcttatttatgagggaataactcttgttttgctaatcatacatacattcttcccattgtcatacgaaggatcccacatatattggaaaaatactattaatcaattgaaggttttctctctattagtgcttgttgctgatgtgctgctctatgcccttttcttgtctccactggcttttgattttctacctttcagaattgcaccttatatcagagttgttctttttgttctgaatattagggagctacgagaaaccatcactatcttggttgggatgcttgacacatacttaaatgtcttggctttgtggcttctgtttcttctttttgctagttgggtggcatatgtgttttttgaggatacaatacaggggaaaacagtattcacttcctatggtactacgttgtatcagctatttcttttatttaccacatccaataatccagatgtttgggttcctgcatacaagtcgtcacgttggtattgcctgtttttcgtactctttgtgctggtgggagtttactttgttacaaacttgatccttgctgttgtttatgacagtttcaagagtgagcttgtaaaacaagtttttgagaaggatcgtttgagaagaactatgttggacaaagcttttgatctcttggatacgcataaagttagtagtctcaacaaaaatcaatgcattaggctctttgaggagctgaacaagtacaggactttgccaaaaatctctcgggaagactttgaattaatatttgatgagctcgatgatagtcatgatataaagattaacaaggatgaatttgcggatatttgcaatgccattgctttaaaatttcagaaggaagatgttatgtcttactttgagtatttagcattctaccattcacccagctcaaagagattaaaagaatttgtgaggagtcctatgtttggatacctagtgtcctttgttctcgtaataaatctggttgctgttattattgagacaacgcttgatatagaaaacaattctgctcaaaaggcgtggcaagtggttgagttcgttttcgggtggatatatgtaatagaaatggttttaaagatttatgcatttggatttgagaactattggcgagatggtcaaaatcgctttgattttattgtcacagtgataattgccattggagaaactgtaacttttgctgtacctgatgatgatcttcctttcatctcaaatggagaatggattcgttaccttcttcttgcaagaatgttgagattaataaggatcctaatgtatgtcaagcgataccgagcctttgtggcaactttcttgactctcataccaagtttgatgccatacctagggatcatattttgtaccttgtgtatttattgttcaattggtgtacagatttttggtggaatcgttaatgctggaaaccccgaattggaattaacagctcttgctgaaaatgactatttggttttcaatttcaatgattacccaaatggaattgtgacacttttcaattttcttgtcacggcaacctgggacgaagttatgacgagctacaaggaattaactgggacttcttggacttatttgtacttcattagcttctacttaattactgttttgctgcttttgaacttgattattgcttttgtcttggaggcattctttgccgaaatggaacttgagtcatcagaaacttgtgaaggaaatggcaaggaagttgaaggagataaatatcgaaagcgatctattggcacaaaaacacgaagccagagggttgatgctcttcttcatcatatgctgagtgctgaattgtgtcaaaatgagccttccagtacacaaacttcataaatcattttgcagaatgcacgaaggagcccacctcattctgatctttcatgtggtttgcatctcgtgtgggtgtaccgtacggtagacaagagagcatgcaaacatatagtaatttgcatttcccttgtttgtggaaaaagcacgttatcaattctgtgctgaatgaaattattaaatcataaagtggcaggatgctatattccacgggactactagatatctgtcttttttatttggtacatcgatatctatcttgttagtctgtgttgtaatggcaacttttttttttaatctgccagggtttgatttttgcatttatatactatcaatacagtttggtagctgcgcaaactgtttgtaagttac

SEQ ID NO: 13076 - DNA, 841 bp, Glycine max
  Clone ID: JC-GMFL02220056C02_FLI
acgaaattgaaagaatttaccaagaatttccctcctgaactcaaaggtttggccatcaataacagtgaggccatacgtacagcccataatagctttgctaggccagaaccttttgttcctgaagagcaaaaggttgctaccagagatgatgatgtttaccacttcataagctatctacctgttgatggggtactgtatgagcttgatggattaaaggagggtcccatcagccttggtcagtgctctggtgggcaaggtgatattgaatggttgaagatagtgcagcctgtgatccaggaacgcattgaaaggtattcccaaagtgagataagattcaatctcctggcagtcatcaagaacaggaaagagttgtatacagctgagctgaaggaacttcagaagaggagggagcgcattttgcagcagctagcagcatcaaagtcagacagactggtcgacaatagcagttttgaggcactgaacaattctctctctgaagtgaatgctgggattgaagctgcgactgagaagatcttgatggaggaagaaaaattcaaaaaatggaaaacagaaaatattcgcaggaaacacaactacataccctttttgtttaactttctaaagattcttgctgagaagaagcagctgaagcccctcattgagaaggccaagcagaaaacaagcagccctcggtgaagaatgtttatacaaccttatgcgtggatttttttccccagatatgagtatgcccatatgtatcacgttgcacttaattattatttttagcattctcttaagtactgatgcacacaagcttcttctgatccaaggatataactct

SEQ ID NO: 13077 - DNA, 905 bp, Glycine max
  Clone ID: jC-gmfl02220056h06_FLI
gccaccaccaccccttacctcaccaacctcggcttcggctactccatcgccatcgccctcggcgttctcttcctcctctccaccctcatcctctcctcctacctttgctgccgcaccctccgccgccgcaacaacaacaacaaccgccgccacacccccgatggcgtcgtgctcccgcgcgtgatcttcgtacccgaggacgaggatgacgacgacgacgacacccgccagaacgacgtcgccaccggcctcgaccaggccgtcataaactcctaccccaagtttccattcgttaaggaaggtaattacgacagcacatgctcgatctgtttgtgcgagtacaaggattcggagatgctgaggatgatgccagagtgtcgacactactttcatctctgttgtctcgacccatggctcaagcttaacgggtcctgccccgtttgccggaactcccccatgccgacgccgctgtccacgccgctgcaggaggtcgtgccgctctcgcagtacgccgatgccagggcgaggaggtgaatttgaatttgaattttcttctccggtgtagtttgagttcagtggggaagtaaaaggagaagcatttaaatgtttttagttgtttttcttatcaaaattcgagttttatctcgaccatcataataaaaagtagttcatgtttagatgttggtgtagattgtcgaggtaagactacaattttgattagagaatagtactaaaaacatttaagaaaaaaattgtatctaaattttctgcaaaatgtaaatcttccctgtagacgggagatggtgattctttttttttttttttttaattctgaggaagaaaaatgaggtggtggtggtggtgggagcatgtgtaggattacaaggcaatttcaggagggtttg

SEQ ID NO: 13078 - DNA, 1185 bp, Glycine max
  Clone ID: JC-GMFL02220057B12_FLI
cttcctccaaattcagttgctagattaccatctttatacgaagtagcacttttagtcaatattagcagggagccactagtaagccatgatgggaaatatcagcgtaatatctagatattttagcattataacattacataactgaccatttcccactactcctgaggaagaagggatgccggcagatacaaggatactaacattttcttttattttattaggtacctttatgatctattgactaaaggaagtgttgtgaggaagaagattccaatgcttattctctgcaacaaaacagacaaagtcactgctcatactaaagagtttatccgaaaacagatggagaaggaaatgtatgtcttcaagtcccagatcttttatctctactcactttatcaatcagcaactgttttatgatttcattttattgtcctgttgataattgataatagttgtgctctctctgtgatggatgggacatgtgcacattcatgtgtcaatgctgttattgttgattggttcatattgaaggaagtatccttctattttctattgaatactgtaattttttttagcttcattcacttagttacttgtctttatgctctcaatcaactgattggtttgttttgatcttgaaaatgtgcatagttatttattatttaatatatgatagcctgattcttttcatgatttcactgccaaatctattattgactcttgatatcctttttcagagacaaattacgggcatcaagaagtgcaatatcagcagctgacatcgcaaatgagttcaccctgggggtacccggtgagccgttttcttttacccagtgctctaacaaagtgacaactgcagacgcttctggtttaactggggaaatatctcagctggaagagtttatcagagaacatgtaaagcgatagctggatattgtgtttaaacttgcggatttttgttgaactgaatgaatatgtagcgttgctcttcttggttgttatttctttgatttcaaagaactgtctggataagaagaggcaaaaaagagaaaatggggttttgggggtggggttggggtgttcggagtaggaatcactatgttgggatcaatgaggatttacttcattttaagtcctggtatattgattggactataatgatttatcaaattgtatccatacttc

SEQ ID NO: 13079 - DNA, 1755 bp, Glycine max
  Clone ID: JC-GMFL02220057E01_FLI
gtctaaatatggagtcctctaggaggtacaaagtggttgcacagagaaaggccttgtacagatgatgcttgctgtgttaagcgtctgagattatgtggcgccatacttgttgggaagactaatatgcatgaacttggggttggaattagtggtatcaatccacattatgggaggttcttctagtggatctgctactgtggtgtctgcaggattgtgccctgttgcccttggtgttgacgggggagcatgcttgttcaggttctgtgagggtgcctgcatctctttgtggtgtagttggtctaaaaccaacttttggccgtgtacctcattccggagtccttcctctaaactggacagttgggatggttggaatactagccggcactgttgaggatgcattgatcacttatgcagccattagtggagaaatttcatcccatcagccctctaatatgcttaccaagataaatcttccactgctgcccttgacgaagtccatatgtgacatcaagttggcaaaatatgggaagtggtttgatgattgcagtgatgatgtcatattatgctgctcccgtgccttgaggaagcttcaggatcattatggttggaaggtaatgcaaatttaacccaaaaaagaacagttttaaatgctaactttgttatcttgcttaacaaatttttagaagcaacctgttaagggtagaaaatccaaatagagcttttccaatacaactattgagcctttcattaagaaatagaaacgtaattacttactggctaaccttcgaaccttattctaaacatacaagacaattgatgtcactatcccagacatagaagcaatgcgcctagcacattacttaacaattggatcagagtgttccacttggtttgattcttttggagaaaaaatttggatgggacgcaagggttgcacttaacatctatggtgctttcagtggcaaggagtacattaaagctcagaaactgaggaatcgacagttgcagtttcacatgaaaatatttgctgaggcagatgtcattgtgtcaccaacaacaggtgtgactgcatactcgattcaagatgatgcactaaagactggtgaacttgactacgtaaatggagctgcacttgttcggtattccatatcaggaaacttcctaggacttcctgctgtgactgtaccggttggatacgataaattgggtttgcctattgggcttcagtttataggaaggccttgggctgaagcaacactgatccacttggcatttgcaacgcaggccatatgcttagaatacagaaagccaaagatattttatgatctgttaagaaaaaattaaatggggtgaagcatgtcagaaggaagtatgcacaagcagtgtgtcatgtcttttcaagcgaaagcatagccatgttatggcaagtttcagtcatatcattcaaaagcaatagtgctgtagcagggtaggcttatacatggattgaactaatgaaatttaggttcggaaacattttgtcccaattgtgtacaaatttattcgtccgggcaggcttacctatgtataatgaaggtgaacaagaagaatgagaatgaacataaaaaattctagttttatatcataagatcctctggtaatatatgacatgacatgtctttatgggccttttttttgtgatgggatcctatatctttttagtttttatgatataatgagttattatgtaataagtttcgaaattttactatactg

SEQ ID NO: 13080 - DNA, 1097 bp, Glycine max
  Clone ID: JC-GMFL02220057H01_FLI
aaacaaaagaaatcacaatctgtggcttcattatccttgggtgcaccatctcctgcggttcatccatctatgcaaccatcatcatccgcattgaagcatggacctccatcaggaactaagaccaaaaagcaaaaatcattcccttctacaggacttacaagccaaagccaggtcactaatcaggggggttcttcaggtgcctttgcaacaaaaggacctgctgaagcagcttcttatgatccctggattggaaggaaagtttggacaaggtggcctgaagacaaccacttctatgaagctgttataacggattataatgctgctgagggactacatgctttggtttatgatatgaattcagcaaatgaaacatgggagtgggttaatcttaaagagatatctccagaagatattctttgggagggtgaagatcctggaatatcccataaaggatgccagcccggtccaggtagaggattgaagaagtctatgcctcacggtggtgcagttactggtgctggaagaggtaggggaatgatgaaggtgcagcctaagaaagatttcactttgtcacaaaaagggggcaggaagaaggctacaaatgatattgagatactccatacagatacccttatcaaggaggttgaaaaggtttttactgcaagccatcctgatcccatggaaattgagaaagcaaagaaaatgctaaaagaacatgaacaggctcttgtcaatgcaattgccaggctcggagatgtgtctgagggtgaaagtgccagatggaaaacctccgttttcgcaagggctgtcaatggatcaggaaaaacgctggaagaaacaacagtataattcgggtggtgttggagtaccagatggttcaaatggtgataaattacaaagagaaactagtgctccatctgagtatccgcatgaagttggcaacaacgcatgactaatgtaatatgctattattattgtataattgtagtttctttttgtatctattaagttgtgcagcgggtagcttcaatctagagagacaaccgatatgttacttgtaaattataaattactaaaaacatggttcttatgcttgt

SEQ ID NO: 13081 - DNA, 1468 bp, Glycine max
  Clone ID: JC-GMFL02220060G12_FLI
attgattcgttgtctgacacgcaattagtgtttagatatactactgatcatgtggttgctgatattgccttacaggcctatgtgcagcagttagaatcaagtcgtttgaagttgatgcagttggagcaagaacttgaacgtgcaagacagcagggaatgtatataggtggtgggttggattctaatcatctgggttttgctggatcagtaaattcaggaattacaacctttgagatggagtatggacactgggtgaatgagcaaaatagacaaatcacagaactgagaaatgctttaaatgctcatattggtgacgtagagctcaggattttagtagatggtatgatgagccactatgccgaaatgtttcgcatgaaatctgctgctgcaaaagcagatgttttctatgttatgtccggtatgtggaaaacaacagctgaaagatttttcctgtggattggaggctttcacccctcggagcttctaaaggttcttggtcccctgattgaacccctgacggagcaacagcgtttgaatatctataaccttggacaatcatgtcagcaagcagaagatgccctttcacaaggtatggacaaactccgccaaacacttgctgatagtgtagcagctgggcagttcatggaaggaacgtatattccacagatgacttctgcaatggagaagttggaagatctggtgagctttgtgaaacaggctgaccatcttcggcaagaaaccttggagcaaatgtctcgaatacttacaatccgtcaggcggctcgatgcttgcttgctttgggggaatatttccaacgcctgagggctttgagctcactgtggtctaatagaccccgggaacctgcttagtctcacaacaagattacaagagcgcaaactcataacatgaacgtgatgtgatgatgaatatgggtcagtttctttggcaaagagcatcaaaaccatgtgtcatgagaggtccaggattttcactttgcaatgggagcattgcagtgttattggtagtatgtgaaatacacaacagcaatgaacacacgtacaaaagtgcagctagcaggatttgtttccttatagaaaattggattgatgatccacttgtagctagcaggatatataatcatatcttgattccaggcagaatctcacaacttagatatagcatagtccaaggcatccacaacaaaatctgcacatcaggaagccagtcagtggacttcaacaaagaatctggactccacaacttggttaaagagagccaggacagaatttatttatatacctgcatcatctttggtgaaacacattggtggcttgatcctaaaaacatttccatgcagccctccttttccaactagaataccgagctctacaatttataggagtaaacagttactatgttttgtagaaattttggaaaagaaagcttcatatgcaattctttttattc

SEQ ID NO: 13082 - DNA, 1130 bp, Glycine max
  Clone ID: JC-GMFL02220061C08_FLI
atctcgtgtgtttagtatcataaaaatattggagacctaggcgaattctagcatgcgaaagtgaaacttcttttgcacgtacgaaaataaatattaaccgtttgatactctttaattttcatcgcatgactcaaattttttaacatttttgcttttcttttttctctttttatgcctatttttccttaattacccatttcttctactttccccttctttgttctttccctccagcaccccagatccgtcatcatcctcatcaaggtcgactccccagtcgaccataccatcgtcgccctcttcgaccacctcgaccccgacgactacatcatcgacaacgacaacgagtggtacaagaacatcgagcgccgcatgaaccaacgagggctccctccctctcacgagccaatacactcctcgcgacttcgttctctccctccagcggcccaaatccgtcatcatctcgtcaagaccggctccccagttgaccacaccatcgcgaccctctccgaccacctcgaccccggctactgcatcatcgacggcgacaatgagtggtacgagaacaccgagcgctgcatgaacctcgtcgccgacaaaggcctcctctacctcggcattggcacctctggtggtgaaaacggcgcatgccacgacccctccctcatgcccggtgggtcccaccatgcctactccaatgtccaggacatcctccacaaaattgccgctcaggtcgaggacgacccctgcgtcacctacatcgacgagggaggctctggaaactgggctgccatggttggttttagaggttgctttatcggaggaaggttgtgcgagggggaggggaaaggttgtggactggtggtgccggatgaagaagaaggtaacgtgaggggggagggggagatggaaggtcacgctagggggagatggagggggaggcgaagggttgcgggtgctggaagggggaaggaaggttgctggtgtcggaagggagggggaaggccaccggtgccgggagggaagggggagaagggaggtcttgtgagggggagaaggaaggggaaaagtgagaaaaaatgaacagtctaggagggaggaagaggaaaaagatgaaaatgagtggggag

SEQ ID NO: 13083 - DNA, 1507 bp, Glycine max
  Clone ID: JC-GMFL02220061E07_FLI
gtgagcaggctcccggtcctgtccgacaagctctgcggcaagaccaccgccgccagaatccagctcctgggttgctacatgctgtacgaggttgtagggttcacgcaaatctcggggatgcagattttgtacaagacctgtgggggaaccaacgctgctgggagagggtttgaggagaggagggacactgctttctctgtgatggagaatggggtggtcactggccatggcttctatgccaccagctaccagtctttgtatgtgatggggcaatgtgagggagatgttggtgattctgattgtggggagtgtgtcaaaagtgctgtccagagggctcaggttgaatgtggaagctccatttcaggccaggtctatttgcacaagtgtttcattagttatagttattaccctaatggggttccaggaagacactcttcttcagcttcatcatcttccaattcctattcttcttcttcttcttcttctggtaataactaatacctagacaccaaaagagataagaatgaatgacattaaatttgtgtttgttgaaaagtgtttcttgcacaacttgagttctctagaacttgagagagaaaggaaaagaggatagacaagtgattggtttgattgatgatttagtgtgataggaagagagagatagagagaaaagaaagttgttgattgagtgtttgaaatttttggatgtcaaaatataatccctctttgtttgtcgttgttcattttacatggaaaaatgtttgatgaatactcttgattttattttacgtctagagagagttgaaaaagaaaaaaaaaattataggttggaaaagagaaaaaattataagtatgataaggttatgatataataggaagaaagagatatagaaaaaataagaggtgttagtggggtgtttaaaatatgagtgcatgtttatcattaatcttttacatgcacacggctcaattttgtgataattgtctatttgtgccaatgttaaaaaaatgtgcgactttgctcaatgtagaatatggtttgattatgagtgtgatgtgtggctaattgatgcaatggcagggcaaaatacagggaagacagtggctataatagtaggaggggcagctggagtggcgtttttggtcatatgcttgatgtttgctaggagtttgaagaagaaacgtgatgattattgacagtggaagatggttgattgaggaggcataattcttcatgcagtggattattatttctatatatatagcttttggatgaaagagatggaaaatttctggtaattagactttagcagatagggaaagaatctgggacggttaaaatgtgggaactactaattcttgtagttaggtaaggagattttgttgtgaagaacggtgtaattagctcatgaaagtgagaatttttttacattacaaggggaaaaaaaacaaatatacctagaggaatgaatgtttgtcatcctgaatgggtgaaaattttgtgcct

SEQ ID NO: 13084 - DNA, 1572 bp, Glycine max
  Clone ID: JC-GMFL02220061F04_FLI
ggctaagtagagaggtagctttccctgtaagactgttacttaagattaccaagaattctagctagctggttagttcttttgtcatttcaaagagaaactgagagagccatagctagggagaataccatggacaaattgtatgggttgagtcatctcttcatgacagtgtttcttcataacttctccatgttcatggtggtaccagccatcaccgatgtcacaatggctgctctttgtcccggacaagatgaatgctcacttgccatctacatcactggttttcaacaagcgatgatagggctgggcacgcttgtgatgatgccactattgggaaatctttcggataagtatgggaggaaggccatcctcacactccctatgatcctcacaatcattcccgtaggcatattagcttacagcaggacgaaaaaattcttctacgtctactatgtgtttaagatactcatttcaatggtttgcgaaggaagcgttccttgcctcgccctagcttacgtggcagataacgttccagaaagtggacgaagcactgtatttggaattctttcaggaattgggtctgccgcatttgtgtgtgccaccttatctgctcgatttttatcatcagccctaacttttcaagtttctacacttatcgcggtgattggagcactatacatgcaatttttccttcgagattcagtcattgatgacaagcacctttataccccaatcatatcacaaggaaatcccataatatctaaggtcaatggaaacttggaaagtaagaagcatcttttgaaagcattgcgctccataaaggacctaacttctttcctcaatagcagcttgaccattaatcaagcagcaattgttgctttcttcaatagccttgcagatgttggccttcatggatcattgttgtattttttaaaggctcaatttcactttgataagaatcagtttgctgacttgatggtcatttctgggattgcagggactgtgtcacagcttcttcttatgcctattttggctcctattttgggcgagacaagactactctcagttggcctattcttccattgtgtacatatgttcctttacagcatggcatggtcctccttggttccttatgcttccgccatgttctcaattttatatgttttctcacacccttgtatacgaagtattgtatctaaagaagctggtccccatgagcagggaaaggctcaaggttgcatttcaggcatatgttcaattgcacatattgtttctcccttggttttctctccattaacagctctattcctttctgaaaaggcaccttttgattttcctggattcagtataatgtgcattggatttgcttcgatgatatcttttgttcaaagtttgatgcttagagtggctcctcccattttgaattaggcgaatataaattagttagagccttcaacggtgcttttattgtgctttagccgatcctcatatgtacaagctctacctttaacgtgcttttgattaggaaacaatatattgtataagttcattcctagtagacatttgacaaacttc

SEQ ID NO: 13085 - DNA, 2153 bp, Glycine max
  Clone ID: jC-gmfl02220061f06_FLI
ggctcgagaaaagatagagcaaggaactcataaaagtgggaggaatgtggggttgaaagcttatgttgtgtgccaagtgcttgagattgttgtcaaaaaggaaataaaacaagctgaaataaaatctacacaagtcaaaatcaggaggttcttccgaccagaagatttatcaaatgagaaggcatattgctctgatatacgagaggtgtattacagtgatgaaacatatataatctctgtagaatccatagaagggaaatgtcaagtcagaaaaaagaatgatattcccgaatgcagtgctcttggtggaatcttccaaaatgtttttttctgcgagctcttgtatgatcctgccactgggtcactgaagaagttgccggctcatataaaagtaaaatattcaagtggacaaacatctgatgctgcagctagaaagaggaaaggaaaatgtatagagggagatggtgtttcagagtccacaaaggaaggaaaaacattaaatgataaacgtttagcaaccttggacatttttgcaggctgtggtggcttatcagaggggttgcagcagtcaggagtttcatcaactaaatgggctattgagtatgaagaaccagccggggatgcatttaaagctaatcatcctgaggcattggtgttcattaacaattgcaatgttattcttagggctgtaatggagaagtgtggggacacagatgattgtatctcaacatctgaggctgcagaattggctgcaaagcttgatgagaaggaaataagtagtttaccaatgcctggacaagttgatttcattaatggtggtcctccatgccagggtttctctgggatgaataggtttaaccagagcagttggagtaaagtccagtgtgagatgatattggcattcttatcctttgctgattatttccggccaaggtatttcttgttggagaatgtgaggaactttgtgtctttcaataaaggacagacattccgtttaactttggcttcacttcttgagatgggttatcaggtgaggtttggtatccttgaggctggagcatttggggtttctcagtcaagaaaaagggcattcatatgggctgcttctcctgaggatgtgcttcctgaatggccagaaccagtgcacgtcttttcggcccctgagttgaagatcacattatcagaaaatgtccagtatgctgctgtccgcagtactgcaaatggtgctcctttacgtgcaataactgttcgagatactattggtgatctcccagctgttggcaatggagcctcaaaaggaaacatggagtatcaaaatgatccagtctcatggtttcaaaagaagattcgaggtgatatggttgtcttgactgatcatatatcaaaggagatgaacgaattgaacttgattcgatgccagaaaattcccaagagaccaggtgctgattggcgtgaccttccagaagaaaagataaaactgtctagtggacaagttgttgatttgataccatggtgcttgccaaacacggctaagcggcacaatcaatggaagggactgtttggcaggttggattggcaaggaaatttcccaacttccgttacagaccctcagccaatggggaaggttggaatgtgcttccaccctgaccaagataggattcttactgttcgtgaatgtgctcggtctcaaggcttcccagatagctatgaatttgctggcaatatcatacacaagcaccggcagattggtaatgctgtgcctcctcctctagcatcagcattggggagaaagctcaaggaagcagtggacagtaagagctccacttagaagatgggccttctacattaggtcatgcttattgtattcataacagtcaccaagatattgcaaatcatcattccgggttccaaaaactagaaacccttgtatatagtgatatccattggtcatttgttgaggctaattccttgtttaactttcctcaaccaaggaattgaatggatgatgctcattttctatcaactaggattttcttgattagatggtattttggctgtttatgaaagaaatggttgggaattgattacctcccaatgtgtagttgaaaattgagaccaattttttttaacctgttatgaatatttgttgttgc

SEQ ID NO: 13086 - DNA, 1931 bp, Glycine max
  Clone ID: JC-GMFL02220061F11_FLI
tataaataaaacggtttctctctttgagactactatcagggtcctcggaggattactttcagctcatcttattgccactgattatgctacgggcatgagagttccgttgtatgataatcagttactaaacttagctgaagatcttgccaggaggttgttacctgcatttgatacccctacaggaattccatttggatctgtaaacttgttacatggagttgataaacatgaaagcaagataacttcaacagctggtggtgggaccttgactcttgaatttggagttctaagccgattgacaaatgatcctatttttgaacaagttaccaagaatgcagtgcgtggactttgggcacggcgttcaaagcttaacctggtcggtgctcatattaatgtttttacaggtgaatggacacaaaaggatgctgggataggaactagtattgactctttttatgagtatctattgaaggcttatttattatttggagatgaggagtacttgtatatattccaagaagcttatgctgctgccatgcattatctttaccatgacccttggtatgtggaagtgaatatggattctgctgctattgtctggccattatttaacagcctgcaggcattttggcctggccttcaggttttagctggagatatcaatcccgcaattcgcacccatgctgccttcttgagtgtctggagaagatatggttttactcctgagggctttaatcttgctagtctcagtgttcagcatgggcagaagagttacccgttgcggccagagctaatcgagagcacctattggctatacaaagctaccagagatcctagatatctcgatgctgggagggacatggttgctagtttacagtatggaactcgatgcccttgtggatattgtcacatttctgatgttgagaatcaccaacaagaagatcacatggagagcttcttcttagctgagacagtcaagtatctgtggcttctgtttgatttggctgtgggtcctgacaatcttgtggaaaatgggccttacaagtacatatttagcactgaaggtcatttactgcctgctactcctcaaatctccttagtgagggaacattgtttatactatggggcttattgtagaagtggtgatttgagacaaacatactttgtgccagagtctgacaaagataagaaagaatccaatgatactggattttatgagagttggactaaacctacttattcttcggactacactactgttgagccaagtgctgtttcaggtttgatcaagggtttctgcccaggattaaatcatggacagaagtttggtatattatatgcctatccaactgatgaacgtcatgattatgaaaccaaccaagtccaacagaaagaatcaactactgctgtgcaactgcaaagccattcagtattggttctccgtgaccagagttctgacaatttgctaccagaagacaatagcagtaatcataatgatagtcagacaaatgaatcaagcgatactccttgaagtaggaattataagatctcagttatgcaataggattggtggggaagaatatactcttcaacttcaaagggttgtacttctaaaactcgggcaggctcacccacctgaaatttaaattcaagttttgttagtctgtctaattgagaaagtatgcatttgataatttcggcaactgttgatacagagagcatggagctgaaagagttaaattatggatgaactgacccactaatatcctgcctcctaatcatcgggcacatgtataagaatgtaatgtaattatttttgttgtatcatttttcctaaggctcttgtaaacctattgtgagaggtttaatcagtgtacatgacataggtattatcagattattgaatttagatcataatttgaattgctgat

SEQ ID NO: 13087 - DNA, 1399 bp, Glycine max
  Clone ID: JC-GMFL02220062A10_FLI
cttcaaccaaagccaaagtctcaatttgtttaagcactactgctaccaaaccaaaagggtttcgttccttagggcggttttccgatttctcggaaaccgctctatataccctgcactgcaaccacattcgttatagtgttcctaatttgaaagaaagagagaaagaaaaaattaatgtccttggatttgtagaaattaataaataattttggacgccctctcccctcactcgcgactatgggtgcaaaacggcaacaacccagtgaatgggtgaaaggtaaacttgtagggtgtggatcttttggcaatgtccatttggcaatgaacaaaaccaccggtgggctttttgttgtgaaatcaccacattccagggctgaacgccatgctttggataaagaggtgaaaatcctaaacactttaaattcatcaccatacattgtccaatgtttggggaccgaggaggaggaggaagaccaaggcaagctcaatgtttttatggagtacatggccgggggtaatttggcagacatggtgcacaagtttggtggctcattagatgaagaggtggttcgggtgtataccagggaaattcttcatgggttagagcatcttcatcaacatggaattgtgcactgcgacctcaagtgcagaacgtgcttttgggatcatctggcaacatcaagttggcggattttggatgtgcaaaaagggtaaaggaggactcagcaaattgtggtgggactcctctgtggatggctcctgaagtattgaggaacgagtctgtggattttgctgcggatatatggtccttgggatgtacagttattgagatggctactggcacacccccttgggctcatcagctttcaaatccaataactgctgtgctcatgattgcccacggcgatgggatacctcactttccaccccatttctccaaggagggtttcgatttcttgagcaggtgcttccagagacaacccaataagaggtctacggttcaggacttacttacccatccttttgtttcaacgccatcttctcaacaacaatatgcaccttcctcctctccgtccacagtcaaagaaacttcaaaggagaatcgttcttcaatcacaaacacatttgcatctcatcatgatgaccccaaaggaataccggtatgtaaaccccaagacattgcattgggctcatcagggaattggattactgttagatcaggctgaacacataccaagtgttactgtagatagacaattcaaatgtacagctttgagtaggagacgaataggttgtcaatggcttttcctttccttctttcacataacttgtatccaaaggagtagtattatttgtcgtttaatggaattaatgaacataggcctgctttcagttttct

SEQ ID NO: 13088 - DNA, 1602 bp, Glycine max
  Clone ID: JC-GMFL02220063A03_FLI
ggggtatgccgtatgtcaaaaatgttaatgtgcttatttcactttcttctttcccaaccataccctaaactaaaccctcctttgatatttcattttattctattctatgcctttatgcctagaacgtttacttgaagctgcatcaattgaggagggattcttcatctttggattcgctttggtgcctcggagtcagagctgcaaggaaagtggagatgctgggatgaaagctgaattttgtgggaaatggctactttagttgaaccccccaacagaattaagcctaaggggaagcattattatacaatatggcaaacattgtttgagattgatacgaagtacgttccaatcaagcctataggccgaggagcatatggcgtggtgtgctcttccatcaacagggagaccaatgagaaagttgcaattaagaagattggtaatatatttgagaattctattgatgcattgagaactttaagggagctgaagctgcttagacatattcggcacgagaatgtcattgctttgaaagatgttatgatgccaatccacagaacaagttttaaagatgtctacttggtctacgagctcatggatacagatcttcatcaaattattaagtcctctcaaccactttccaatgatcattgcaaatatttcttgtttcagctccttcgaggtctaaaatatcttcattcagcaaacattcttcaccgggacttgaagcctgggaatctgctcgtcaatgccaattgcgatttgaagatatgtgactttgggcttgcacgaactaatggagttgatggccagtttatgacagagtatgttgtcactcgctggtatcgtgcaccggagctcttgttatgctgtgacaattatggaacctctattgatgtctggtcagtagggtgcatttttgctgagattcttggtagaaagccaatcttccctggaactgaatgtctcaaccagctgaaactaattataagcgttcttggaagccagcatgaatctcatcttgagtttattgacaatgcaaaagccaggagatttatcaaatcactgccctgtactagaggcagacacttctctcagctatacccacaagcagatccattagccatagatttgttgcaaaaaatgcttttgtttgatccaaccaagagaattactgtcttggaagctctccaacacccgtatatggctggcctatatgatccaaggtgcaaccctcctgctcaggttcccatcagtcttgacatagatgaacattggggagaaccgatgattagggaaatgatgtggaatgagatgctacattatcatcctgaagctgcttctaccaatgcatagattattaattcttccaaaggctttctagtcctgttgcttgtctctagggatagttctgattttccctagataaactgtaatcttaaaaggatttaactaccgaattttgtactttgcacgagattactttagaacctttttaatttgacgtctccacaaggataatggcatcttgtaacttgtatatagccatgcacactgtttttggtttttcggctaaaaacccatttgaactagtgttgttcatcc

SEQ ID NO: 13089 - DNA, 987 bp, Glycine max
  Clone ID: JC-GMFL02220063A07_FLI
tagcaatcactaagatcagtggccgaggaggcttgaaatggatcataactggtttgtccataacaacacttcctaacactttgattcttggaatccctctcgtgaaggctatgtataagagtgaagcagttgttctcctggcacagattattttcttgcagagcatgatttggtacaatttgttgttgttcctttatgaacttgatgctgtcaagaccaggcctactgcagctgcatcatcatcacaaggatcaggagaaacagacacaggtcgtgaagtacaatcaaaaggagaagaagacgcagaacctagaataaaaaggaagaggaaggtcttgctcattcttgtcacagtgggaaagaagctaattaaaaatcctaatacatatgcaactttattgggttttatttggtcaagcataaaatttaggtggggattacatatgcctgaagttgttagtcagtcaatcgaaatattgtccaatggaggtctaggcatggccatgttcagcttaggtctgtttatggcatcacagtcaagcatcatagcatgtgggccaaggatggcaatggtggcaataggactgaaagttgtgcttggacctaccctgatggctgtggcttcctttgtgattggattaagagacacattgtttaaagtggcaattgttcaggcagctctaccccaaggaattgttccttttgtttttgccaaagagtataatgtccatccagccgttttaagcactgcgatcttgttaggaatgctcattgccttgccggtggaattggccttctacttcctattagcaatttgaagagcaaatgttaaatatatgctagctagggacatcgagaataacagcattacattgccgtaaaataacaatttataaatagttgtaaatttactgcattattgattcattgtaattagaaaacatgtgatcactcaactaattaatactacttaattaatttgtctat

SEQ ID NO: 13090 - DNA, 1564 bp, Glycine max
  Clone ID: JC-GMFL02220063B08_FLI
ctttgcatgctgtgcacattttggtgaaggaagttagatctgtgggagaatgtcgtcgtcggaggcgcagggagcggcgcagaggcgatatttgacagtggggtggtgccgtcgtctctcgtcgagattgcacccattcttcgcgttgctaatgaggttgagaagactcatcctagagttgcttatctctgccggtgttatgcgttcgagaaagctcatagactggatcctacttcaagtggtcgtgatgttcggcaattcaaaactgcccttcttcaacgtttggaaagagaaaacgatccaacattgaaaggaagagtaaagaaaagtgatgctcatgagatgcagagtttttatcagcattactacaaaaaatatatccaagctttacaaaatgctgctgataaagctgatcgtgcgcagcttaccaaggcatatcaaactgccaatgttctttttgaggtttttgaaggctgttaacatgacgcaatctatggaagtggatcgtgagattttggagactcaagataaagttgctgagaaaacagagatcttagttccttacaatattcttcctctttatcctgatagtgcaaatcaggcaataatgagatttcctgagatccaagctgctgtatatgctcttcataacacaaggggtctagcctggcctaaggactacaagaaaaaaaaagatgaagacattctggattggcttggggtattgtttggatttcagaagcacaatgtatcaaatcagagagagcatttgatcttattgcttgcaaatgtgcacataagacaatttcccaagcctgatcaacagccaaaggggcggggggaggaaggaatttaacacttgattatttctatcctattggacgagcgtgcacttacagaagtgatgaagaaactttttaagaattacaaaaagtggtgcaagtatttaggtcggaatagtagcctttggttgccaaccatacagcaagaagtgcagcagcgtaaattactctatatgggtctgtatcttctaatatggggtgaagctgccaacctaagattcattccagaatgcctttgctatatctatcaccatatgcctttgagttgtacggtatgcttgctggcaatgttagtccaatgacaggagagaatgtcaagccagcctatggaggtgaagatgaggctttcttaaggaagctgcacggagcaaaaagggtaggtcaaagcattcacaatggaggaactatgatgatttaaatgaatatttctggtcagctgattgttttcagcttggctggccgatgcgtgctgatgctgatttcttttgcctgccagttgagcagctaaattttgacaaatctaacggcacctaaattagtggtggacaaattggtgagactgcagcgaaggtttctttggggagcagggcttgaccaaaataagatcgcatggattaggtgggacacggtgacatcacctaaagaaaatggaggtctggacattaaggatatcaccaatttcaacatagcattgcttggtaaatggaggtggggtctgatgc

SEQ ID NO: 13091 - DNA, 2147 bp, Glycine max
  Clone ID: JC-GMFL02220063C09_FLI
ccttcctcaatgggcaactgttgctctcaaggcaacgttgccgacggcccggctgacgactctgccgccgccaatgacaagggagaagctaaccaacaaggtagtaataaccatgcaaacgacaacaatgataattccacaaaccctaccactgccccaacgacgacatcaaagccaccacccacggtcaccccacccacttcaaaaccctcgaaaccggctgcaatgggcccggtcctcggccggccgatggaggacgtgagagccacgtatacaataggtaaagagctagggagaggccaatttggtgtcacacatttgtgcacaaacaaagccacggggcaacaatttgcatgcaaaacaattgcaaagaggaagcttgtgaacaaggaggacatagaggacgtgagaagagaggttcaaatcatgcaccatctctcgggtcaacctaacattgtggaacttaagggtgcatatgaggacaaacaatcggtgcatttggtcatggaactttgtgcgggtggtgagctttttgatcgtataattgctaagggacattacactgaacgtgccgcggcttcgttgttaagaaccataatgcaaattattcacactttccactccatgggtgtcattcatagagatcttaagcccgaaaatttcctcatgttgaataaggatgaaaattcacccgtcaaggctacggattttggtctatcagtttttttcaaagaaggagagacgttcaaagacattgttggaagtgcatattacattgctcctgaagtcttgaagaggaaatatgggccagaagttgacatatggagtgttggtgtcatgctatacattcttctaagtggtgtccctccgttttgggcagaatccgaacatggtatattcaatgccatcctaagaggccacgttgattttacaagcgatccatggccttcattgtccagtgcagcaaaggatcttgtaaggaaaatgttgaccacagaccccaaacaaagactgacagcacaagaagttttaaatcatccttggatcaaggaggacggcgaagcaccagataagcctcttgacaatgctgtactgaataggctcaaacaatttagagcaatgaaccaattcaagaaagttgctctaagggtcattgctggatgtctatcagaagaagaaatcatggggttgaaggaaatgttcagggggatggacactgacaacagtggaaccattacaattgaagagctcaagcaagggcttgcaaaacaaggaacaaagctaacagagcaagaagttaagcaattaatggaagctgctgatgctgatggcaatggaaccattgattacgacgagttcatcaccgcaacaatgcacatgaacagaatgaacagagaagaacatctttacactgccttccaatactttgataaagataacagcgggtttattaccactgaagaactagaacaagccctccgtgagtataacatgcatgatggcagggacatcaaggaaatccttcaagaagttgatggagataatgatggacgcattaactacgatgagtttgcggcaatgatgagaaaaggaaacccagaagttatgacgaagaagaggcgtgattcattgccattgccattgccataatggagggactctaagggaaggaacttaaaatggtttcatcagtacaatggttttcttaggtggagaagcttatgggtgaatgaaagaatgatcatgggctgcatttcatcatagctttgttggttgcgaggggatacagattaggaacgggagaaaggtggaatcaaaaaccaagaaaagagggaaagggggagggggggtaagaagaacataaacaaatccttgagaaatgttaagatacactaggtggtttggttgattaacatttttttgcttttgctttttccttatatgtgaaaacgttgcaacatgacatgtattgatattgcggctcacataattaggaattaaaaaaagggtatttgtttatgtattatttccttttaaatactaggccttaatagtttgtgctaggtttaccataaaaaaaagtttgtgctaggtttcatatattttactgacttatatatatgatgatcatgctctcttgaaacttg

SEQ ID NO: 13092 - DNA, 646 bp, Glycine max
  Clone ID: JC-GMFL02220063E03_FLI
atttgatgacatcacatactggcattagtagaggttttgagaattctctagtaggaggttggagagagtcaattgcatctaatagataaggtccaccataccagttttttaaacgggcatcagaaggggatgccaccaaattttgattttccatagcaccttttctgttcaaagtgtggaggagatcatgaaaattgtgggagaggcaagggaccctcctccagtatctaggcttgtcaaaggttttggctgggagggcaaagaagatgaaggggaagaagacgtggaggaagaggaggatgaagaagacgagtatgacaagagggtcaaagaggttcatgcaagtggagaatttcaaatcagttaagcagtataataattcttgtgtacttggttaaagtattattattttttatgctagaagtcatctatttatgtgtactataatttataataactactataaaccatcgaggcagtctaacttatggcactttccatgtaatgtattagtattacctgtatcaccatggaagccgtgtatgagaacagtagttatctgattacttcaaaattactcatgcctgttgtaacccgcatagttaaagcttaaaatgctttttaatagtaatatagtagatgaaag

SEQ ID NO: 13093 - DNA, 2713 bp, Glycine max
  Clone ID: JC-GMFL02220065A08_FLI
gaaaatatactgtcgggtaggcctgatgcagaccaagttgagattgaagaagctgccagggttgctaatgctcattccttcatcattaaacttcctgatggctatgaaacacaggtaggagaaagagggctgcaactttctggagggcaaaaacagagaatagcaatagcaagggcaatgctgaaaaaccctgcaattcttctcctagacgaggcaacaagtgcattggactcagagtcagaaaagcttgtgcaagaagcccttgaccggttcatgattggccgaacaactcttgtaattgcccatcgtctctccacaattcgcaaagctgaccttgtagctgtacttcagctaggaagtgtttctgaaattggaactcatgatgagctcttctcgaaaggtgaaaatggagtctatgccaagcttataaagatgcaggagatggctcatgaaactgccgtgaataatgctagaaagagtagtgcaaggccttcaagtgccagaaactccgtaagctcaccaataattgctaggaattcttcttatggacggtcaccatactcgcgtaggctatctgatttctctacatctgattttagtctttcccttgatgcttcacatccaagttacaggcttgaaaagcttgctttcaaagagcaagctagttccttctggagacttgcaaaaatgaactctcctgaatggctttatgctttaattggctctatagggtctgtagtttgtggatcccttagtgccttctttgcttatgttctaagtgctgtcctcagtgtgtattacaatccagaccacagatacatgatccgcgaaatagaaaagtactgctacttgttgattggcctttcatcaactgcacttctcttcaacacattgcaacacttcttctgggacattgttggggaaaatcttaccaaacgtgtgagagagaaaatgctgatggcagtgctcaaaaatgaaatggcatggtttgatcaggaggaaaatgagagtgccaggattgctgcaaggctggctcttgatgccaacaatgtcagatcagccattggagatcgaatttctgtaattgtgcagaacactgcacttatgctagttgcctgtacagcaggatttgtgttgcagtggcgccttgcccttgtcctcgtagctgtctttcctgttgttgttgcagccactgttttgcagaaaatgttcatgaccggtttctctggtgacctggaagctgctcatgccaaggctacacaacttgcaggagaagctatagccaatgtaaggacagttgcagccttcaattcagaaacaaaaattgttggccttttcaccaccaatctccaagctccactacagcgttgtttttggaagggacaaatttctggaagtggatatggtgtagctcagtttgcactttatgcttcctatgcacttggtctttggtatgcttcttggctagtgaagcatggcatctctgacttctctaaaacaatccgagtttttatggtcctaatggtttctgcaaatggtgctgctgaaactttaacactggctcctgactttatcaaaggaggccaggccatgaggtcagttttcgaactccttgaccgcagaactgaaattgagcctgatgatcaagatgctactcttgttcctgatcgtcttcgtggtgaagttgaacttaagcatgtagacttctcgtatccaactcgcccggatatgccagtttttcgtgacctcagtcttcgtgcaagagctggtaaaactcttgcccttgtaggacctagtggctgtggtaagagctcaattattgcacttatacaaagattctatgatccaacatctggtcgggtcatgattgatggcaaggacatcaggaaatacaacctcaagtccttaagaaggcacatttctgtggtacctcaggagccatgcttgtttgctactactatttatgaaaacatcgcttatgggcatgagtcagccactgaagctgagataattgaagctgcaactcttgccaatgcacacaagttcatatctggtttgccagatggatacaaaacatttgttggggagagaggtgttcaactatccgggggacaaaagcagagaatagccgttgctcgggcttttttgaggaaggctgaacttatgcttcttgatgaggccacaagtgcacttgatgctgaatcagagaggtctgttcaggaggctctagaccgcgcctcctcaggaaaaacaactatcatcgttgcacataggctatcaacagtcaggaatgccaatctgattgctgtgattgatgatgggaaagtagccgagcaaggctcccattcacagttgttgaaaaatcacccggatgggatttatgcgcgcatgattcagttacaaaggttcacacacagccaagtcattggaatggcctcaggttcaagctcttcaacaagaccaaaagatgatgaaagagaaggctagccattcaaatgaaattaccagctacaggattataagccatatatatacccattaattattggcatttttgttttgaccatagtatagtttgtgtatcatccctaccccccctttctcttcctattcaagaatgtaatcttgtctttatgaatgttaccaagggaatgacagacgaatacaggaacgagattgaaatggatgaatagatgctcatccttattaattt

SEQ ID NO: 13094 - DNA, 851 bp, Glycine max
  Clone ID: JC-GMFL02220065D07_FLI
ctcgaccagacttcttctggcgatgttttccagatggaaaggatgtttatgataaatggggagatgtcatttgtcatggtgaccaaaaggtcataaaggaaggatacaagagtttcccaagtggtcatacttcagggtcattttctggtctgggttttttatcattgtacttatctggaaaaataaaagcatttgatcgcaaaggtcatgttgcaaaactttgcattgtttttctaccactacttgttgcatcacttgttggcatttctcgagttgatgactactggcaccactggcaagacgtgtttgcgggaggtcttttagggcttacagtggctacattttgctatttgcagttttttcctcctccttatcattctgaaggctggggtccttatgcgtattttaggatgttggaagaatctcgtggtatgacccaagttcctagtgttcaaaattctggtcaagcgcagttagcagaggctcaggctgagagccaagaggaacaaggtctccacgggtgtatggggttaactttatcacgggatcatcatgcagcattgaatgactgtgaatctgggaggggataaagtctgtacatttcatgatcttgctctctgtaaaatgtaaatcagatgttagttcgtagcctaggattttaaccagtatttaaaactaacacattttgttgaatagttgtttctattcagtcactagtgtctctgaaaaccttgaagcgtagttgtttgtaagagtcaggtttgggacaattaacctttgttatttcaatattttgtgaatatgttgacataagaaaatacgaaatctcttgagaagattgccgttcattc

SEQ ID NO: 13095 - DNA, 818 bp, Glycine max
  Clone ID: JC-GMFL02220065G11_FLI
tgcacctgctccgacacctttggacaacacgaccaatgaggattcccagtttccagttgaaaatggcaaaaggcatttgtctgaagaagaaatgaagatcaagacaaggagagagattgcagcccttggggtgcagcttggtaagatgaatattgctgcatgggcaagcaaagatgagcaggaaaagaacaaatcttctccccgggacatgagtgtgcaagaacaggagagaattgaatttgaaaaacgtgcagctctgtgggaggaagctgagaaatctaaacatactgcaagatttaagcgagaggaaatcaaaattcaagcatgggaaagtcagcaaaaggcaaaattagaagcagaaatgagaagaattgaggccaaagttgagcaaatgagagcccagacacatgcaaaaatggtaaaaaagattgctatggcgaggcaaagatcggaagaaaaacgtgcagcagctgaagctagaaaaaatcgagaagcagaaagaactgtggctcaaacagaatacattcgccaaacaggacgattgccctcttccaattacatttgttgtggttggctgtgatatataccttaaacactgcttttagaagaaaatgcaccttactacaagattgctaatctttcttaccgtggatgatatgggtcatcaaaacttggcatatcatcttatacgttacttgaaaccttgtaattttcaaacacctgagtgctacattaaattgattgctgagtgatgtttacaagtcacaaaactgtcttttttttcaaaaaaaaaaggaaagaaatgtttgttgtgatgt

SEQ ID NO: 13096 - DNA, 2542 bp, Glycine max
  Clone ID: JC-GMFL02220068A07_FLI
gaaagaatgagtgattggcaaaagcgtcttgtctctcagctagggaaaaagatggttgaaatgactggagactatactcctgatttgacggctctcttgtcggccaatatcatcatatctactcctgaaaagtgggatggaataagtcgtaattggcatagccgtagctatgtcacaaaggttggacttatgatattggatgagattcacttattgggggctgatcgtggacccattcttgaggttattgtttctaggatgagatacatatcatcccaaacagaacgtgcagtacggtttgtaggtctttctacagctctggctaatgctggtgatctagctgattggttaggcgttgaggaaattggactcttcaatttcaagccaagtgtgaggcctgtacccctggaagttcatattcagggttatcctggaaaatattactgcccaaggatgaatagcatgaataaaccagcatatgctgcaatatgcacacattcacctgcaaaaccagttcttatatttgtctcatcacgacgccagacaagacttactgcacttgacctaattcagtttgctgcatcagatgaacaatccagacaattccttaatttgccagaagaaaccctacagatggttctgtctcaagtctctgacctaaacctaaggcatactttacaatttggcattggattacatcatgcaggcctgaatgacaaagacagatctctggttgaggaactttttgcaaacaacaaaattcagatattggtttgtaccagcaccttggcttggggtgtgaatcttccagctcatctagtgattatcaaggggacagaatactatgatggaaaagcaaagaggtatgttgattttccaatcactgatattttgcaaatgatgggtcgtgctggacggcctcaatttgatcaacatgggaaagctgtgattcttgttcatgaacccaagaagagcttctataaaaagttcttgtatgaacccttcccggttgagagtagtttgagagagcagttgcatgatcacattaatgccgaaattatttctggaaccatttgccataaacaagatgcagtccattatcttacatggacttacttatttcgtagactgatggttaatcctgcttactatggattggaggatgctgaatctgaatttctaaatacatatttgtccagcctagtacagaccacatttgaggatttggaagacagtggatgcataaagatggatgaagacaaggtggagcccatgatgttgggtacaattgcatctcagtattacctcagctacatgactgtatcaatgtttggttcaaacataggtccagatacatcacttgaagtctttttgcatattttatctgctgcttctgaatttgatgaactacctgtgcgtcataatgaggaaaaatacaatgaagcactgtctgagaaagttaaatatccagtggataagaaccgtctagatgaccctcacatcaaagcacttcttctatttcaggctcatttttctcaattggagttaccaattagtgactatgtcacagacttgaaatcagtattagatcagagtatacgcgtaattcaggccatgattgatatttgtgcaaacagtgggtggctttcaagctcaattacttgcatgcatcttctgcaaatggtcatgcagggtttgtggtttgacaaggaatcttccttatggatgctgccatgcatgaatacagatctgataagttcactaagcagaagaggaatttctagtgtacaggaattactagacattccaaaagcagcattgcagactgtaactgcaaatttcccagcttcaagattgtaccaggatcttcagcatttccctcatgttaaaatgaaattaaaagttcagaggaaggacactgatggtgacaggtctcgcatattatctgttagattagagaagaccaattctagacgacactcttctagagcatttgtacctcgatttccaaagataaaagaggaacaatggtggttggttcttggtaatacctctacgtctgagctatatgctttgaaaagagtttctgtttcagatcacttagttacctcaatgaagttgcctctgactccagctaatcttcagggcgtaaaactgattttagtctccgattgttacattggatttgaacaagaacactccattgaagaacttgatgtatgttaagtagtggagacaccattggtcagtgccattgtacatacaacgtaaacgtaagatttcttgaagagggttggggctgcccaggttgtaccaaaaaatgttttttttttaacttgagaaaaagtcaatatgtatatccataggatttgcaatctcttgcatttaattgttttataggtaatcataatgatcttgtttttagattttctttatttattttccaagtcgtgtcgccatttgtaagtataaaggtttacagtgcaaggattgaaagatgtctgaacatttataaattgtgaaggaatggatctccgcaagc

SEQ ID NO: 13097 - DNA, 944 bp, Glycine max
  Clone ID: JC-GMFL02220068B03_FLI
cggcgacaggggacgagggcggcgcagggcaggagggcgccgcgacgaggaggagaagtgggtcccagtgacgaagctggggcgcctggtgaaggaggggaaaattcggagcctggagcagatctacctacactcgctcccaatcaaggagcaccaaatcattgacaccctcgtggggcccaccctgaaggacgaggtgatgaagatcatgcccgtccagaagcagacccgcgccggtcagcgaacccgcttcaaggccttcgtggtggtcggcgacaacaacggccacgtcggtctcggagtgaagtgcagcaaggaagtcgccaccgccatacgcggcgccatcattctcgcaaagctctctgttattcctgtgaggagaggctattggggtaacaagatcggaaagccccacaccgttccctgcaaggttaccggaaagtgtggctccgtcaccgtccgcatggtccccgcccctcgtgggtccggaatcgtcgccgctagggtccccaagaaggtcttgcagttcgctggaatcgatgacgtcttcacttcctccaggggttccaccaaaaccctcggaaatttcgtcaaggctacttttgactgtttgctgaaaacctacggttttctaacacctgaattctggaaggagactcggttctccaaatcaccattccaagagtacactgatctattggcaaagccaacagggaaggcccttatcctcgaggaggaaagggtggaggcttgagttagcagaagcagcagcagttttgatgttatcggatgattgtgcctcgtcttaagcatgctaggacccagtaattatatgttttgctaccttttgttatttcattttctattgaaggacatattatatatctccatgctttttgttttttctcaaatttagttgaatggatattatttactgaactttc

SEQ ID NO: 13098 - DNA, 1054 bp, Glycine max
  Clone ID: JC-GMFL02220068B11_FLI
tggtgctaaaaaggagcctttagttacttgggtgcaccattggctagaccattcttaggtccatttgcagccttttcagatggtctagccaatggtgctaaaaaggagcctttagttacttgggtgcataaaaattttcagggaatactcaccaacgagactaggtgcctgcgatgtgaaactgtgacagctagggatgaaacattttttgatttgagccttgatattgaacaaaatagttcaattacaagttgtttgaaaaacttcagttcgacggagacattgaatgccgaagacaaatttttttgtgacaagtgctgcagtttgcaagaagctcagaagagaatgaagataaagaaaccacctcacatcttggtcatccaccttaagcggtttaaatacattgaacaactgggtcgctacaagaagctgtcttaccgggttgtcttccctcttgagctgaaattgagcgatactgctgaaaattcagatattgagtattctctatttgcagtagttgtccatgttgggagtgggcccaaccatgggcattatgtaagccttgtgaaaagccataaccactggttattttttgacgacgaaaatgttgagatgattgatgagtctgccgttcagacattctttgggtcatcgcaagaatattccagcaatacagaccatggttacattttgttctatgagagcattggctctggtaacaggaactagacggaggagccttatgagttttagatacttaaatcatttggacttgtctttttcatctgtttaattattaattatttttttcccgttttattcaacctgcttgagtagttgttatacatcaatgagaggatacgggttgtgaaaatgtatacttagtggtcggcatgtacagtggatagtggaagcactgtcctttttccccttatttttttttacaattaagagcagtgtatatggtttgagaatttcaccgacagtatattcacgatgttaactgttaagtattaaatcaatagaaacacgatgcaatggcaggatcactcgt

SEQ ID NO: 13099 - DNA, 1596 bp, Glycine max
  Clone ID: JC-GMFL02220069E05_FLI
gcaacaccaacacctccaccacccatttgcaacgactcaccaaaatcgaattttgcaatcaacccatttcaattcacccttccaatcgttcaacgcacccttcaatttcgcttccgagtgattcctccccccaaattcagaattaaggttcggtctctggtggcgcaaccatgccggagatcggccaggcggcggtggctgcggcggcggatgacaccgccctgttcggaaaatacgagctgggccgcatcctcggctgcggcgccttcgccaaagtccactacgcgcgcaacgtgcaaacggggcagagcgtggccgtgaaaatcatcaacaaaaaaaaactcgccggaactggcctcgccggaaacgtgaagcgcgaaatcacgatcatgagcaagctccaccacccccacatcgtgcgcctccacgaggtcctcgccaccaagaccaaaatcttcttcattatggacttcgtacgcggcggcgagctgttcgggaaaatctcaaagggccgattcgccgaggatctcagccgcaaatactttcatcaactgatctccgccgtggggtactgccactcgcgcggcgtattccaccgcgacctcaagccggagaatctcctcctcgacgagaacggcgatttgagggtctcggatttcgggttgagtgcggttcgggatcagatccgacccgatggcttgctccacacgctttgcggaacccctgcttacgtggcaccagagattttaggcaaaaaaggttatgatggtgccaaggttgatgtgtggtcatgcggcgtcgttttgttcgtgctcgccgcaggttacttaccattcaacgacccgaatttgatggtaatgtataggaaaatctacaaaggcgagttccggtgtccgcggtggatgtcgccggagctccggcgattcatatcgaagttgctcgacacgaacccagaaacgaggatcacggtggatggcatgacgcgggacccgtggttcaaaaaagggtataaagaattgaaatttcacgaagaggattaccatgcatccgggtcgggttcgtttttcgggccgaaggatgagagggtggtgaatttgaacgcttttgatttgatatctttttcttcggggttggatttgtccgggatgtttgggggggagtggggggagaggttggtgacgcgggagccgccggagagggttttggaggcggcggaggaggcgggggcggcggcggggatggcggtgaggtggaagaaggagtgtggggtggagttggaaggatttaatgggaggtttgggattggggtggaggtttaccggctcacggcggagctcgcggtggtggaggtaaggaagaggggaggcgacgccgcggtgaggggtgtgtgggaggagaggttgaagccattgttgcttggtggtgcaaccacgtcgtatagtaatagtagtgaggatgaacaacaacatcaagaagaagaacaacaacatcaagaagaaaaacaggaacaagaacctgagtcgaaggttgcctgtgaatgaagtcaaaggaaatttgaattgcttgggttaaatccaaaagaaattcaaaatgtac

SEQ ID NO: 13100 - DNA, 1461 bp, Glycine max
  Clone ID: JC-GMFL02220070B02_FLI
attaaccaataatattttagttaaaacatgtccatggccatcattaacacttttggaaacgttgatgtctatattctattattatcatcatggtttctcgtatctgctgtgtgtgtttggggacgacccgccacttttctgcaagactttgaaatcacgtggtcaaagactcatatcaggcaaattgatcaaggcagatccatccaactcattctagatcaaaactctggttgtggctttgcttccaagagtaagtacatgtttggccgtgttagcatgaagatcaagctcatacccggagactctgctggcactgtcactgcattttatatgaactctgacaccgacactgtacgtgatgagctggattttgagttcttggggaaccgtagtggtcagccttacacagttcagacaaacatctatgctcacggaaaaggagatagagaacaaagggtcaacctctggtttgacccttctgcggattttcacacttatactattatgtggaatcatcatcatattgtattctacgttgatgattttcccattagagtgtacaagaacagtgagggaaagggaatcccatacccaacaatgcaaccaatgggagtgtattcgacattgtgggaagctgataattgggcaacaagaggggggttggagaaaattgattggagtaaagcacctttttatgcatattacaaggactttgacattgaagggtgcccagtgccaggacctgccaactgtgcctctaaccaaagtaattggtgggaaggggctgcataccaagctcttaatgccattgaagcccgaaggtacaggtgggttcggctcaaccatatcatctatgattactgccaagataagtcaaggtttccagtgatcccaccagagtgccttgccggcatttaaaccctaaatttcatgtcacttcaattattcaagtacaggaatacccctatatataatttacattgtccactgttcaaaaacatatcatactatattttatcggaaaaaaaaaaacatcatactatatatactagagtaatctatttgcttctgctgagttaatttcaatttatcccatgtggtacgtctcttcaattatttcaagtctttcatataaacacgtgaaataaaatgtacatcaataaaactaggggtaaattattatgtccccataccataccacatggataaattgaaattaacacttgttttgttttgggggagagggcaaatgattctggtgtatgtggggcgagggctatgttcgaccagaagagaataagtcaaaagctatctctgggtttactgtgcctgtgtatttaagtgcgcattgtttgtggtgtaataaagcttgcgcattattgtgatgattcatgaaggatatttttgggcttgtgatgtagcaaatctcattatttgttcaatgactacatctatttctgt

SEQ ID NO: 13101 - DNA, 902 bp, Glycine max
  Clone ID: JC-GMFL02220070E01_FLI
tatctctctattattctcgttttcaatatgcagatcttcgtcaaaaccctaaccggtaaaacgattacgctagaggtcgagtcctccgacacaatcgataacgtgaaagctaaaatccaagacaaggaaggcattccaccggatcagcagcgtttgatcttcgccggtaaacaactcgaagacggcagaactctcgccgattacaatatccagaaagaatcgacgctccacctcgtcctccgccttcgcggtggcatgcaaatcttcgtcaaaaccctaaccggtaaaacgattacgctagaggtcgagtcctctgacaccatcgataacgtgaaagctaagatccaggacaaggaaggcattccaccagaccagcagcgcttgatcttcgccggaaaacagctcgaagacggcagaaccctcgccgattacaatattcagaaagaatcgacgcttcatctggtgcttcgactccgcggagggatgcagatcttcgtgaagacgctcaccgggaaaactattactctggaggtggagagttctgatacgatcgataacgtgaaggcgaagattcaggataaggaagggattccaccggatcagcagcgtcttatcttcgctgggaagcagctcgaagacggacgcactctcgccgattacaatattcagaaggaatccacgcttcaccttgttcttaggctccgtggtggcgatttctagtttcagttgaatcttgctattgagattttctcttccttgaatgtgtatgatataacaaaatttctatgtctatgttgtccttaggctccgtggtggccttctctagtttggttgaatcttattaatcatgtgcacttcaatttgaatgaattccaataatagtttcttcgttttgtaatagc

SEQ ID NO: 13102 - DNA, 765 bp, Glycine max
  Clone ID: JC-GMFL02220070G05_FLI
ctttctttacaattccttctctcaataattctcctctgtttttcacaaagcaacatggctgcatacagagaacccatgaacatgaacatgagcgacagagccccggtttctccgcagcaaccacactctccgtggcattccccggttccgtacttgttcggagggttagcggcgatgttgggtctcatagccttcgctctattgatccttgcatgttcctactggaagctctcagggtacctcgaagggaacggggaaacagaacgggacctagaagctggcgaaacggagcaggaccagaaacctgcgaaaccatacgaggagaagatcttggtgatcatggccgggcaagagaagccaacattcttagcaactccgagtgtttcgagttgcagcactagcaggtcctcttccttcggcgacaacaccagcacgtgcacctgcgaggagaaccgaaaatcgcttgaaatggcacaggctgggactgggaccaccgaaaccgcacactcctcgtcggattagaacccttgatcgggccaaacatggccacctgttggggggttttgttttgtagccaggttgctttcgtgaaaaagcaaagctcgtgacacccgggtgtctctctaggttgcatgttcaacaattggtggtgatatgggaattctcttttcttttttcttttcttcttcttctctttcagttctcgtctgtacattattccgggaatgtaaattctttgaggtggaattgagcccttgctgtttc

SEQ ID NO: 13103 - DNA, 1509 bp, Glycine max
  Clone ID: JC-GMFL02220071C03_FLI
gatgcatatggatcttggagcaaaaccactgctgctgaacgaagcaaattactgaggaaatggtatgatttgctaatggtacataaagaagaacttgcacagcttataaccttggagcaggggaaacctcttaaagagtctgtgggtgagatagtctatggggctggctttattgagtttgcagctgaggaggcaaaacgtatatatggggatatagttcctgcacctttttctgatcggcgattatttgttctaaagcagcctgtaggggttgtaggtgcaattacaccttggaactttccccttgctatgattactcgaaaggttggtccagcccttgcatgtggctgtacagtggtcataaagccctctgaacttacacctctcactgctttagctgcagtggaactctccattcaagctggaataccaccgggtgtcgtgaacgtggtaatgggaaatgctcctgatattggggacgctttacttgcaagtccacaggtaaggaagatcacattcacaggctcgacagcagttgggaagaaattgatggctggttcagctgaaacagttaaaaaagtatctcttgaactcggtggcaatgcaccttgcatagtttttgatgatgctgacctggatgttgcagtaaaaggaactcttgcagcaaagttccgtaacagtggacaaacatgtgtttgtgcaaatagaattattgtgcaagaaggtatatatgagaagtttgcaaatgctttacgtgatgctgttcagaatatgaaagttggggatggttttagtgaaggtgtgtcacagggtcctctaataaatgaagctgctgtaaaaaaggttgagtccttaattcatgatgctacatcgaagggagcaaaagtaattcttgggggtaaaagacatagccttggacttactttttatgaacccacagtcatcagtgatgtcaacagtgatatgcacatatcaagagaggaagcatttggacctgttgcaccccttttgagattcaaaactgaagaggaagctatcagaattgctaatgacactaacgcaggtttgggttcatatgtatttacaaacagtatccaacgatcatggcgtgttgctgaggctcttgaatatggactagtgggtgttaatgaaggagtaatttcaactgaggtggctccatttggtggttttaaacagtctggccttggaagagaaggctccaaatatgggatggatgaatatttagagatcaagtatgtgtgcttcggaaacatgaacaaagaatgaagtacgagacagtgccaagcaaaatagggaggagtcaccttgcgtttcttagttgaagaatatgcatatagctgcacacgtgttgtatacaaataagtgctggcttgcaaagggcctcctcatttttctgtttggttctttttgctttcctttttcattctctttatttttcacagatttttagaatattaaaaaatgcactgtgaaaggtacgaggttagt

SEQ ID NO: 13104 - DNA, 269 bp, Glycine max
  Clone ID: jC-gmfl02220072c03_FLI
cataaatttccctttaagcacttatgagaaggaacttgaagagatgaagcacatgaccaggcaagaatttgtcgccaatttaagaaggaagagcagcggattttcaagaggggcatctgtgtatagaggtgtgacaagacaccatcaacatggaaggtggcaggcccgaataggaagggttgcaggaaacaagacacaccctttaggagagacccacaacatatcaatcccgcatgattatatgactatgatacaccttcagaggggtg

SEQ ID NO: 13105 - DNA, 751 bp, Glycine max
  Clone ID: JC-GMFL02220072G03_FLI
agatcatcgacacgctggtgggccccaccctgaaggacgaggtgatgaagatcacgccggttcagaagcagacccgggccgggcagagaacccgtttcaaggccttcgtggtcgtcggcgacaacaacggccacgtgggtctaggcgtgaagtgcagcaaggaagtggccaccgcaattcgtggcgcgattattctcgcgaagctttcggttattcccgtgaggaggggttactgggggaacaagattgggaagccccacaccgttccgtgcaaggttaccgggaagtgtgggtccgttaccgttaggatggttcccgcgcctaggggttccgggattgtggcggctagggttcccaagaaggtgctgcagtttgctggtattgatgatgttttcacctcctccaggggatccaccaagacccttggcaacttcgttaaggctacttttgattgcttgatgaaaacctatggattcctgacaccagaattctggaaggagactcgcttctccaaatctccattccaagagtacacagatctattggcaaaaccaacagggaagactctaatcttggaggaggaaagggtggatgcttgatttgctagttttggttttatggatgttttagagacattgttatttacctttgttggttctgtgctttacttttggttttgatagacggtggtatgtctctgtatggattttgattgtttcaagttttaatttaattgactgtagttttgaat

SEQ ID NO: 13106 - DNA, 1270 bp, Glycine max
  Clone ID: JC-GMFL02220073B02_FLI
agaagagcaaagagagtgagaaaagaaggaagaagaagaagaagagatggcaaatgaactacccgtcaaagcttttggttgggctgctttagacacttctggcacccttgccccttttcatttctccagaagggaaaatggcgtcgatgacgtcactctcaagattctcttctgcggggtttgccactctgatctccacactctcaaaaacgactggggtttcaccacctaccctgtcgttcctgggcatgaaattgttggtgttgtgacagaagttggaaacaatgtgaaaaacttcaaagtgggtgataaagttggagttggtgtgatagtggagtcttgcaaggaatgtgaaaattgccaacaggatctggagaattactgtccccgccctgtgtttacctataactctccttattatgatgggacacgaacccaaggtggttattctaacattgtggtcgtgcaccagcgttatgtgctccggtttcctgagaacttgccccttgatgctggtgctcctctgctgtgtgctgggataactgtgtatagcccaatgaaatattatgggatgacagagccaggcaaacatttgggagtggcagggcttggtgggttaggccatgttgcaatcaaacttgctaaggcttttgggctcaaagttactgtcattagtagttctccaaacaagcaagctgaggccattgaccgactcggggctgattttttccttgtttcatcagaccctgcaaaaatgaaggctgctttgggaaccatggactatatcatagacacaatttctgctgttcattccttgattccactgcttggtctgctgaagctgaatgggaagctagttactgtagggttgcctaacaaaccccttgagcttcctatctttcctttagttgcaggacgaaagcttataggggggagcaactttggagggctgaaagaaactcaggaaatgcttgatttctgcggaaagcacaacataactgcagatattgagctgattaagatggatcagatcaacacagccatggaaaggcttagcagagctgatgtgaaatatcgctttgtgattgatgtggcgagctctttctcaagtttttagaatccactgtgattctccaactctttgcatcatgtgtcagtatttttgaagtagttaagattggtggtattaactagtctataagatgttgaactttaaagatgagagcatccgctcttcaattaataatactttgggttttgaatttacatt

SEQ ID NO: 13107 - DNA, 1061 bp, Glycine max
  Clone ID: JC-GMFL02220073B03_FLI
cacaactccactcttagctgccattggtttttcttcttccatttctcttcctttctaagcttttttcgattacccatttggagattctgtcctaatggctcttgctccttccaaagtttcctccttttccgggttttctcccaaacccagtgttggggatgctctgaaaaacccaacttgctctgtttctctgagctttgcgaatgtgaaacttggaagcagaaaccttagggtttgtgcctcaactgtgcctctctcaggggtgattttcgaacccttcgaggaggttaagaagggtgaacttgctgttccaacggctccccaagtctcgcttgctcgtcagaactacgctgatgagtgtgaatctgccattaatgagcagataaatgtggaatacaatgcttcctatgcgtaccactccttgtttgcatactttgacagggacaacgtggctctcaagggatttgccaagttcttcaaggaatctagtgaggaagaaagagagcacgctgaaaagctcatgaaatatcagaatactcgcggtggaagggttgttcttcacgccatcaagaatgtcccctcagaatttgagcatgtggaaaagggggatgcattgtatgcaatggaattagctttgtctttggagaagttagtgaatgagaaacttctgaatgtgcacagtgtggcagatcgcaacaatgaccctcaattggcagacttcattgaaagcgagtttttgtctgaacaggttgaatcaattaagaaaatttcagagtatgtggctcagttgagaagggttggaaagggtcacggtgtttggcactttgatcaaagacttcttgattaggaagatgctgcttaatcttgaattaccttattagtagtcttcgtttacctttggtcttttctgaagttctgggttgttttctattttaaaatagtatttaaatgtttttcctatgtactgggatttaggaactcggagtaatgtaattgctagtagcacatgtaaaaggctgcaagcctattatgcaataacatttgatatatgcttttcaacg

SEQ ID NO: 13108 - DNA, 969 bp, Glycine max
  Clone ID: JC-GMFL02220073F02_FLI
ggccctgatggccaccaagcagtggctgcaagagtgcaggcggatcgtgcagtgtttgccaactgtcggttcgagggctaccaagacactctatacacccaagcccacagacaattctacaggagctgcatcgttacaggaacaatcgatttcatctttggcgacgcagctgtcgtgttccagaactgcatcatggtagttaggaagccattggaaaaccagcagaacatggtgactgctcaagggagagtcgacaagcaacaagtcactggaattgtgctgcagaaatgcacaatcaaggctgatgattcactggttccagagaaggacaagatcaggagctaccttgggaggccgtggaaggagttctcgagaacaattgtgatggaatcggaaataggtgacttcattcaccccgatggatggacagcttgggagggagactttgctctcaagacattgtactatgctgagtatggcaacacaggacctggtgccagcaccaatgctaggatcaagtggcctggttaccaagtcattaacaaggatgaggctagccagttcactgtgggatctttcttgagaggcacatggctccagaacacgggcgtgcctgccacgcaaggcttgtacaattaaacgcctttgcttcaaatttcataccacttgagttcttgcttcagcctttgagctgctgctgctacatgttaattaggcacaccggaaaataaacttgatggtcttgctcattttgatgaattgtatttttctttctttcttttaccgtaaattttttaaaaacatttaatcttgaattgtaatcttgcactaactgcagtggggtggaatatacttgcatagaattgtgtcaccaaatgtttaagtaaatagaagaatcatttcttgctgataaaaacaagttgagtctgtagtgaactctgagatgtcaataaaattttatttgattgc

SEQ ID NO: 13109 - DNA, 1919 bp, Glycine max
  Clone ID: jC-gmfl02220073g06_FLI
caaaaaaagattatgaaattttctctccaatgaaagtcacgatcctctcgtccatattcattctctatctctctcttcacctcctgtgtttttttctctctccttccttctcccttttttcaatctttcaatcaccaattctaatcactcgtagatcctctctgtttctcattctggattaatttgcattggcaaatctctacattatggatgaaatggtggattcagaaatggatcaacagatagaagattatcaacattctgaacccgatatcctttcgagaggaaccactagcatctcgcagcctaataataaccatgcaatggtgggagaatctgagaacacaactaatgctgattctcactttctgccagatgcttatgacaatgctagggtgtatggggttccacaatataatggtattcagcctccacataatcttgatacgggtgtaccagttgcaactaacttatattattctagcattaatcctccttccagtactggtgtttttcatccgccttaaagtcatagagccattgaacaattgccgggttcaaacacatttgaagttgctggaggttcttcaaataattttggaagaagttctagtttcatgaatgatgctagaggtccacacaaaaggaaaattcctaaaggaataagaggaaattcacaagattttaatgcttcgtcgtctagctcttcaactgctccccctaatgcaagacatgccaatgatgttgctataatggataatacacaatttcatatccgttcacttgtggaggtaggaccacacggtagtgaatggagccggccaaatgagtctattatggtgcatgatcataatcatttgatccatggaaattatttagggcaacactttccgccaatagctcctccatggttgttccaacagttgaatagtaacaataatgatggccatgctacaccctggaatcaatctcttccaatgccttgtgtgcaagcacccgctataaacggaagttcattagagagtgtaagtatgggattgcagagatatcatgatccagttggaaatcgaaatggccttaggtttccttatcatgttcctgtcaaccaacaacaccatagttatcatcactcaacactgcccatgcaaggagtaagagatcatagtctcaacttcttccctacagtaactacaaattcatttagggttccaacaaatcctttgcgtaatgttgcaatcccaacacaagctagttttgagatgggtcctagacatgttggccctgcaccatcatctagcctccgaatttaccgacctcatagaggggttgtgcctgagacaactctcagacatcgaagtcttcctcccatgggcttccttcgagttaatgatgttgctttaattgatgaagtgggaaatttggttgacaatcacagagatatgcgcttggacatagaggatatgtcttatgaggatctcattgctttgggtgagagaattggcaatgtaaacactggtttatcggaggaaacaattacaactcaattgaagacaaaaacttatttaacgggtgctactagtattaatatggaggaggaagtttgtgatgatcagggaacattttcttgtataatatgtcaggatgaattcaagaaccaagagaagattggagttcttcaatgtgagcatgaatatcatgcagattgcttaagaacatggttggtggtaaaaaatgtttgccccatatgcaaatctgaagctttgaaatcaacttctgtgtctcctcctacctaatttatttatgaacaaaattcttatgaattttgtacatgtacttgcacatatatagacgtcatactacccaactcatttgttgttagcaccataacttgtatctataaacctgcattatgtttggtg

SEQ ID NO: 13110 - DNA, 1339 bp, Glycine max
  Clone ID: JC-GMFL02220076G04_FLI
ctcttgttgattttgctaacaagcggcttgggaacactgagtgtcaatggcctcaaccttgttccaaagcctcttgttgattttgctaacaagcccatgattcttcatcagatagaggctctcaaggccattggcgtcaatgaagtggtgctagctatcaattaccaaccagaggtcatgttgaatttcttgaaagagtttgagacaaagcttggtatcaaaatcacttgttctcaagaaactgaaccgctaggtactgcaggccccttggctcttgcgagggataagctaataagtgactctggagagccattttttgttctcaacagtgatgttatcagtgagtacccacttaaagaaatgattcaattccacaaaacacacggaggagaggctaccataatggtgacaaaggtcgatgagccatcaaaatatggtgtggttgtgatggaggagactaccgggcaggttgagagatttgtagagaaaccaaagttgtttgttggcaacaaaatcaatgctggaatctacctattgaacccctcagttttggatcgaattgaactgaggcccacttctatcgagaaagaggtgtttccaaagattgcagcagataaaaagctatatgcaatggtcctgccaggattctggatggacattggacaaccaaaggactatatttctggcctgacactttacctggactcgctgaggaaaaagtctccttctaaactggccagtggtcctcactttgtggggaatgtcattgtgcatgaaactgccactattggtgagggatgtctcattggacctgatgttgccattggtcctggctgtgttgttgactcaggtgtcaggctttcacgctgcacagttatgcgaggagttcggattaaaaagcatacttgcatatccaacagtatcattgggtggcattccactgttgggcaatgggcccgtgtggagaatatgactatccttggagaagatgttcatgtttgtgatgaagtttacagcaatggtggcgtagttttgcctcacaaggagatcaagtcaaacattctgaagccagagatagtcatgtgaggctactgtcttaaattcatagcatgtgattaggaagttgtaagtttttgtgtctgaaatgtttgtttgtttctttttttttttttttcccgcatcccaatccgtttttctttgttacatattttacaagttgtgtaatattcagtgttatttatctatctttttaagccaagatttctctgtaattatttgagataaattccgctaagaaccagataatggtggacctctgtcatgaaacgaaaaaacttgg

SEQ ID NO: 13111 - DNA, 1766 bp, Glycine max
  Clone ID: JC-GMFL02220076H02_FLI
ggttttttttgttgttgtgtaatgatactcattgtcaccaccaacacgctttcactttactgaacaacgacttcatcttcactcttccttcaaatttccaacaagaaagtttgttcaactgtccctttattggcgttagctatgctacctactggagcaaaagagacccaattacgtgagaacaacagccagaaggtccatcctcaaccaatggaagaggccatgaatcagaatccagaagcaatggaaaccctaatatctaaagtttttacaaatatctcttccttgaagtcagcttatatccagcttcaagctgctcatactccctacgaccctgataaaatccacactgctgataaacttgttattagtgagctgaaaaatctgtctgaactcaagcatttctacagggagaacaacccgaaaccagtgtgtgtttctccccaagactcacgtttagctgcagaaattcaagaacaacagagccttcttaaaacgtatgaggtcatggtgaagaaattccaatctgaaatccagaataaagattcagagatccatcaattgcagcagcagatcgaagaggctagacagaagcgagcaaaactagagaaaaatctgaagcttagaggtttgtcaaccaaagaatcggaagatgaaattggctttttccctgtcgatctaactccagatctcttcacctctgccgtggaagcagctgcaaaagccattcatgatttttctaaacctttgatcaacatgatgaaagcagctgggtgggaccttgatgctgctgccaactcaatcgaacctgatgttgtttatgcaaagagagctcataagaaatatgcatttgagtcttacatatgccaaagaatgttcagtggctttgagcaggaaaacttctctgtcaaatcagacaatattactgtaactaaagagagcttctttcaccagtttctcgcattaagagagatggatcccttggacatgctggggcaaaatccagattccatttttgggaaattttgcaggagcaaatacttggtggtagttcatccaaagatggaggcatcattcttcggaaatttagaccagcgaaattatgtgatgggtggagggcatccaaggacccctttttaccaggcttttcttaaactgaccaagtcaatttggcttttacacaggttggcttattctttcgagccaaatgtcaaggtatttcaggttaaaggagggagtgagttctctgatgtttatatggaaagtgtggtcaagaatttgataatggatgacaatgatgaaaaacctaaagttggtttgatggttatgcctggattttggattgggggaagtgtgattcagagtaaagtctatctctctggtatgaaggtggctgaatgattcctgaacacactcaagacttcagaaaatgcatagttgattgtatgtggtttgtttgaattgttgtttctttatcttgtaagataatgctgttgtctgtaatttttaatatcctttttagtggttgtaagagtaaatgagccctttaagcttgtttacattcaaggcccctcttgtattgtgaaaatatcctgcacttgaattctagtgtttgtgggagaggggaataggaaggtatataacaaatgttccttaatttaggagtttcaatgctttggggagaagcaatgttctggtgtatgagttttccacagttgagggcactaaactaatcaacaagtgatgcattttcacttaaaagtatt

SEQ ID NO: 13112 - DNA, 1644 bp, Glycine max
  Clone ID: JC-GMFL02220076H05_FLI
caattattcaattttaaagggatatcaagtgtgctaatatactggttgatgtaagtgggcaagtcaagcttgcagattttgggttggcaaaggcaacgaaatttaatgatgttaaatcaagcaaaggttctccatactggatggcccctgaggtttctccctgctcttgtatcatttgcttggagtaattcctgcaaaggaatgaaatcatatggctgtctaatttagttttagtctgtagtacatattccaaatgttgctgtaagaacataaagtataaccatccataaattagtttactgcagtatatgcttccattgatttcttgtgatggagtgcagattcagaatcttgaaactttagtttttccacccacttgtgatttatgagagttgttttagtaaactggcaaatgaatttttatacttgtgagctttttattgtgactggtttaactttgaattgttggtttataggttgttaacttaaagaaccaaggtggttatgggctagcagctgatatatggagcttagggtgtaccgttttggagatgttgacaaggcagcctccttattctgatttggaaggaatgcaagcattatttcgaattggcaggggtgaacctccacctattcctgaatatttatctaaggaagcccgagatttcattcttgaatgcttacaagttaacccaaacgatcgtccaactgcagctcagctatttggtcatccatttctaagaagaacatttctatctcccttaagttttgcttctccacacaggaatatctatcggctataacttgtaagagttctaaatcacctcttagaattggcactgagaacttccaagtttatcctctatttttctgaagtttatccatacacatcttgggtttactggtggaatgcccaggacaagtttaatgggtttgcagatatctgctggagttggaccttatttcaatgacttcatcttgtcctgccatcccaccacgttgatcccatgcggaaggttggttcattgaaaggggagaatgcattatcaagtgtttcacaaagataaactttcacctttatgctaaatgagagagcagtgccttttttggatcccagtgtggatctaagtatgactggattgagggaatggaaaattaggaaggagatggaccttttcatttccaactggttgctctttaaggcagaagcatccaccaggagattgccatggtgaacagttgtcagtcatctggcacaaagttgtcgggccacgttgcttgtactcatttgatcctatcaagagctcatgttcttgcttaaaaaattgtaaatcaggagctcatgctcatgttctgtcgatcctatcagcaggctgctgatacctggtctcagctgtgacccgcccaacaggtaaatactcaggaaaggggcgcgggtgcaagcaatgtgctatcagagcaacaaagcaagtacaagttttggatttttttttattccccttagcacaattaaccaggatataattgtaatactttttttttttctttttcaaggaattaccatttgtatttatttttcattttctgtaaaatgatggcacttgtataatttctttattacatgaaaattgttgatttattgat

SEQ ID NO: 13113 - DNA, 526 bp, Glycine max
  Clone ID: JC-GMFL02220077D02_FLI
ctatacctaaacagtttaatgttcaaatcctcaacagtgggcatcaccagaaacgtgttctctcttcaaaagcttctggtgagccaccattacttctagcagcctccattcactgtgccacaagagcagctgtaaaagaggcaaggaaacagcttctttcatggagcaaccaagatgaagaagattcaacatttcagttgggggtccctgcaaccatgcctgtggtcaaggaactctgtggactggacattgtagaaagatacttgaaatggaaaatggggaaggacataatggtgctcacttaaataatttaaaagagtattttaatacacatctctctgaagaagaaaaattataattttttcacaaatattttttataagacaatttttcatactgtaccaagcaatcttattctatacaaacacttctgccgacgaattttcatactgtattatgttattttcttattttatatggactaagattgtgtattagacccatattaatttgaatataatgccgc

SEQ ID NO: 13114 - DNA, 1144 bp, Glycine max
  Clone ID: JC-GMFL02220077H12_FLI
cagggagccaccaaccatggcttccaagctctgcgactcatgcaaatcagccactgctaccttgtactgccgccccgacgcggccttcctctgcggcgcctgtgactctaaggttcatgccgccaacaagctcgcatcgcgccacccgtgcgtcgtgctctgcgaggtgtgcgagcaggcgcccgcgcatgtgacctgtaaagccgacgccgccgcgctctgccttgcctgcgatcgcgatatccactccgccaaccccctcgccagccgccacgagcgcatccccgtcacgccgttcttcgagtccgtacattcagtcaaggcctcctcgccgatcaacttccaccaccgcttcttctccgacgccgacgctgatgctgacgtcagcaccgaggaggccgaggccgcgtcatggctgctacctaatccaaagacagatctaaattcgtctcagtacttgttctccgaaaccgaaccggttccttacatagatctggattacgcggccatggatccgaagacggagcagaaaagttccgccaccgccgacggcgtcgttccggtgcagagcaacttcgagccgttcacctacggttacaagtacaacactactctctcacagtcacagtctcatatgagccagagtgtatcttctccgtcgtcgatggaagttggagttgtgccggacgggaacacgatgtcggagatatcgaactgcagctacagcaaagtggcaccggtgacggtgacggcgcagttctcggcggcggatagggaggctagagtgttgaggtacagggagaagaggaagaaccgaaagttcgagaagaccattcgttacgcatcgagaaaagcgtatgccgaaacgaggccaagaatcaaaggaaggttcgcgaaacgcactgatgcggaccctctggctggatacggcgtcgttccgtcgtgttgatgattatcatatatatcatatatgaatatgaatgcttacttttttgttttcttatgtttgcttttgctgctgtatatatggactacgccttcttttgtttgaattatgcaatgtaaagttgcaaaaaaactcttgctgtgtatcgattttgtagtttgttgattgtttttggatgaattttgacagctttttgtt

SEQ ID NO: 13115 - DNA, 1713 bp, Glycine max
  Clone ID: JC-GMFL02220080B02_FLI
gtaatagaatctcggtttccattggcacatagaaggaagaaaggtcttggttctagaaatagggattctgggaaagaattttcaattggggtggtgccacgaataagcagcatctgttatcctcagtgtggctattttccatcaagtgggggtttcactgccaaaaggaggaaatgtaatagtctcctaagactgaaggattgttcagaaaacataagacaacatgcttctattttgtttgtgcggctggttactggagtgatgttggtcatggctgtttctttggcttctagtgagccatcctgggccctgtctgaagagaatctcctctttctggaggcatggagaacaattgaccgagcgtacattgataaaagttttaatggacagagttggtttaggtatagagaagatgcactacgcaatgaaccaatgaacaatcgagatgagacatatacagcaataagaaagatgcttgccacattggatgatccattcactagatttttggagcctgaaaagttcagaagtttgaggtctggaactaaaggcgctctaactggagtggggttatcaataggctaccctaccaaagctgacatgcaacctggtggacttgttgtcatttcagcttctccaggaggtcctgcatatagagctggtgtttcgtctggagatgttatcctggctattgatgatacaaacacagaaaacatgggactatatgatgcagctgaacgtctacagggaccggaaggaagctctatagctttgaccattcgtagtggttcggacataaaacacctggatttgacgcgagagaaagtttcattgaatcctgtgaagtcaagattgtgcaagctacctgcttcaggaaatgattccccgacaattggttatatcaaactaacatctttcaaccaaaaggcatctagtgctatcaaagaagcaatcaatacattaaggagtgataatgttaatgcatttgttttggatcttagagataatagtggtggtcttttcccagaaggaattgagattgccaaaatttggttggacaaaggggtgattgtgtatatttgtgatagtcgtggtgttcgagatatacttgatacagatggaagtagtgcactagcaacttcagaacccctggttgtactggtaaacaagggaactgcaagtgcaagcgaaatattagctggtgcattgaaagataataaacgagccgtattgtttggagagccaacatttggaaaagggaagatccaatcagtttttgagctctctgatggctctggattggttgttactgttgctcgctacgagacacctgcacatacagatattgacaaggttggtgtcattcctgaccatcctctaccaatatcatttcccaaggatgaggatgcattttgcaattgcctccaggatcctgcgtcttcttgctacgtcaataggatccagcttttttcaaaatcatgattttttgggggttgttgtacattaattctttgtaaaatattactattcattaacagaacataatgttttctttgttttgggggcttactgattgagcaagggaacattgttgccacaaatatttggatgtatatgaaaaccaaagactagagatttttgttcctgaaaatcatcggaacatgggcaaagaaaaccaaaacaaatggatgtacctgaattagaattgttcgc

SEQ ID NO: 13116 - DNA, 979 bp, Glycine max
  Clone ID: JC-GMFL02220080G04_FLI
caagagcttgatcccctgcgcgagtgtcggcgagaggaacctgctagctgacgtggcgaggattgttgagaaaaacggcaagtcgtttaagcgaaaagacgatttgaggaaggtcgtcgcagaagcactttcctctctcggttacgattcctctatctgcaaatcgaagtgggagaaaacttcctcttgtcctgctggtgagtatgaattcatcgatgcgattgtggaaggggaaaggttgattgtcgatgttgattttagatctgagtttgaagtagcgcgatcgacgggaacgtacaaggcgatgctgcaatcgctgccgttcacctacgtcggaaaatcggagaggctgacggagatcgtggcgattgtttccgaagcggcgaagcagagtctgaagaagaaagggatgcacgttccgccgtggaggaaacgcgattacatgctcgcgaagtggctctctccgtctagtattagggagaaggagaaggagaacaagcaacccccgtcctcctccgtgcaagtcgccgctgccgccgccgcgccggaaacggtgtccgatggtgatgcggcgtcgactacggagagcgattgcggtgagttggagctgattttcggcggggaaatgtcgccggagactgagtacggcgaggctaaagcggagtcggcggtggcgacgaagccggcgtggcaaccgccggcggtgaagccgaagagtgttgagagagggactaaggttgtgaccggattagcctctcttctcaaggacaaaccatagaacaacaaaaagttttgttatttttttttttttaattctggatttaaaaaaattaaaatataaagagaaaatatcagatgaggctatcctcttttttcttttttcttattaagtatttttgttttcccttcttttgtttgtaaggggaaatttgtaagaagtgactcttttttttttttaatttttggttcacaccaatgt

SEQ ID NO: 13117 - DNA, 673 bp, Glycine max
  Clone ID: JC-GMFL02220080H10_FLI
tatggattgcttcagctcttcatgctgctgttaactttggacagtatccatatggaggtttaatcctgaataggccaactattagcaggagattcatgcctgagaaagggtctcctgaatatgatgcgttagctaagaaccctgagaaggagtttttgaagactattactggcaagaaagagaccctcattgaccttacaattatagaaattttatcaaggcacgcatctgatgagttctaccttgggcagagagatggcggtgactactggacttctgatgccgggccattagaggcctttaagaggtttggaaagaatcttgaagagattgaaaagaagcttatagagaagaacaataatgagacattgagaaaccgctatgggccggctaaaatgccttacactttgctctatccttctagtgaggagggattgactttcagaggaattcccaacagtatctctatctaagggctctatggttgctgaagtactgtccctggctttaaataaatgtgaaatagaaggaatctgattccttcatcagttgtgtatgtttaagttatgtatttggagtggctgaatgtacttgtatttgtcattaataaaccatgtttgtgtaatggaaaccaaaataataaatgcaatcatgcaggtttgaactttttaac

SEQ ID NO: 13118 - DNA, 966 bp, Glycine max
  Clone ID: JC-GMFL02220081D04_FLI
cccagatcgtctactaccagacagggtccaggttggcatgactcaacatttcatgaagagttactctgatctcctcatcaggacatgccacaggcgcggtgtgcatgctatgggaggaatggcagcacagattccaatcaaagatgacccagttgcaaatgaggcagcactggaacttgtaaggaaggacaagcttagagaagtgaaggcaggccacgatggaacttgggctgcacatcctggtctcattccatcctgcatggaggttttcaacaacaacatgggcaatgctcccaaccagatagacacagtgaaacgcgatgatgctgcaaacttaactgaacaagacctcttgcagataccaacaggaacccggaccatggaaggtctcagattgaatacaagggtgggcattcagtacttggcagcatggctcagcggaagcggttgcgtgcctctttacaacctcatggaagatgctgccactgctgagattagcagggtgcagaactggcagtggctcaagtatggagtggagctagatggggatgggcttggagagaaagtgaacaaagacctttttcatagagtggttgaagaagagatggctaggattgaaaaggaagtgggaacagagaagttcgagaagggaatgtacaaggaggcttgcaagatcttcactcgccaatgcacgtccctaacacttgatgattttctcactttggatgcctataattacatagtcgtgcatcaccccaaggaaggaaccgtcaaagcttcgaactaattaaggggttcattattgcctaatggttggatcacttggactctgtcttgtgtacttaaagttactgttgtgagaaaatcacaagtgcacggtggttatcgtattcacatgattatgtgtatgactttgtgattatcgttattcaataaaaaggagaaaaatggatttttcgttcctat

SEQ ID NO: 13119 - DNA, 863 bp, Glycine max
  Clone ID: jC-gmfl02220081h06_FLI
ctccagcatacccttttggccggagatgagtaatagtaattgggtgttggattatgattatctagacaacattcctctcaccacccttgaaccacccaatttctcttggtcttcctcctctcctcctcctacactcagtgtggagctagatgactcatttggaattttggatggtctcaaggaaaacaggtcaagaaaacgtttgaggccatctgattctaaagcatgtagagagaaaatgcgaagggatcgacttaatgacaggtttatggaactggggtctatcttggaccctagaaagcctctcaaaatggacaaggctgttatattaagtgatgcagttcgagttgtttctcagttacgagaggaagctcaaaagctgagggagtccactgagaatctacaagagaaaatcaatgcattgaaggatgagaaaaatgagcttcgcgatgagaagcagcgactaaaagtagagaaagaaaaccttgagcagaaggttaaagctttgagttcacaacctagctttctggctgcagcaggacaagttgttggcagcaagctggtgccattcatgggctacccaggagttgccatgtggcagtttttatcacctgctgctgttgatacctcacaggaccatgttctcaggcccccagtagcataacttgccaaaggctctgtgttttggtccaatggagaaagagaatttatctttttattttttgcttttgtgaaatgtgaaaaaagaaatcttattgttgaggcagctttttgataactatttaacttccggttataggctaagtttgaataaacttctttataggttctaatataaaagttctatcatctaaattgtctat

SEQ ID NO: 13120 - DNA, 1129 bp, Glycine max
  Clone ID: JC-GMFL02220083C11_FLI
gaagattgtgatcatggctaatttgctcacaatgttttttgttatggaaatgataatagtgagtggtctcagtttcggagcaagtggcctgaacatgaattactacttgttgagttgtccttttgttgaacctgttgttaagaacactgtcaacagagctctgcaggatgatcccaccctagctgcaggtcttgttagaatgcacttccatgactgtttcatagagggatgtgatggttcagttctgattgactccactaaggacaacacagcagaaaaggattcaccagcaaatttgagcttgagaggctatgaagtcatcgatgacatcaaggaagagcttgaaaatcaatgcccgggagtggtttcatgcgctgatattgttgccatggccgctagagatgcagttttctttgcagggggtcctgtatatgacataccaaaaggtaggaaggatggaacaaggtccaaaattgaggatactatcaatctgcctgccccctttttcaatgcttctgagctcatcaagatgttcgggcaacgtgggttttctgcaagagacatggtggctctctcaggagctcacacattaggagtggcaaggtgttcttcgttcaagcacagactgacccaagtggacccaactttggactcagaatttgcaaagacactctccaagacatgcagtgcgggtgacactgctgagcaaccctttgactccacgaggaacgattttgacaacgaatacttcaacgatttggtctcaaacaacggggttcttacatcggaccaaacgttgtacaacagcccacaaacgaggaacattgtgaatgcttatgcaatgaaccaagccttgtttttcttggatttccaacaagcaatggtgaagatgagcatgctcgacgtcaaagaagggttcaagggggaagtacggaaaaattgccataaaataaattgaactattgtgggtttgtgattgtatggagtgggggaggaaactcttaaaagttgccacttgccattagatgaaagcacatggtgtgtatgtcataatcatagataatatgtctggttaactaactctacataattgttcccatgaaatttatatattattattattattgag

SEQ ID NO: 13121 - DNA, 1613 bp, Glycine max
  Clone ID: JC-GMFL02220084A11_FLI
caatattccagttgggcacttctaaaactgcacaagaagaagaagcttcaaccccaggaataagcacggtttctaaaatgttttgcaattttcacattattcttctaattgctcttgcacttttggtacaaatatcatctcagcttggctccaaggtagaagtgcttcctggctttgaaggccctcttccttttgaactggaaacagggtacgttggattaggagaaaaagatgatgacatgcaagtgttttactactttgttaagtcagaaaatgatcctcagaaagaccctcttatgctttggctaactggtggtcctggctgctcttcattttcaggtcttgcctttcaaataggtccacttcgattcaagattgaggagtatgatgggagtgtgccaaatttgatcttgaggccacagtcctggacaaaggtttgcaacattatttttgtagatttgccttttggaactggcttctcgtatgcaaaaaatctcactgctcaacggagtgactggaaattagttcaccatacccatcaatttcttaggaagtggctgattgatcacccagaatttctttcaaatgaattttatatgggagctgattcttattctggcatacctgcccctgctattgttcaagagatttcaaatggaaatgaaaaaggtctccaaccacggataaatctccagggatatctgctagggaaccccataacaacaagaaatgaaggaaatgatcaaatcccatttgctcatggaatgggacttatttctgatgaactatatgcgtcacttcagagaaattgtaaaggagagtatgaaaatagagattccagaaatgtgttgtgtttaagagatctcaaacactatgatgagtgcctttcaggaatcaatactttctatattttggatcgctattgtaaatctgattcgcctaaaaaacatgaagctcagtggaggagatctctgactcagaagtttgaggcctctcttaattctcatctcagagtgccagacataagatgccaaatttttgggtttttccttgccactcaatgggccaatgacgaaagtgttcgcaagtcactgcatattcgagagggaactataggcaaatgggaacgttgttacactacagattttgaggaacagatcttcagtagctttgagtttcatgtaaatctcagtgcaaaaggatatcgttctttaatatacagtggagatcatgatgcagttgttcctttcatgtcaacccaagcatggattagggctctaaactactccattgtggaagattggaggccatggcttctagaagaccaagttgcaggatacacaaggatttactcgaatcaaatgacatttgcaactgtgaagggttcaggacatacagctccagagtacaagcctgaggaaggttttgccatgttcagtagatggatagctaatatgcctttgtaactcagccgctatgttggcagaaatctaggttatcaatgttatgctcatttgtctatgattttttattttttgaattgtcaatgtttaaagatcctgtattttaaagtgagcaaagcagtagtgtcaaataactgtttgtactatctg

SEQ ID NO: 13122 - DNA, 1462 bp, Glycine max
  Clone ID: JC-GMFL02220084B02_FLI
ctgaaacttcctgatagtttatcatctatgagggtttctaggttaatttatacaaatcagggggttgcgattttggctttggcagcaaatgctgttcacaagctttggaaatggcagagaaatgagcggaacactactgggaaggccactgcaagtattcaaccacaactatggcaaccatctagtggaatactgatgactaatgatataagtgatactaacccagaggatgctgtgtcatgttttgcactgtcaaagaatgactcatatgttatgtctgcttcaggggggaaaatttctctattcaatatgatgacatttaagacaatgacaactttcatgccacctccaccagctgcgacatttcttgcatttcatcctcaagacaataatattattgctattggcatggaggactcttccatacaaatctataatgttagagtggacgaggtcaaaaccaagctaaaaggtcatcagaagagaattactggtcttgccttttctcatgttctaaatgtgcttgtctcatctggagctgactctcagttgtgtgtttggagcacagatggatgggaaaagcaagcaagtaaattcctacaaatgcccagtggacgaccgcctgcacctcttgcagatactcgggtccaatttcatctagaccagacacatttactggctgttcatgaaactcaaatagccttatatgaggcaccaaagttggaatgtataaagcagttttcacctcgggaagccaatccaatcacacatgctacatactcatgtgatagtcagtcaatatatgtaagctttgaagatggaagtattggcattcttactgtccctgcgctcagattaagatgtagaataaatcaatctgcttatctccatcccaacccaagcttgagagtgcatcctcttgtgattgctgcacatccctccgaacccaatcaatttgcattaggactcaccgatggtggagtacatgtacttgaaccactagaggcagaaggaaaatggggtactccacctccgaacgagaatggtgccgggcctagcactgcttcaggtgctgctgtttcagagcaaccccaaagatgatggatggcacattatgtagcacttttctctaaggaactttgagtgtgtgttttgattgcatatgatcccgctccctggtgcctccattcggtttgcaaagggaagctgcggaacgtaggtgtttgtaggttaggacaaatcaaattgaaccaatcacaccttgttattagtggcttcctaaccgtgggattggcacagtatgttattacccacataggattactggcgtaaattcggctggggcgttgcagagtggagggtcattgttattatttttttttctttggtcctacctttatttgtgtagtatttttttaatatatacagaaaactagtcgttatagatttttttttttcagct

SEQ ID NO: 13123 - DNA, 1623 bp, Glycine max
  Clone ID: JC-GMFL02220084C11_FLI
agcttacccatctgaaacaaaaaaatgatgctcctgaaaggcagaggcgtgatgggtgtttgggactttttggccgtaaagttgatactttagatcactatgaaaggagtttgggtgatattgaagataatgtgagaatggaacagtcctcactagaagcgaaggaacttcaagctgccttcgtctcatttaagacacgatttggtgctgcaatagctttacacattcaagaaagtgtcaatcccacggaatggattactgagaaagctcctgagcctcatgatgtttattggcctttctttaccgtttcatttattaaaagatggatcagcaagctggtagtttatgttgcatgtgcttttattacagttttgtttttgataccagttgcaatagtacaaggtcttacccatctggatcaattggaaatgtggttcccgtttttgaaaggcatactaagactgtcaattgtgagccaagttataacaggataccttcccagtttgattcttcagttgtttctgtcatttgttccacctactatgattatgctttcatccttgcaaggatacatttcatggagtcaaatacaaaaagtgcatgcactaaagtattgtggtttaccatttggaacattttctttgcaaatgtcctatcagggtcagctctctatcgagtaaatgtctttcttgagccaaaagagattcccagaatactagcggaagctgtaccatcccaggcatccttcttcatagcttatgttgtgacttctggatggaccgctatagcatcagaactctttcgattgactacacttctttccaattttataagtagaactttttgtagaaataatgatgatgattttgagccccctttaattccttaccatagcgaaattcccaggattcgtctctttggtgttcttggtgtaacatacttcatacttgctccactgatactgccatttctcttgatctacttttgtttgggatacatcattttccgcaatcagctgctgaaagtttacgttccaaagtatgagactggaggagagttttggcctacagtgcacagctccacaattttttcattgatactgatgcatataatagccattggtctttttggtttgaagaagcttcctctagcatccatattgattcttcctcttccaattctcacacttctattcaatgagtattgccagaaacggttcttccctatattcaagaattattctgctgagtgtttgattaagaaggacagagcagaccaaaacgagcataatatgtctgaattttatgacaagttggccaatgcatacaatgatccagctctgatgcgagtgaaatattctgaaaggtctgatagtcacagatctccacttcttcatagttctgaatagttcatagctacatttgtatggccttggctgcaactgtatataaggcaatgtattttcactttgaccgcactgatttggttgtccttgatgaagcatgtctgttgttttcttgtaaattgttagaattgataatgtgtttgtaacgagtgtggaaacttgtaacattagtataagtcattgcaaggccttgtttgtgagcactagcattcattgtg

SEQ ID NO: 13124 - DNA, 2426 bp, Glycine max
  Clone ID: JC-GMFL02220085G10_FLI
tttacaaattaaaaaaggatgttatagaaagattacttgagtgaagaagaactcaatcactctgagttgttgttcataaagaagactgcgtttgtgatattttctcctaccatgtctggctttctttgaactttcactcgcagcttcttattcttgtgatctaagttcctctactctcattccaagcgtgggtgtatatcaaggatccggattccttgtggtcggaggaagcacgcatgcacgcagttagacgattagaactgtcataaagattcaacagttgatgaattattttagtaaattcaacttaaaaaacacatttaaaatactaactgtctgatcaaattagacagtccacattcacgattgtgtgaatgcgtgagtgcaggtggagtgatataaaatggaggagagaccagaaacagaactgatatctataccggcgacaccaagggtgtcaaccccggagatactgacaccggggcagaggtcaccaagagcagcatcaaaggaaggaaaatcatggaccccaacttcttttatatcaccaaggtttctgagtccaatagggacgccaatgaagagagtgcttgtaaacatgaagggttacttggaggaagtgggacaccttaccaaactcaaccctcaagatgcttggcttcccatcaccgagtctcgcaatggaaatgctcactatgctgcatttcacaacctcaatgctggtgttggctttcaggccctcgttttgcccgttgcttttgcttatcttggctggagttggggaattctttccttaaccatagcatattgttggcaactttacacgttatggattctggttcagcttcacgaagcagttccaggtaaaagatacaacagatatgtggagctagcacaagcagcatttggggaaagattaggagtctggcttgctctcttcccaactgtttatttgtcagcaggaactgcaacagctttgattcttataggaggggagaccatgaaactgttcttccaaatagtttgtggtcccacttgtacttcaaatcctttaaccacagtggaatggtacttggttttcacttctctatccattgtcctgtctcagcttccaaacctcaattcaattgcaggactctcactcatcggggcagtgacagccataacttactccaccatggtttgggtactctctgtaagccaacaaaggccaccctccatctcctatgaacccctatctttggcacaaccttctgcttctgtatttcttgccatgaatgcacttggaattatagccttttctttcagaggccacaatttggccctagaaattcagtccacaatgccttcaacttttaagcacccggctcgtgtgccaatgtggaaaggagccaaggttgcttatttcttcattgcaatgtgcctcttccctattgctattggtggcttttgggcgtatggcaaccaaatgcctcctggagggattctcactgctttgtatgcatttcacagtcatgacatctcaagaggaatactagccttagctttccttcttgttgtgttcaactgtttgagcagtttccagatatactcaatgcctgcttttgacagttttgaagctggttacaccagtaggacaaaccgtccctgctccatatgggtgagatcaggttttagagtcttctatggatttgtctccttcttcataggagtggcacttcccttcctctcaagtcttgctggtttgttgggaggactcactcttccagtcacttttgcatacccttgcttcatgtgggttctcattaagcagccaccaaaatatagcttcaattggtacttcaattggattctgggttggctgggggttgcttttagcttggccttttccattggaggtatttggagcattgtcaatgatgggcttaaacttaatttcttcaagcccaattgaatttttaataataggccatgcaaatgcacatgcactatatggtaatgctactctttaggcgtttcccaatggtctaataatatagttagtgcatgtcttcttccgccctaagctatctttggtggaagatttggttgtattgtgagaagtggtggtaaaaggaaagccaataattaatgaagagaatgatccttgtatgtctaagtggagacagagttagaccttgcaagttactaaagtttaaagagtatctctccatgccttcaccgttcctcttgttgtggttctcttttcactgggtgatatagcttgttatgtttagaacatttaatggtttgctcttattcatttttgtagagacctccagaacaaccccccctcccccaacaaaaatcgtcaaactctttcaaattatttgtacgttgtaacccgtgtgatttcaaaagttaatttctcagcgaatcctcctttc

SEQ ID NO: 13125 - DNA, 864 bp, Glycine max
  Clone ID: JC-GMFL02220085H07_FLI
gtgtaagctctttcttctcttcttgtgtatcttgtgcaccgccattgttgacgatggcgagttcatgtcgaagctcgcgaaggcgctaaggccgacatcgtcggggtggactgggagcagcttctgcgactggaagggcgtgaagtgcaacgccaaccgcatcaccacaatcaacatcgcttcgcaatcactcggcggaacgcttcctccggatctgaactcactctccagaacaacgcgctctccggcgcattgccttcacttgccaacctctccatgctcgaaagcgtgttccttagcagcaacaacttcacctccgcccccgatggttgcttccagggactcaccagcttacaaaccctcagcatgaccgataggatcaacctcgctccatggacgattcccgtcgagttgaatgataacaacaaccttgtcaaactcgaacttggaaacgcaaacctcatcggtaccttgcctgatgtattcgacaagttcgtgagtttgcaggagcttcgtctctcttacaacaacctcaccggtggcttacccaaatccttcgctagatctgcgattcaggatatgtggctcaacaatcagaacggcttcgggttttcgggtaccattgaggtgtggtgttaaatgttaatgagtgaacagagatctgtttccttttaaaaaaaaaaattgagatctgttttggaagatgaagattgaaggaagaagaagaagtttggtgaagaactactggattttaaaacaaatagtggccgttttgagtgactataaattatcaaatatgtaatggacacaaagtctaaacaaattattttaaaatttattaaaaatcaaatacaaaattcggat

SEQ ID NO: 13126 - DNA, 1470 bp, Glycine max
  Clone ID: JC-GMFL02220086A06_FLI
cagcacaaagcgggttactgtctgttcaagctaccatctctctctctctttcttagtgcctccttgccagaagttaaaatggcccaagaaactttcctattcacatctgaatcagtgaacgaggggcaccctgacaagctctgtgaccagatctccgatgctgtgctcgatgcatgcttggagcaggaccctgacagcaaggttgcctgtgaaacctgcaccaagaccaacatggtgatggttttcggagagatcacaaccaaggccaacgtggactatgagaagattgtgcgtgacacatgcaggaacattggttttgtctctgatgatgttggtcttgatgctgacaactgcaaggtcctcgtcaacattgagcaacagagtcctgatattgctcaaggtgtgcacggccacctcacaaagaggcctgaggagattggtgctggtgaccaaggtcatatgttcggctatgccactgacgagactcccgagctcatgcccttgagccatgtccttgccacgaagctcggtgccaagctcaccgaggttcggaagaacgggacatgcccttggctgagacctgatggcaagacccaagtcactgttgagtactacaatgacaagggtgccatggttccaatccgcgtccacactgtgctcatctccacacagcatgatgagactgtcacaaatgatgagattgcagctgatcttaaagaacacgtgattaagcctgtgattcctgagaagtaccttgatgagaagaccattttccatttgaacccttctggcaggtttgtcattggagggccgcatggcgatgctggtctcaccggccgcaagatcatcatcgacacctatggaggatggggtgcacatggtggtggtgccttctctgggaaggatcctaccaaggttgataggagtggtgcctacattgtgaggcaagctgcaaagagcattgttgcaaatggacttgctaggagggcaattgtgcaagtttcctatgccattggtgtgcctgagcccttgtctgtgtttgttgacacttatggcactgggaagatccctgacaaggaaatcctcagcattgtgaaggagagttttgacttcaggcctggcatgatctccatcaaccttgatctcaagaggggtggaaatggcaggttcttgaagactgctgcatatggacactttggcagagatgaccctgacttcacatgggaagtggtgaagccactcaagggggagaaggtacctgcttaactaaaaggggttccaacactcttggcaagggacttttgcactactactggcttcttattatctgattgctaaaattttctctatgtttccttccctcttactcaattctgtttttttttttctgtatttttttatgaatttcccccttttttttgtgtacttgtatgtgttctttcagaacatatatattttatatgatgaaac

SEQ ID NO: 13127 - DNA, 1815 bp, Glycine max
  Clone ID: JC-GMFL02220086B04_FLI
gcagaatctacaaagggataattccttccaccggccagcttgtggccgtgaagcaactcgaccgaaatgggatccaaagcagtaaggaatttctggctgaggttgcggagctaagtctcttgcaccatgaaaatctggtcaatctcattggttattgtgctgatggagatcaacgtcttttggtctacgagttatttgcttcgcgtactctagaaaaccgtctttttgagaaaaaagcggatgagagcccattaaattggtttgaaagaatgaaaatagtagcggctgcttctaaaggactagagtacttgcatgagacttcgaagcccccggttatataccgggacttgaaagcgtcgagcatcttggtggacagtgatctgcttgcaaaactatgtgatgttggcatggccaagctttctggtggagacaagatgaacaatggacctccaagacttatgggtacctatggtcactgtgctcccgagtatgtaaaagctggtcaactcaccttgaaatcagatgtatacagtttcggagttgtcttgctagagctcataactggacgaagagccattgacacctcaaagccaaacgaagagcagaatcttgtttcatgggcaacacccttgttcagggaccccaagagatatcctgaaatggcagatccacttcttaataagaacttcccagaaaaagatctgaatcaagttgttgcaatagcatccatgtgcttacaggaggaagcagaagctcgtcctttgatcagtgacgttgtaactgctctaggtttcctttccgcgcctcctcctccacctgctcatgctcctgtccccaaaaagagtgatgttgctgaaagcgaaagggaaagcgatagcgagggcgaaagtgagagcggaagcgacgcaatatctagaaagggaagccgcagatcgtcgttggataaaagtcaacatgattattgtgatagcagccatcttccaccagtggtttcctctaaagcaagccgcaaaagcagcaccagatcaagtaaaggaaaacacagttcagaatcaggagatggggttagcgtttcttccatcagcagcaagagcagtaggaaatctcgcggtgatttaagccagaagagcagcagaaaatcttctgtggaagatttaagccagcagaagagcagcaaaaaatcctccgtggaagacctaagccagcataagagcagcagaaagtcttctagcaccaaagacttaagccagaagagcgcagaaaatcttccgtggaagacctaagccagcataagagcagcagaaagtcttctagcaccaaagacttaagccagaagagcagcagaaaatcttccatcagaaaaccttctagcagagttttgagccacaagagcaacgttgcatctgaggatggaagcatttcctcaagttgtcgtagcagcagtgtgggatcagaggatgaaggggttcggtcagagcgtagcagcatgaggctatcacaaggaagttatcgctcggacccctatggcagcagaaggacagaggatgagagcatgaatattttagaccgtgcaaccagcattgggtctgatgaggatagtggtcacccttttgaccaaacaagcagcagtggaggatcaagtgtttattcgcgataactaaacttatcaacctctgcttaattgtgccacttgtgatgatgatgatgaacatgcatgcatgctcattctttgacatgttgctttgtatttttgccacacaatatgtgggattcttttaaaaactattactttaatatcaagcgtccttaatattt

SEQ ID NO: 13128 - DNA, 1183 bp, Glycine max
  Clone ID: JC-GMFL02220086D01_FLI
agaaaacgttggtgtttcatagtggcagagctcctgatgggaaaaggactaactgggtcatgcatgagtacaggcttgttgaagaggagcttgagagggctgggtctggatcctctcagcctcaggatgcgtatgttttgtgtagagtgtttcacaaaaataacataggacccccaaatgggcaacggtatgcgcccttcattgaagaagagtgggatgacgcatcgggaatggttccaggggcagaccctggggataaccgctcttttgcccaccaaccacatgttgaaggcaaaagtggtgttttatgcgccgaagggagaaatggtgctttgcaggacactcaatctttcaacaaagctccttttgatgtgaacaagcttcctatagaaactcaaaatcttctagctgtgtgcaagagggaaagcatggctgagtatccatcacccgaaaaggatgataataattgtaagcacatggatgactacccttcacctcaaacagataatccaaagcctttctctcaaatatacaaacgaaggcggcataacttgaactccaacaactctcatgtttctggagattcaatccgaaccagccaggatccgtgctcctctacaataactactgctgcaactgcactcccaaccactaatgctgctgctggcacagccaccaacactgcaccgaaaaaacattttctttccgcactggtggagttttcgctgctagagtcccttgaatcaaaggacagccttgcttcaattaagacaccggattttgacgtggaaaatcttgagtcatccatgcctccaagctgcgcaaagttcatcaaggaaatgaagagtgagatgcagaagctttcagttgaaaaggagacgatgaggtttgagatgatgagcacacaagcaatgattaacattctccagtctcgcgtcgacgttctcagcaaagaaaatgaggatttgaagaggatggtggcccaaaatccttaggaatcggcaatgccaatcccttgtatcagtgtaagttagttaaaactgagtaatgaagctcggtcttccggatattttcttatttttctgagtaagaattgtagttcgtttctttggctaaacttgtcaagttatcatttaaaacttgtcatcgtgtatcatatgactttcagtttcccagtgttgtg

SEQ ID NO: 13129 - DNA, 1144 bp, Glycine max
  Clone ID: JC-GMFL02220088E04_FLI
gaaattgagcagtgcagagactcctgaacgtcaacggctatggcagcttcttcctttacaacatcttccattctcttcccattcacaactagttctaaatcccctccttctcaactattcccctcttttccttgcaaacatcataccctccgtctcagacccgtctcagtctcagccgcttcaaccccaaccccctccatccaagccgacaaatccccggtctccgccactccctccaagcttctcccctttcggattggtcacggctttgacctccaccgattggaacccggttatcccctaatcatcggtggaatcaacattccccacgatagaggttgcgaggctcattccgatggtgacgttctgcttcactgcgttgttgatgcgattctaggggcgctaggtcttcctgatattggccagattttccccgattctgatcctaagtggaagggttgtgcctcttccgtcttcatccatgaatctgtgagacttatgcatgaggctggttatgagattgggaatttagatgctacattgatacttcagaggccaaaactaagcccacacaaggatgctatcaaggccaacttatctgcactgcttggggtggactcttctgtagtaaatatcaaagcaaaaactcatgaaaaggtagacagccttggagaaaatagaagtatagcggctcacacagtggttcttctaatgaagaaatgagaagacaatctggaaatattgaggaacatgagagaactttaattggaaaaaaaaaacccataaaagttaataaactatgtttttttagcttctagtgtactgtttattgtttatcatatcttatagttcaccctgacagcaaattattcattggtgtgcctcttgccctgcattttgctaagatcttagtggctgtcttttacgttttatcatttggtattaagagggaccctgtataggtttgaacggcagatgcggccagtcggcgacaaatatatttagttatgtctgtgtataaactatgaagtgagcttgtttttaaaacaagcaagggtccatgaaaaatttgtaagtgcttacgtcatttcaaaacaaatttatggtcaaatgtggtggttaacaactttcatttttgatgttt

SEQ ID NO: 13130 - DNA, 975 bp, Glycine max
  Clone ID: JC-GMFL02220094D02_FLI
tgttgatcgagataactagaaacagtgtgatgaaaatgaaggtccttgttttcttcgttgctacaattttggtagcatggcaatgccatgcgtacgatatgttccctctccgaatgaacactggctatggtgcccgtactccggaggtgaaatgcgcaagttggaggcttgctgtggaagcacacaacatctttggctttgagaccattcctgaagagtgcgttgaagcaacaaaggaatacatccatggcgaacaatatagatcagactccaaaacagttaaccaacaagcttacttttatgccagagacctcgaagtccatcccaaggacacatttgtgttcagtatagatggcaccgtactctctaatattccatactacaaaaaacatggatatggggtggagaaatttaactcgaccttgtatgatgaatgggttaacaagggcaatgcaccggcactgcccgagactcttaagaattacaacaagctggtgtctcttggcttcaagattatattcttgtcaggaagaacactggacaaacaggccgtaacagaagcaaacttaaagaaggctggctaccacacatgggaaaaattaattctcaaggatccacaagatccttccactccaaatgcagtttcatacaaaacagcagcgagagagaaactgataaggcagggatacaacattgttgggatcattggagaccaatggagcgatctcctcggaggccacagaggcgaaagcaggacctttaagcttcctaatcccctgtactacattcagtagttccttcacctctcaacaatctagcttgctcctatctatctatatgtaataagatgcgttcaaataggggcactagcttcactttatgttgtttcagctgtgtgtcaacaagtcatgtaagagacttcactatgttgttttctctttcgtggctttaataaattatgcgcccttgttccat

SEQ ID NO: 13131 - DNA, 1011 bp, Glycine max
  Clone ID: JC-GMFL02220096D10_FLI
ctagaatgcggattgcaataggatccgctaaagggcttgcttatcttcatgaggactgtcatcctcgtatcatccatcgcgatatcaaagctgccaatgtccttattgatgatagcttcgaagcaaaggttgctgattttggattggctaagttgactactgataataatactcatgtatcgactcgtgtcatgggaactttcgggtacctagcccctgaatatgcatcaagtggaaaattgacagagaagtctgacgttttctcatttggggtcatgctattggaactcataactgggaagcgacctgttgatcacacaaatgccatggacgacagcttagtagactgggctcgaccacttctgactcgtggactagaggaggatggcaactttggagagttggttgatgcatttttggagggaaactacgatgctcaagaactgtcaaggatggcagcttgtgctgctggtagcattcgtcattctgccaagaaacgtccaaaaatgagccagattgtaagaatattggaaggagatgtctcactggatgacttgagagatgggattaagccggggcaaaatgttgtttacaactcttcacctagctcaaatcagtatgacacaatgcaatacaatgctgatatgcagaagttcagaaaggcagtgttctctaatagcgacgaatttggcaccagcagtggctccagtggtgaagtgagccagaagcagcaacggctctagattgcggaactaatgagattagcaattctagagttaattgctgataacacacgtgaaaggaaaaagtgggataaaaaacaagggggggttgctgctttttattgtttcattggcatgggaagtgaggtctcaatttgtagagaactgagcttgacgctttcgtttcaaggtgtgtttgatgaagcatacaatcaatatcacttcggggtgtataggcatacatttggaatggagtcttgaacataaatataactcctattattaatgg

SEQ ID NO: 13132 - DNA, 1190 bp, Glycine max
  Clone ID: jC-gmfl02220096f06_FLI
gcaccgtgttcaagcgattagggtttcctcccatcgaacttgataaccctcacgtgcccctccctcgccgccacgtggatcgccgtcctcccctcggagtacaccgcatccacttccaactcctcgccgtcgttgccgtagcgctccaactgaaacttcatcgtgtcgattcggtccattgccgcggcctcgtgaagaaccgattcgtcgattttgcagccggaggcttccagaagcttcaccgcttggaggctcccaaccctaattgcgagcggcatgagggattccgccgtcgcgcagcaaatccgcgacgacgtcggcgctgccgcattccatggcgacgtgggggccgacgagggagacgtgggggccgggtttggagaatagttggcggaggtgttcgacggtggcctttcgggtggggagcatggtggctcggtcggttatggcgtcgggagggtcggagagagggtgttgatcagagggctgagagagttgtagtgtgtaagaaacagaagagagtgggggaattgtggagaagggtttgtggtggttaaagacactgccactgacatggtgtgcatgaggctggtgagcttgaaggaggagctgcacttttggcccttttggaatatcaactcaacttcctttgtttctgctttcactaacctgtccatgatcaacctgattgattctttgattattgattgattgattctgactttgaactttaaagggtgcttgattacttgaaggaggatgattgattgattctttggctgtttgtttgtttagtttatgttttttttttaatttattagtagacttgtgtgattaattaatactatgtgtagcatgcttgttggttggggtgtgactgtgacagggtaggtgggagacattgaccatgactcctccttgaaagaatggagaaggatatgaaacagtcgcttttgaatttgatgaagcattttcagcgagactcgagactcaagaatgctattactactagtcaattgcacaggactcggacaaggtaaagaaggtgtaagagttgccttattccaaaaggatttgtttttgctgactgattttctagttagacctaccattctggttgcaagtttcattcactttttactgaccaattcaatttcaacatataaatgtgaaggttggaaatgcttttc

SEQ ID NO: 13133 - DNA, 1623 bp, Glycine max
  Clone ID: jC-gmfl02220097e06_FLI
gtccattcctagaaaattggtcacacgcacacacaacactttaagaaaatcatatatttcaaagtaatatacagtggatttttgtagtaaggttattttatgttaatgttaggctaacaacatgtgtttgatgggaaattgattagctattgctctgttaggcatctgaagctgtatattttgatttacaaaattttctgttcaacctcagctagctatttggttatgttactcaaaggatttacatattaatcttctgctgacttctgctgagtacaaaattgaaagcaaacaagttttggcttccaaaagtacaagactacgagttgataagaacatattcatctactgccaaaggcctgaagttgaaccatggattgttcagctgcaagaaaaacacaaaaggctgaccgtgaaaagttaaggagggatcgactcaatgaacaattcgtagaactgggtaacattttagaccctgataggcccaaaaatgacaaagcaaccattataggtgatacaattcaattgctaaaggacctaacttctcaagttagtaaactcaaagatgaatatgctacgctaaatgaagaatctcgtgagttgactcaggagaaaaatgatctcagggaagagaaggcatctcttaaatctgatattggcaacttgaataatcagtatcagcagcagctgaggaccatgtttccatggactgcaatggatcattcagttatgatggctccaccatcatatccatatccagtgccaatggcagtacctcctggtccaattcccatgcagccataccccttctttgctaatcaacatcctgcagtcatctccaacccctgttcaacttatgttccttatttagcccccaatacgattgttgaacaacaatccacccaatacgtatcccctccactacatccttgtggtcggtccaatgtgtcaggaaaacaagagtccaagagcaagtcatccagggagagcaaggctgaaaagaatgaggattctaatgatgtcactacagacctcgagttgaagactcctgggtcttctgctgatcaggatttatcatccagacaaagaaaatccagcaagttgtcaaggagggaaagcagttgcacagaaggaagttcattaggtaggtgttcttcttctcgcagtgttcaggacagctcatcgagcagtgtggcggcaagcagaaaggataatgaatgaaaaagtagacaagttagtcaagttctcatgccttgaagccgctgaaatttttcattgtgcatctgctgctactctggaggtgtaagtcattctgttctaatcccaaaataaaagtcacttctgctatctcttcctgaccaagaatttggtccaagtaggtttaaatcttacataatttaagcataaacttccccttttgggggaaaaacttgaaatttcagctggaaaatcaccaaattgaccagtgtggctatcgtgtaggtttgtaaactctttcatagttgttagaatgcatgattcgatacaattcagcaagctaacaatttgtatcatgcaatgaattgtcgatgactttgatctgtacaatacttgcattaattgatgatatcaatgcaatttcat

SEQ ID NO: 13134 - DNA, 480 bp, Glycine max
  Clone ID: JC-GMFL02220097F03_FLI
atgacgttcttctccttggtgatggcccgtggccggaatttgtaaatagtgtagggtgcatcaagatactttcccctcaggaagtgcagcaaatgggcaacaatggccttgagcttcttaactctgtccccattcagaggctctctaacggcgtctgtgacgactacgcaggccgtgaggacccaagaaatttaagcactgggataacaattgtggggtctttaaactactgaatgatgtgacaatcaatactatgaatctcttctctctcttgtattattactcctacttctccactctttgtcaatggtgggatgtactgcctagttgtagtttataggctacttataagccttttgttttttttgtctgttttcctgttttttgctgcctaggaccattcataagataaacaatgtaaaccatatggcatcttgtcaatgtgctatctacaatatattgattacttaatctgttagg

SEQ ID NO: 13135 - DNA, 1750 bp, Glycine max
  Clone ID: JC-GMFL02220097F06_FLI
cttcaccacctccttcttcttcccttcccccactcttcaaccccacacaaacctccctccttccaacgcagtaaaaccttactccgagcctccaccgtcgaatccccaaccccaaaacgccgcggcagaaagaaaaaacccgaaacacaaaccccctcaaacaacacccctcccccccaaaacgcagacaacaaaacagaagaagacgagctccacgactacgacgacggcgtggacttcccctactcggaccctcccttaatatgctgcttcggcttggcgcggaaggagttcgtccctgcggtgcgggtgcaggactacccgatgcacccggacatctactccgagtggaagatgctgcagtggaagccccccgagttcgcacgtgcgccgggcggcccgccgtccaacgtggccgtggcgcacgcgcgcctcggggggcgggcggcgttcctggggaaggtcggggacgacgagtttggagaggagatggtgctgatgatgaacgaggagagggttcagacgagaggggtgaagattgattcgaagtgcaggacggggtgctcctacatgaaggtgaagtttgaggaagaagggaggatgaagatggagacggttagggaggccgcggaggactcgcttcttgcaaatgaactcaaccttgccgttttgaaagaggcaaggattttccatttcaattcagaagttctaacatgcccctcgatggaatcaaccctattcagagcaattaagtggactaagaagtttgacggccttgtattttttgatttaaatctgccattacctctgtggagatcacatgatgaaacaagagaaattattaaaaaagcatggaatgaagcagacataattgaagtttcacgaagtgaactagaattccttctagatgaagaatattatgagaggaagagaaattataggccacagtactttgctgaaaattatgaacaaaccaagaatcgacaagagtattaccattacactgctgaagaagtctcgcctttgtggcatgatcgacttaaattcctgtttgtgactgatggaacacttggaattcactactataccccttctttcgatgggtctgtgatgggaactgaagatgtgctcataacaccatatacttgtgatagaacaggctcgggtgatgctgttgtggctgccattttaagaaaactaaccacttgccctgaaatgtttgaaaatcaagatgttttggagagacagctacgctttgctgttgcagcaggaattatatctcaatggactattggtgcagttagaggtttccctactgaaagtgctactcagaatctcaaagaacaagtttatgtgccttcattgtggtgattaaaattgtatctgtaacttcaatagagcttagcagagccttgaggcattagttggtagttattgtttgattatttatttggaacttctctgcaagtgtttgatataaaatgggggcagatgaacacaatcagattgcaaaaattgtttggttgtttcgtttggctccaactcatgcatgtatgaacaggaggcggatgtcaattgaaaattttgtaggtaaaattcagatgtacactattcttgtaatggggttgcagtttgtatttgtaatactcttcccttcctcattgttcaccttctgctttagttttatgtaccttcattctatacatgcaaaattcgacaattaactatctgtttattttgaagttgagtg

SEQ ID NO: 13136 - DNA, 1547 bp, Glycine max
  Clone ID: JC-GMFL02220097G03_FLI
ggagcttacaagagtgacggcaaaggactgagcaactgggataactacactcacggaccaggtagaagtgtaataatggatggaagcaatggggatatcgcgattgatcattatcatcgctacctggaggatatagatttaatggaaactttgggagtaaacagctaccggctatccctgtcatgggcaagaattctaccaaagggtagattcggagagcccaaccatgctggtatcgagttctataacagactaattgatgttctactactcaaagggatccaaccctttgtaactcttagtcactatgacattccccaagagcttgaagacagatacgggagttggctaagtccccagttacaggaagattttgctttttatgcggacctatgttttaaaacctttggtgacagagttaagtactgggtcacattcaatgagccgaatttcctagtgtcacttggttaccgttctggtttatatcctccatgccgttgctctggccaattagcaatggctaaatgcagtgaaggagactcagaaaaggagccctttgtagcagctcataatgttatcctgtcacatgcagctgcagttgatatctatagaaccaaataccagactgagcaaaaaggaagtattggtatagtccttcaacatgaatggtttgaaccaatgagcaattcaacagctgacaaattggctagcgaaagagcaagagcattcaacttcaattggttcttggacccaatcatattcggaaagtaccctacagagatggagaacgttcttggaagcctcttgcccaaattttccagctacgaaaaagagaaactcaagagaggattggatttcattggcgtcaattactacacggctttctatgtccaagattgcatgtactccgcttgtaaaccaggacccgggatctccagaacagagggttcatacaagaaaagtggagaaaagaatggtgtcccaatcggtgaacctactccatttagttggtttaatatttacccagatggcatggaaaagactgtaacatatgtgagagatagatacaataacactccaattttcctaactgaaaatggatatgccgaagaagttgatccaaatttcacttcggaagaacatctcaatgattttaaaagaataaagtacatggtggatcacatagaggctctgttagcagcaataaggaaaggagcagatgtgaggggatactttgcctggaccttaatcgactcgtttgagtggatatatggatatacggtaagatatggattccatcatgtggattatgcgacgctgaaaagaactccaagattgtcagcaagttggtacaagcaactccttgttcagtacaagaaaacctttttattaggcacgagcatgacagggcatgaaaaactcgtacaacacacttgacgcaaaaaagcttataaccctaatgtagaaccttatcagctacaattctaataatttatgatatattgtgggtacttctgtctttaatcaatactaggagaggagatcct

SEQ ID NO: 13137 - DNA, 1899 bp, Glycine max
  Clone ID: JC-GMFL02220101A08_FLI
tttggccagactcttgtggccaaagccttcagatcgctggttccggaggctttggccagactcttgtggcatgtttctttgtattccgcgatctgaaggagctcatcataaccgcgttcaacgccacggccgaagagatcgcgaaccaaatcaaaaactcgacgctctaccatgaactcgccaccgaccacatgacaaaacaggccacggacatctgcaaggaggtactaggttacgctgtcgacgacattcgccgatccgttcacacgttggaaaagttcgacctaaacaagttgaacgattacgcctatgacctcaaggtctggatcgcgggtactctagctcaccagcagacatgtttggatgggttcgagaacacgagcagcgaggctggaaagaccatggctaaggttctgaacgcgtctttggagctcagcaacaacgcgttggacatagtcaacggtgtttcgagtctcttcaagggtcttaacttgagttccttcagcgtcaacagcaacaggaagcttctctcggaggaaacggctttggtggatgggttccctacgtgggtgagtgaaggacagaggaggcttcttcaggctgtggaccccaaacccgacgtggttgtggctcaggatgggagtggacaggtgaagacaatccacgaggctcttaaattggttcctaagaagaacaagaagccttttgtgatttacatcaaggccggtatctacaatgagtatattatcatgaacaagcacttgacctatgtcaccatgatcggagatggccccaccaagaccagaatcaccggcagcaaaaactacgtcgatggcgtccaaacttacaacaccgcaaccttcggtgtgaacgctgctaacttcatggcgaagaacattgggttcgagaacacagctggagctgagaagcaccaagccgtggccctgagggtaacagcagacaaggcagtgttctacaactgcaacatggacgggttccaggacaccctctacacgcaatcccagcgtcagttctaccgcgactgtaccgtgacgggcaccatcgacttcgtgttcggcgacgccgtggcggtgttccagaactgcaagttcatcgtgaggatgcccctggaaaaccagcaatgcctggtcaccgccggtggaaggtccaagatcgatagccccagcgcactcgtcttccagagctgcgtattcaccggcgaacccaacgtgcttgccttgacccccaagattgcttacttgggaagaccatggaggctttacgccaaggttgtcatcatggactcccaaatcgacgacatctttgttcccgaagggtacatggcgtggatgggaagtgctttcaaggacacaagcacctactacgagttcaacaacaggggtcctggtgctaacactattggtagaatcacctggcctggttttaaggttcttaatcctattgaggctgttgaatactacccaggcaaattctttcagatcgctaattcgactgagcgtgattcttggatcctagggtctggggtgccctattcccttggcccacttattgcgctgccattcccaacagcttaattcatctgatttcatttcatggtctttttttataagtccttaactaatagactatgtagccatatatccctgcatgctcgctccgtcatcatctcagagcctttttgacatgttatatatatgtctggcagtgtttaaggaaaggaaaagtgatgatgcagtggtactcatttgttaattcagttttccttttcttcacgcacttgttagtttccccatgctggctagtaattgcagcagacttattctagctaaattaccgattccttgggaatttgatctcaatttcaattctcaccggttt

SEQ ID NO: 13138 - DNA, 2257 bp, Glycine max
  Clone ID: JC-GMFL02220101B09_FLI
gtggatattagagtagaagaagaagaagaagaatcccaaaaagagaaaccaactcaaacttgttttatccatgggttgatcatcccaaaaaagtttgctttgtttgggtaaatgacccttaaccctgtttgtgaataataatagagttaggaggttccgatgacggtcgatttggacaacgcttccaccgcttcaggtgaagcagccagtgtctcttcctccggcaatcagacaaaacccgccgctccaaagaaaaaacgaaacctcccgggcatgccagatccggaggcagaggtgatcgctctgtcgcccaagactctcttagcgacgaaccgtttcgtgtgcgagatatgcaacaaaggattccagagagaccagaatctgcagctccaccgccggggtcacaacctgccgtggaagctgcggcagaggtctagcaaggaggtcagaaagagagtgtacgtgtgccccgagcccacgtgcgtgcaccacgacccttccagagcgttgggggacttgacggggattaagaagcacttctgcagaaagcacggcgagaagaagtggaaatgcgataagtgctccaagaagtacgcggttcagtccgattggaaggcgcactctaaagtctgcggcacaagagagtataagtgcgactgcggaaccgttttctccaggagggatagcttcatcacgcatagggcgttttgcgatgctttggcggaggagaacgccagatctcacactgttgtaaaagatatttcggagatgattccaaggttttaatcggtgattcgccacccccgcagcctgttgcagccacggtggctgctactactgctgctgctaccaccaccaccactactactattacttctactacgcaggcaaatagtgttatgtcctcttgtttgcagacgcataacctagatttgccagaaaacaatcccccacaagtcattgaggagccacaggctgctactgctactgctataagtgggagctgtggcagcagcagctcctgctcaactagcaatggtggtgctacttgtaatagtaacagtagtagtagtgtgtttgcgagtttgtttgcttcttcaacagcatctgtgaccctacaatctcaaacaccagcattcagtgacttgattagagccatggggcctccggaacaccctgcggatcaaatctcgggtccttcatccgaggcgatctctctttgcctctccaccactagtgcctcaccaatcttcgcaacaggtggccggcagtatgcgtcgtcttcaccgcacccggccatgtcagccactgcattgctgcagaaggcagcacaaatgggtgctgctgccacaaacgcctcccttcttcgcgggcttggcattgtgtcatcgtcacctttggattccacctcgtcgggacagcaaaatgtcctgcaatggggccaccaacagcagttggaacccgagagtggctcggtcgctgcagcagggctaggacttggtcttccatgtgaagatggtggttctggactaaaggaattgatgatgggaacttcctcaatgtttggtcctaaacacaccactcttgattttctaggattggggatggctgccggtggcactgctggtggaggcttatctgcacttatcacatctattgggggtggtttggatgtaactgcagcctttggcaatggagatttttctggcaaagatattggaagtagctcttgatatgatatcttttggtagtaagcaagaactgcacttatcagggcaaaagtatatgatgggggcctttctggattgtgttgccccctttaattgccagggaaagaaactgtgatttactgtgttagaaaacggaaggtggtacaagttacaatacgcttgctctggatgaagggtagttgttgaattaaggttgtttgcaacaaaagggtttgaactttggtatggttgtcgtaggttttggcgacagtgacacgtttgaagatagtatcatcttgtttcggctcctttggtctccacagttttgattaaatttaaattacggcattggatgctttggttcgtagttgttggcataattcaggaaactttgatgaggtagtagttttcttcaattgtcgatttattgtaacaaggtagttttccgcgtatgccccattgttttgtaccagtgaatggttgattgaattcttctagcaagtagtgtttttatgtaaatgtcataaagtattgtagtattcctttgt

SEQ ID NO: 13139 - DNA, 2973 bp, Glycine max
  Clone ID: JC-GMFL02220101C10_FLI
ggaagcaatcacgagcttcattcccaaagaagagtacttggagggctacacaggttctacaactaattcatgcagatatttgttggtgttttcagggtttaaatacgctttaccagcagagtatggtatatggtttgccaacaatgaaaacaccaacaaaactgtgccaggacttcttggtagggaagcaatcacgagcttcattcccaaagaagagtacttggagggctacacaggttctacaactaattcatgcagatatttgtggaccaatcacacctatctccaacagcaaaaagaggtatctgctcacctttattgatgatttcagtagaaaaacttggatttatttcttgacagaaaaatcagaagctcttcctgtctttaagaaatttaaaattcttgttgagaaagaagctgactcattaatcagaagtttgcgcactgatcgtggggggagagtttacatcacatgatttcaccaatttttgctgtgacaatggtattcgtaggcaactgacagctgcatacacaccacaacagaacggaattgcagaacggaaaaatagaaccatcatgaacatggttcggagcatgctctcagagaagaaaatgcccaaaactttttgggctgaagctgccacctggtctgtgcatattttgaatcggagtcccacattagcagtgataaataaaacgccggaagaagcctggagtggagtcaagccttcagttaagtattttagagtttttggatgtatttctcatgttcatgtgcctgatgctaaaagaaccaagctagatgataaaagtttgtgttgtgttttgttgggggttagtgaagtatcaaaagcatacaaactttatgatccgatttcacaaaagatcataataagcagggatgttgtctttgacgaagataaaagttgggattgggataagcagtatgaagaaaccatcttatgtgatttagattggggtgataaggatgtggaagctgttgtagaagaagaacatgaggtacgacacaatactgataccccaaaagaggatattattatttcctctgattctatggccgaagtaaacacttctagtcccgttcaacgaaggtgtagaagaccacccctttggatggaagattatgaaactggagaaggactttctgaaggcagtacagaagctaatctggctatgtctgcaactggtgaaagtgatcctactcactttgatgcagctgttcaaattgcaaaatggaggaaagccatggacgaggagatggaagcaataaacaaaaatggcacatgggaattgatggaattacctgacggagcaaagaaagttggagtaaagtggatttataagacaaaattcaaagagaatggagaagtggacaagtacaaagctaggcttgtagtgaaggggtatgcacaagaatatggggtaggctatacagaagtatttgcactagtggcacgtatggagacaattcgtttggtggtagcacttgcagctcaaaagggatggccaatctatcagctggatgtaaagtcagcatttttacatggagagttggatgaaacagtgtatgtggaccaaccttgtggttatgaacaaaaaggggaagagcataaagtgtataagttgaagaaagccctttacggacttaagcaagcaccacgtgcttggtatagtcacatagaagcatattttctgaaggaaggatttgagaagtgactatgagcatactttgtttgtgaagagagaaaaggaagatatgatattaattgttagcttgtatgttgatgaccttatttttactggaaatgatgagttgatgtttgcaaaatttaaaagctccatgaagcatgaatttgacatgacagatcttggtaatatgagatattttctaggtcttgaagtgatgcaacgaatagatggcattttcttatgtcaaaagaaatatgcattagagatgttgcaaaggtttggaatggataaaagcaattcggtgcaaactccaattgttcctggtgttaaactcacaaaggacgacactggtgtaaaggtggataagacttactataaacaaattgtgggaagtcttatgtatctaacatctactcggcccgatatgatgtttgtggtgaacttaattagcaggtacatggagaatcctactgagctgcatttactagcagccaaaagggtgctgagatatttaaagggaacaactgagtttggaattttctacaaaaagggaggaaacaaagagcttcttgcttacactgacaacgattatgcaggggatttggatgacagaaaaagtacttcgggttatgttttcttattgtgttcagctgctgtttcgtggtcatcaaaaaaacaaccaattgtgagtctatcaactacagaggcagagtttataggtgcagcatcatgtgcttgtcaagccatatggttgaaaagggtgttgggaaaattgtgcaaaatgcaagaccaagctactgtaattcgttgtgatagtagttctgctattaagctttcgaagaatccagtgatgcatggtcgttgtaaacatattgacgtccgattacatttccttcgagatcttacaaaggccggaactatcaagatgatgcattgtgggacacaagaacaagtggctgatattatgaccaaaccactcaagcttgatactttcttaaagctacgcaggtcactaggaatgtgttcagagtctgatataaactaattgcatatagcattcagtttaagggaggatttgttagtgagcttatggttccatatttttaggagcagttatgtttttgaatatgtctagcacattattaggaaatagtgggtcatgtatgcgtgagcagttttatttttcagttttctttattctgatgtaaggctatatattagccaagtttgcttttcaataacagggaatgaattccttccttt

SEQ ID NO: 13140 - DNA, 1185 bp, Glycine max
  Clone ID: jC-gmfl02220101f11_FLI
ctcattcaataaaagaagcctgcatgctattggaagtacacctaacccttacgagaaggccatctctattattggcaagacattggctccctttgatgatgataacttgattccatgttttggatttggtgatgctactacccatgatcaagaagtgtttagctttcacagtgatcattcaccttgccatggctttgaggaagttttggcctgctaccagaaaatagttccaaacttgaaactttcaggaccaacttcttatgccccggtgattgaggctgctatagacattgtggagaaaaatcgtggccaattccatgtgttggttatagttgctgatggccaggttacaagaagtgtcgacacaagtgatggagaactcagtcctcaagaagaaaaaacaattaaagcagtagttgatgcaagcgcatatccgcttgcgatagttctggttggagttggtgacgggccttgggaagacatgagaaaatttgatgacaagataccagcacgtgattacgataattttcagtttgttaatttcacggaaatcatgtccaaaaacataagcccgtcggaaaaagaagcagcttttgctctggctgctctcatggagatccccttccaatataaagcaaccatggaattcggaatactcggacgtgtaacaggaagagcaaagagaatagttccaaaacctcctcctgttccttattctaggcctgcacccagcattaatacagcagcatcctccggagatgaccaaaaccaaacggcctgcccagtttgtttgaccaatgcaagagatttggcctttggatgtgggcacatgacttgcagagagtgtggacacaaattaactaattgtcccatgtgccgagagaggatcactagtcgtctcagggtgtacagcgggtgattgtaatgaaaaccatgcacattaattacatagtttgcataacatgcctttctcaatagggtttatatatggtgaggttaaaagtctaaaaatgatagcttgtctctgtttgggatgtttcaagtgtattgaaaaatggagatgaattgtgcaaggtttctatatatatgcatggttcgtgtcgatgcgtttgaagttgtatattactatatacctgcacataatgtttaatatatttatggtctctaatcaaatttttgctctgc

SEQ ID NO: 13141 - DNA, 2576 bp, Glycine max
  Clone ID: JC-GMFL02220102A01_FLI
ggttgatttgacagcttatgtggagaaacatgagttttgttttgatgctgttcttgacgagaatgttaccaatgatgaagtaaggttgctccttatcaaagattgaatttttatgctgtttcttatttaaattaaattaaccttttttcttcagtagttatgacgccaatatttggcttgtttgttgttgttggtatttatgaaagtgattgcttgcctttgtcttggtcttgactcttgagttgttaatctaaggcatggttgctgctttgcaataacaggtatatcgagttactgtagaaccaattattcctacaatttttgagaaaactaaagctacttgttttgcttatggtcagacaggtaagcaaattattcttccttgttcatatcataattgtaccaaacattatgaataagcactatccaatttactttccaaacctttttctttattcaatataatattctctatgtatgactttttatttgtgtgtgtgtgtgtaactagttgtgaatggttcttgattgtgttagtagctgagcataatggcatggggattcccttttcaatgaatttaataggtggcatcatataaagcttgttcgtaatgttccacagctactcctttatccccatattttcactccatcactttcatttgttattgtgatgctaatagtgttttactttaaggaagtggcaaaacatacacaatgcaaccattgccgctcagagctgcagaagaccttgttagacagttgcatcgaccagtatatcgaaatcagagatttaaattgtggcttagctactttgagatatatggtggaaaactttttgatcttcttagtgacagaaaaaaactctgcatgagagaagatggacggcagcaagtgtgtattgtaggactgcaagaatttgaagtttctgatgtacagattgtcaaagaattcattgaaaaggggaatgcagcaagaagtacagggtcaaccggtgcgaatgaggagtcctccaggtcacatgctatcttacaactggttgtaaagaggcacaatgaggtaaaagagagcaggcggaaaaataatgatgtaaatgaggcaaaaagtgggaaggttgtggggaagatttcttttattgatcttgctggaagcgaaagaggtgctgatactactgacaatgatcgtcagacaaggattgaaggtgctgaaatcaataagagccttttggctttgaaggaatgcattcgtgctttggacaatgatcagatccatattccttttcgtggaagcaagcttacagaagtgctccgtgactcctttgttggaaattcgaaaactgttatgatctcttgtatatccccaaatgctgggtcatgtgaacacacacttaataccttgagatatgcagaccgagttaaaagtctatccaagagtggaaatcctagaaaggaccaggccacaaatccagtaccaccagcaattaaagaggtttcatccacatcttcacttccagctagtgttggtgcagatgattttaatggtcaatgtcaagaggtaaaaacaatggacatgggcaggaaagttgtcgaaaaggaaagttctttgtacagctccgctgctgatgttgacaaacaatcaagtttttcttctagttatccattcaatgggcgagaggaaaaaagctcaacttctgccccaatagacagggaaaggtttgaagtaaagaattcttacggtggtgattctaccagtcaaaagatgaactcttattccatagatgttacaaatgagaaagtgcaaagggtgtctcccccacgcagaaaagggactaaggaggagaaatctgaaagatctgtaaattgggtaaaacgggatgccaatggttctgatcattccactgcaagctccaagcagcagagcacaggaaattatagcattaccactggatcggggcagtctgaaacagaatcctcttctgatgtgaatatcagtgcaatacttgaggtttgtcaaatttttggatttcccttgtcccagtttaaaagttgattgtaatgcttttgagtatctgtttaatttgtacttctgcaggaggaagaagcactaattgctgctcataggaaggaaattgaagacacaatggagattgttcgtgaagaaatgaaactactggcagaagtggaccagccaggaagtcttattgacaactacgtaacccagttgagtttcgtgctttctcgcaaagcagctagtctcgttagtctccaagcacgccttgcaagattccaacatcgactaaaagaacaagagatactaagtagaaaaagagtgccccgttgagaggctccatttctcttgttcagtgatgatgtgtatgttcttgatgtaatatctccgtgtttgttagcaatatagttttaaaggcttttgttcattttattaaaaaaaaaaaaggatcttttgttgggtattcaaattaaatttactcaaatgtatatttgtccctcgtgtgatattgtgtccaccttaatgcccttgcaaattggatttaagtgtaaattattttttattccgcc

SEQ ID NO: 13142 - DNA, 1085 bp, Glycine max
  Clone ID: jC-gmfl02220102b01_FLI
ttcttggacgaggaagaacatggtcctgtcgttgaccatcccatctggtacatccgcaccaccggtctccaacaagcagtcatcaccgccatcaccgtctgcaattacaaaaaagacgaaggcttgatcgaaggtacagaatgttcagtttgcctcagcgagtttcaagaggacgaaagtctcaggcttttaccaaagtgtaaccacgcttttcacttaccttgcattgacacgtggcttagatcgcacaccaattgccccatgtgtcgtgctcctattgtcactgacccaacaagggttccttcttccatggaccctactgcgtttgaaacaagttcttttgtggaggagatttttgaaaatagtgcggagaatactcaaaatagtagtgatgatttgttgaggggtgaggaagaggaaagagtgcaagaagatgaagcgtgtgaagagaacttggcttctgaacttgtggtgactgtgcagcagccgagaagatcggtgtctctggattcttcttctgctgctaagatcagtcttgctcttgctactgttgtgtcaggggaatctcacggggatcattcaaagagggttggtgggaatgggaatttggctactaaaggtggttctagttcttgttcttcgactagttcagtgaaaaggtcgctatcattcaatgccaaacacttgctatcatggtatagccgaagtcagagaaagccaaatgctcctttgagaagcttctgattgaatcaggtttgttcttcgagaaattattaggtagtccaagagatagttacaaatctatagtctcgatcaatctcttcgtaatatatagtcaagtttttttaccaattaataatactcaaatatgtcatatagagattaagtgagtttcatgatgatcttggactacttaataatttctctggttcttgccaattagagtgtgtttcttactctcaacaaggtgagggtttgaagggtttatgtgtgaattaatgaagtaggtcatgtgatgatcaagtgtataaagtataatagtaaagcaaaaaagttatgaatgaatagaaggttgttatccttgc

SEQ ID NO: 13143 - DNA, 1024 bp, Glycine max
  Clone ID: jC-gmfl02220102f12_FLI
ggctcgagtggatctcttcaacccaataatcaaactcaccattttcaacaacaccctcagcctcaggggcagagttttggagcttcggctccggctaacggtggcggttcgggtcagccgaagcagagggttagagccaggagaggacaagccacggacccacacagcatcgccgaaaggttacggagggagagaatcgcagagcgaatgaaggccctacaagaactagttcctaatgccaacaagactgacaaggcctccatgctggatgagatcatcgattatgtgaagttcctacagctccaagtcaaggttttaagcatgagcagattgggcggtgcagcagctgtggcaccccttgttgctgagggtggcggtgactgcatccaagccaaacgcagcaactcaaacgacagcctcgccatgacggagcaacaggtggcgaagctgatggaggaagacatgggttccgccatgcagtacttgcagggcaagggtctatgcctgatgcctatttcgctcgccagcgcaatctccaaagccacgtgtcaccccttcatcaacggtgatgggccctcctctccccgaatgtccgcgctcactctggctaacgccgtcgtcaaagacgcggcctccgtttccaagtcctgattatcacgccgttaccgtcaatgaagaacctgaacatagcaagtcacgtggagtctaggaagcgggtggcttcactgcacgacgtcgtatttaccttgacttttgcagacgctaactttcatgcttcaaccaatccaatcacaaatttcggagtttcccattcctctatctcatttctgttttttttttttgtcttttcctttcttttcttttcgcaacgagttttgttatttctttttctttttttacatttatgttactttttctttagcttatcccgttcgacagtccaacatttgccttatcttttggttaagagaaagaaaacaatctaatgttttatcttatttaattggaaaaatatttaaaaaat

SEQ ID NO: 13144 - DNA, 3152 bp, Glycine max
  Clone ID: jC-gmfl02220103b07_FLI
gaatgctgattctccaaaggcacctggctgccaggatcttggcaatatgggaaatacaaattcgtctggtcagaagcctgctctgcatggcgacatctcagagtctaagaaattgacaagtgacttgagagcaccttctgcaagtgctgttggagttgcacattcaaatgaaaagcttagaactgtgagttattctacgaagaaccaaaacggatttactctcccaaggatcttagatgaaagctcaggcagagaaggcaacaactgtgataacaataaggttaaaagggctagtaagggtgtcaaatctatcagtgttgaagtttctgggaaaggaaatgattttattaaagaagatgagccaattagtttattgcctcaaaagaggataaatgaagcttcttttactaaattaaaatcgagaaagaagacttgtgtcccgtcagcaaatggtaaatctcaaggattaaaagtgacatctcaggttgatgagccacctgaagtcgatgactatttttctataggcaaagatggtataaataactcaaacacttgcttagttttgaaaccttcaggctctacctccaactcactggcatttgatgagcttttttcaagaaatgcaaacccagaatctgttcagtgtgataatgtctgtcagaattcaccaaaaacggctgttcagagcttaagtgaatctaaaattaatggcaagcctgatatcacagattctggaatgcaacaagttgatggggatgaagcagagcaacataatgtcactagaaatctagattgttcttctctgggaaacaaaaagtcatgtaatgtggaatctgctggttgtactaaattggatttaatcactgaagaaagtaataaactggttagaaactcaccccgaaagaagtcggttgccaagagaagtttgggttctaaacctaaattaggtgccactgctaaacagaaaaaatcactttccctgactaaaacttccctgcaaggtgaaggtgtaacttgttccagtggaagcaaagagattgcaacttgtgatgcgaagatgcatcagggatgtcccaaaatctttgatgttaataaaacaacagagcaagaaattgttggtaaaaatgcagaagatgctggtgacagaactgagtttttggacgatgaaaccgaggctccagatgacaaatgtgaatatgagttaggaatggcccttgatgaagacttggttcatctttcaaaaaagccatatacagcaaaagaagagaagtcagaagcaatctgccctgcaacaaaatgtgaagaggcaatgcctcctaagaaaggcacaaataaaactgaaaaacagaaaacatcttcactgccagtaaagcatcaagcaagaaaaggttctgcgggtaaagtcaaggccacagttagtaaatatgctgaagatgatggtgacagaactgagcttgtgaacgatgaaattgaggccccagatgacaaatgtgaatacgagttacgaatggcactcaatgaagaatctcatctttccaaaaagtcagatacagcaacagaagagaagtcggaagtaatttgccctgcaacaaaatgtgaagagacaatgcctcctaagaaaggcacaaaaaaaactgaaaaacagaagccatcttcactggtagtaaagaatcaagcaagaaaatgtcctgctggtaatgccaaggcaacagttgccaaggaattatcgaaatctaatatggcagtatcaggggagaagattcctaatgagactgggcatgagccagagatagaaaccatggaagaaatgtcccttcctgatgataaaagtgacgagtcagctgttcaaagaaataagtcagagaatttttctgaagagaaggagaataagccaattgatggagagcagggcagaagcaatggtaatccaactattaaatctagtgtaaggccagcaaagatcaagtctaagaaatcggggctcaatccatctataacagaatctaacacgagagtaaaaactgaagccgcatgttttatattaagtgggcatcgtctacagagaaaagagtttcaacaagtaatcaagcgtttaaaaggaagggtttgccgggattctcaccagtggtcatatcaggcaacacacttcatagctccagaccccatacgcaggacagagaaattttttgctgctgctgcatcaggaaggtggattcttaaaactgatttcctaactgccagtagccaggcaggaaaattgttggcagaggagccttatgagtggcaccagaatggtctcagtgaggatggcacaatcaatatggaggctccgagaaagtggcggttgttgaaagaaagaacaggtcatggagccttctatggaatgcgtattgttgtgtacggcgattgcattgctccacctttggatactctgaaacgtgtcatcaaagctggagatggaacaatattagcaacttctcctccttatacccgcttccttggtaccggaatcgactatgctgtagttagccctggcatgccacgtgttgacacgtgggtccaagagttcttaaaacatgagataccttgtgttgtagcggactacttggttgagtatgtttgcaagcccgggttctcccttgagagacatgtattatatggcagtcatgcttgggcagagaaatcatttgataaacttaaaagcaaggcagaagagattgttgaagaactcgttgctcctgaagattcccgtgatgatgatataatttgcaaagtatgtggatcccgggatagaggagatgtaatgctgatttgtggtgatgaaagtggttccgtcgggtgtggaatcggtacccatatcgattgctgcgatcctccactaacagctgtccctgaggaggattggttttgcccaaagtgcagtagcacccgaaactgctcaaacaaacccagtaaaaggaaaaagactgtcttatcttcatccaagtgtacgtaatatcatattccctcccccttttgagtcagtcatcgtttcatttagggaacatacctgaattgtgccaacattatccctggtccctagattaaagttgtaataataataataataattttgtacaatccttagtaattaacaaaataatgctgatttc

SEQ ID NO: 13145 - DNA, 1665 bp, Glycine max
  Clone ID: JC-GMFL02220103B11_FLI
ggaaaacggcttccatgtccctgagcatatgttccacaaactcatctcagccatcacttaatctcaccatagcaaaaaatcatcaccaatcctcaagaatctcattagccattgtggcagacttcaatattcccatctctctttggacctctagacctttcaaacctagcaccaaaaccatgaggttaaatgatgatgaaaccctttccaatctccttgttaatttcatagaagagatccttcattatggctccaacaagcacagtattattccctatatcaagttccccaaacttgattctgtttccaacttccaagacattttcaaccttgcttttctcaccctcttgttcctagtttgcatatatgaagccccttctgatcttcgttctggttgccttagcactttgaaagaacaattggcagggtgtcaatcaaggcaagcatcaaaatttctgatgaaactcttgggttccaacttggaagagcagtggatgcgttctgtgaaccttgcaatcacaaattggatagtggagatccaagaagcacatcacactgatcacaccaccttcagaacaccatctcctctattttcttatgcgttctcaacgtttgggttgtggaaagttcaattgtactgccctgtcataaacatggatgttgtgaatgcaaacaaccacccagctgatgagaggcttcaattctctctcaagtatcagcagcttgaaggtgttcttcaattcaattacaaagtcacaatcagagagaggtgggttgaaatcgtggtgaacattgacaacataagatgcgatgttttcaaactggtaaatgacattctgatgagagaacgaggagcaggtgcagcagaaaaacatttcccttcaagaatctcattgcaactcactcccacaattcaacaacaagtattaaccgtatccgttggcaaatcctcagagaatcctcgaatagagtttggcgtggagaaaggcatagaagcctcattcgagccaccaaatccttacataggacttagcgtatcagcaggagagtccacaactgtgagcttaaagccctggaaattcgagcaatcagttcatggctacagtgcaaacttgaactggtttcttcacgatagcaccgatggcaaggaagtgttctccacaaagccttcaaaggttgcgttgtttaacccaaaatcatggttcaaagacaggtactcaagtgcttatcgtcctttcacgaggcaaggaggggttatctttgctggtgatgagtatggagaaagtgtgtgttggaaagtggacaaaggtgctgtggggaagacaatggagtgggagataaggggttggatatggataacgtattggcctaacaagcacaagaccttctaccatgaaaccaggaggttcgagttcagggaaacggtctacctcaaaattgcatagcttaggagtcacgcataggaatatatcaatcaactttgatttggaccatagaaaccaatttattatatcacaaatatgtattttttttcttcgttttattgaacatgtggttaattataattttaaaggaaatgataacggagtgaaattattggtctgttttcatttttcacaaacacccgatcatttccatgggaatttaattttaatgactgattgt

SEQ ID NO: 13146 - DNA, 987 bp, Glycine max
  Clone ID: JC-GMFL02220103G07_FLI
gcacaagagtctccaatcccaactctctctctctctctctccacttgccaaaggaaaaggctaaagagaagaaaaggcaaagcaagggaccaaccaaaacacacacagagaaacatgtcttccccaagcaagcgccgagagatggacttgatgaaactgatgatgagtgattacaaggtggagatgattaatgatggaatgcaagaattttatgtgcaatttcatggacccaatgacagtccttatcatggtggtgtgtggaaagtaagagttgagttaccggatgcttatccttacaaatctccttccattggctttatcaacaagatctatcacccaaatgttgatgagatgtcaggatcagtttgtctggatgttatcaatcaaacctggagtcccatgtttgatcttgttaatgtgtttgaggtgtttctacctcaacttctgctgtatcccaatccatcagaccccttgaatggagaagctgcagctttaatgatgcgtgatcgaccaagttatgaacaaagggttaaagagtactgtgaaaagtatgctaaacctgaagacataggggaagccacagaagagaaatccagcgatgaggagatgagtgaagatgaatatgactctagtgatgaacaggttgttggtaaagcagacccctagctttgcatgcatgtcctgttcttaactttgtattttatctgtacatgatgttcttcttctagttctgttaattcatctcaccacatgtgaacttatcatggataaggggggaaattccccttccttctagtttcccagtcgctgtaaataaagtaccattgattttcctgatgcaatcatatttcatgtttagcactttcaagtgattgtgctgtttagccatggtaatttaatcaacaatgctagcatacagtgtataaataacactctttgtattgggtgattcatgtttgttccattaaatgatgtgaatcttactct

SEQ ID NO: 13147 - DNA, 1118 bp, Glycine max
  Clone ID: JC-GMFL02220104D07_FLI
taataataataaagtggaagaaaaagaattaggagagtgaaacaagaagaagaagaagaagaagaagaagaagaagaattgagaagatggtgtttgaggaaactgagctgaggctgggactgggactatgtctccctggaaatggaaccacggcaacaactgaagctgctgctgcggaattaggagtgaggaagagagggttctctgagactgaaactgatgaaacagccaccgttgatttgatgcttaacctctcacccaaggaagctgctgctgctgatggtgcagatccacgtgagaagccaaagacttcgccgaaggagaagacccttctgcttcccgatcccgccaagcctcctgccaaggcgcaagtggtgggatggccacccgtgaggtctttccggaagaacatgttcgcagcccaaaagagcagcggcggagaggaaagcgaaaagagcagccctaatgcaagctttgtcaaagttagcatggatggagcaccttacctccgcaaagttgacttgaagatgtacaagagttacccagagctctctgatgccttgggcaaaatgtttagctccctcaccattggaaattgtgaatcccaaggcttcaaggatttcatgaatgagagcaagttgatggatcttttgaacagctccgactatgtcccgacctatgaagacagggatggcgactggatgcttgtcggtgatgtgccatgggagatgtttgttgaatcatgcaagcgtttacgtatcatgaaaggaaaggaagctattggactggcaccaagagccgtggagaaatgcaagaacaggagctagactagtagttaccagtccaaaatctgctccatcatcattagcggtgcctagttgacttagtaactgaagcaaggttaagctgcagcagacacagagggagagagcagggtgttaaaaaatatagttaagtaaatctgtgtatcattatggtttgttatataatatatatttcaaacaaagttgtgagatgtcgtaagtataaattatgaacacaaacgataatgactctaaattatgttgcaagactttcttatttctttacttgtgtgcttgcataataataagtttatt

SEQ ID NO: 13148 - DNA, 1427 bp, Glycine max
  Clone ID: JC-GMFL02220106A02_FLI
cacacacgcacagatctgatctatctgaagctgaaaacgccgacgcccgacggtgatgatgaagatggggtcctcaccttcacgttgctccttcttcctattcctcctcctcctagtggcgctcttcccctcgtcgctctccgagatccggttctccgagatccgaaacgacgatcgctccatcgttcccttcgatcagtttggattcacccacaagggtcgccttgagctcagcgtttccaaaatatcactctccaattccaatttggacctctccaaggtgggattcttcctctgcaccctggattcctggcttcatgtcttccagcaactggaggatggcgagattcggtgcgcccttcaatccgatctggtcaagtccgtctacaccttcaattctctcaacggcaaggactctttcagcacgctctacaaagaagaaaccgacgccgatcagtacaacctcgtctttgccaactgccactcgccgcaactcaaagtgaccatggacgttaaatctgccatgtataatctcgacggaaagagcgacgtccgcgactacctctctgccggcagaaccatccttccgagggtttatttcctcttctcgcttgtgtatttcaccctcgcagctctctggatcagcgtcctctacaagaagcgcttgaccgccttccgcatccattacttcatgctagccgtggttatcttgaaagccctgaatctcttgtgcgaggccgaggacaaatcctacatcaagcgcaccggaagcgcccacggttgggatatcatcttttacattttcagcttcctcaagggcatctcgctcttcactctcattgtcttgattggcactggctggtccttcctcaaacccttccttcaggataaggaaaaaaaggttctcatcgttgtcatcccccttcaagtcattgccaacattgctcaggtcgttattgacgagaatgggccctacggccatgactgggctacctggaaacaggtcttcctccttgttgacgtcgtctgttgctgcgctgtgcttttccccattgtctggtccatcaagaacctccgtgaggccgctaggaccgacggcaaggccgctgttaatttgatgaagcttactctcttcaggcactactatgtcgtcgttatctgttacatttacttcaccagggttgtcgtttatgccttggagactattacctcctatcgttattcttggaccagtgtggttgctgctgagttggccacccttgctttctatttctttactggctacaagttcaagccagaggctcacaatccgtattttgtcatcgatgacgaagaggaagaggctgccgcagaggccttgaagcttgaagatgaatttgaattgtaatttctttcaaaatacaaaattagttgttgaacaagttggt

SEQ ID NO: 13149 - DNA, 1700 bp, Glycine max
  Clone ID: JC-GMFL02220106G02_FLI
ctgtgacttgtaggtgatggaatgggaagcattgctgtaccgagtagtgagcgtgccaggacagattggactgcttctatggagcagttttttatagagcttttgctggatcagttgggtaggggaaatcaagtggataatggattcaataaaaatgcgtggacagatatgctagccatctttaatgctaagtttggatgtcaacatggtagaagggttttaaagaatcggttcaagaaacggttgaaacattactgtgatataacaaatcttataaaacaaggctttttgtgggatgaacaacaactaatgcttttggctgatgatgatgtctggaatgcttatgtcaaggcacatctgcacgcaggaacatatagatcaaaaactttgccaaactatcgtgatttagaattaatattcagaaacatggctgaaaatgagatcagtaatttgcaacaggagaaaaatcatgaagatgtcatatcagaaacaaaggctggtgaagcaaaaggaagtcgcaacccaagtggcactgatcgtactagaacatattggacacccccaatggaccgatgcctcattgacttgttattggagcaggtcaaacatggaaatagacttgggcagacattcatttcccaagcttggaatgacatgattacaactttcaatgaatgattcaaatctcaatacgacaaagatgttctgaagaatcgttacaaacatttcaggaaacagttcaatgatgtagaccatcttcttcagcagggtgggttttcatgggatgatacaatagaaatgattgatgcagaggatcatgtttgggatgcttatacaaaggcacaccctgaagctccaccacttagagttaaaacgttgccagactattggaaatggagtgttatatttgcagcagaaagttctgatacaagatacgtccatttagcacataatgaagatcacagtagtgaattaccaatgtatataacaggtgaacagaagaatggcatttgttcaaatgtttacgatgctggttctacaatagagtggacagaatcaatggaatgctattttgttgacattatgattgagcaagttaatagaggaaataggattgaaaatttatacaatgaggaagcttggatgcacatggtccaagcatttaacgctagatggggactccaatctgataagcaggttctaatggatcaatatttctgcttaatgaaaaaacatgatgacatcagcaatattctgagtcacagtgaatttgcatggaatgaaaccctacaaacgataaatgctgaggatgatgtatgggatgcatacatcaaggatcacccagatgccatctcatataaaaacaattgtttgtatcgtttctgtgatttatgcaagattttcggaaacaaattaatggaagtaccagatgtaagagtgagtgatctggagcagcttcacttgatggaagcaaatgattttactatagaaatggatatggatgaagcaaatgaaaatttgcttaatattagcagtgttgacatatcagaccagaatccgggcaggacaagggaaatggatacggatggatcatttgcgaatttgggtgtgactagtagcagtgcaacatcaggaaacttagatgtgactagtagcaatgcaacatcaaaccaaaatacagaaaggccgagggaaaatag

SEQ ID NO: 13150 - DNA, 1354 bp, Glycine max
  Clone ID: JC-GMFL02220106H02_FLI
ctaattctcatttcttcatcgttcgattcttctcctcctaaagatgcagatcttcgtgaaaactttgaccggtaagaccatcacccttgaggtggagtcctccgacaccatcgataacgtgaaagctaagattcaagacaaggaagggatcccacctgaccagcagagacttatctttgcgggtaaacagcttgaggatggtcgaacccttgccgactacaacatccaaaaggaatccactctccacctcgtgcttcgcctcaggggtggcatgcaaatctttgtcaagactttgactggcaagaccatcaccctcgaggtcgaatcctcggacaccattgataatgtcaaggccaagatccaggacaaggagggtatccctccagatcagcagaggttgatatttgctggtaaacaacttgaggatggaagaacccttgctgattacaatattcagaaggagtctaccttacacttggttcttcgtttaagaggtggcatgcagattttcgtcaagactttgacgggaaagaccatcaccttggaggtggagagttcagataccatagacaatgtgaaagccaagattcaagataaggagggtatccccccagaccagcagaggcttatctttgctggtaaacagcttgaagatggacgaacccttgcagattataacatccagaaggaatctaccctgcacttggttttgaggcttcgtggtggcatgcaaatctttgttaagactttgaccggaaaaacaataactttagaagttgaaagttctgataccatcgataacgtgaaggcaaagatacaggacaaagaggggattccaccagaccagcagaggcttatctttgctgggaagcagctggaagatggtcgtactcttgctgattataatatccagaaggagtccactctgcatttggtgttgaggcttcgtggaggtatgcagatatttgtgaagactctgacagggaagaccattaccttggaggtggaaagctctgatactattgacaatgtgaaagctaagattcaggacaaggaaggtatccctccagatcagcagaggctcatttttgctgggaagcaattggaagatggtcgtaccttggcagattacaatattcagaaggaatccactttgcatcttgtccttcgccttcgtggtggttgctaaggggaatcccttttatgaagtgttctcatatgtcttatctgtttgttcagtgtctcccttgaacttgtgctttgcatctctggtttaagtgctgctgtttattatgttttaaaatgatgtattgaactcgtttcagcgaaagtatgttgtttatgtttttatttt

SEQ ID NO: 13151 - DNA, 487 bp, Glycine max
  Clone ID: JC-GMFL02220112E12_FLI
ttcaattggtgccaggacaagaatgtggtgactgtttttagtgcacccaattactgttaccgatgtgggaacatggctgccatactagaaattggagagaatatggatcagaattttctgcagtttgatccagctccccgacaaattgagcccgacaccacacgaaagacaccagattattttttgtaacttcatataaccctttgtttgtaagctactgctttatgctgttactgtagatgtgtctttaaggagagaagagtttcactgtttaagtgggacggttatcatcaacataattctttcttttggagtttgtctgctgttgctgctgctgccgtcttatttggacaagaaacaaatagaaattgacacaattggtgtttgtatatttttgataggaggaagcggcaataacatgatatatcatgtgctgtaattttttcttaaattaaatctcaagttagagagcagatttttgagttct

SEQ ID NO: 13152 - DNA, 797 bp, Glycine max
  Clone ID: JC-GMFL02220112F12_FLI
gtacgtcacctctcatcaagtggtgttgatgtatatactgctattgctggggctgttggagctctatatggacctcttcatggtggagccaatgaggctgtcctcaaaatgttgagtgaaattggaactgttgagaacattccagcattcattgagggtgttaaagccaggaaacggaagctcagtggttttggacatcgtgtgtacaaaaattatgatccaagagcaaaggtcttgaggaaactgacagaggaagtgttttccattgttggccgggatcctcttatagagattgctgttgccttggagaagattgcactgtctgatgagtatttcatcaagaggaagctatatccaaatgttgacttctactctggactgatttatagggccatggggtttcaacctgagtttttcactgttttatttgccatccctcgaatggccgggtacttggcacattggcgagagtccttggatgatcctgatacaaagattatgagacctcaacaggtttatgttggggagtggttgaggcattatgcaccaattaatcaaaggactgcatcaagtaacactgacaaacttggtcaattggctgtatcaaacgcctcaaagaggcgtcttgctggatctggggcttaactagtgaaactgccaagtgctcaataaggtccagactccagagaaaaaattaattttttttctggtacataaaataagtttgtttgtttatgtataaaattatgatatcaaatagataaataaaatcatgaaatcaataagaccatggtttc

SEQ ID NO: 13153 - DNA, 934 bp, Glycine max
  Clone ID: JC-GMFL02220114C02_FLI
cctggagctctgttaatgggtgatgctttcaacatgcgtcatcctttgactggtggaggaatgacagtggcactgtctgatattgttgtgctgcggaatcttctaaagccaatttgtgacctgaatgatgcaacctcattatgcagacatcttgaatccttttacatcttacgcaagcctatggcatccaccataaatactttggcaggtgccctatataaggtcttttcgacttcacccaatgaagctagaaaggaactgcgccaagcatgttttgactacttgagccttggacattttttttcaagtggacccatcgctctactctctggtctaaaccctagcccgctgaatttaattctccatttttttgctgttgcattatatggggttggccgtttgctcttaccatttccttcatttgaacgtacttggattggagctaaaatagttttgtgtgcatttggcataatatttcccatcatcaagggtgaaggagtaaggcaaatgtttttccccacatccataccggcattttatagagctcctcctgataggtggtgcattgaggagtaagggaaccattgttctgcctgcaatgcattttcaattaatttgtcttgaaattaaagcggatttcgatggacgcaaaggacatttgttatgccacttggaagggattattgatgaggggtttctataggttttaggaggtaattggtcaaccccttttactttcattgtaccaaaagaaaaaagtaaatagacattgtcaacctgaaaattgtgtgcttatatatgtagtatattcctgtcttgtttttatttcccttcagcacacatcattgtaccaaaagaggggggatactttggttcagaatggatgtacagaacagaaaattatatgttagcatcattgtatattattactcat

SEQ ID NO: 13154 - DNA, 533 bp, Glycine max
  Clone ID: JC-GMFL02220114C04_FLI
gcagtggaagaaaaaataacgatgtgacgcttttggggctaacagcgctagatcttgtgatgatggctttgttgttctcagccaatggtgcagcctgtgcagtgggagtgatagcacagaagggcaactcgcacgtgcaatggatgaaagtgtgcaacgtctttgacgcctattgtcgccacgtcactgctgcattggtcctctccctcttcggctccaccgtctttctcttgctcgtgctcctttctgttctcaaactccattacagaacaagaagctagatctcaatatgatacacactataatatatatatttgtagtgttaattaattaattaagggtgtgaatcgtatttttggcttagacctagcttgcacttattgttgtgtttgatgaagaacgccaaagcacttaaagatatagatatgccccaagtagtgattaaattgaatgtggttcgtttgtagtaaatatactttagcagatggtaggtcgatttatttaagagagcagtaacagtaaattaatatagc

SEQ ID NO: 13155 - DNA, 1849 bp, Glycine max
  Clone ID: JC-GMFL02220114H09_FLI
atggaaactcagcatgctgcttcgcagcaaaaatgaccaggagattgtatctagagacataggccatgtagaatgagagaaaaaaagactcattgctttatgcatctttacttaattactgtgatcgacttttaattattacttcacgcttttaaatgaatctttgtcctttcttttcaatcattgattggtaatttggtattgccatttatcgcaatgcacacagtgagttgtttggaaaagtggttgttgctagcaaggtgcctcttcctaactactgtccagatttggatgacaaacgtccacaaagagagttggtgattccactaagcttgcaaaggagggttgaggtgagggtttgttgcaggaataccttgatagacttcagctgaattctgcaaagacaactgatagcctggatgatttgaactccactaatcaagttaaagatatagacatggatgaaaatgctgattcttttgtggatgaatctgttatggaaaaggttctccagaagaggagtttgaggatgcgtaacatgcaaagagcttggcaggaatctcctgagggcaggaagatgctggaattccggaagtctctaccatcattcaaggagaagcaaggtttacttgaagctatagcacataatcagggcattcaccggctttgctgatgactaatctttgtcggagaatcttgctggtcacctttggtggggttctctccttccaaccacgtttttccgtctacaagacttgaacagttgaacccaagactttgcttccgggggattgagtccactaccacaaggtgattgttgtatctggagaggctggctgtggtaaaatcactcaacttcctcagtatgtattagaatcagagatagagtctggtcgtggagcattttgtagcattatttgcacacagcctcgaaggatctctgttatggcagtggcagagagagtgtcagcagagcgaggagagcctcttggtgaaacaaggttttttgataggttggcttcgaagttcgactagaaggaatgaaaggaaaaaacacccatctgctattttgtaccagtggtatattacttagaaggttgttgagtgatcgaaacctgactggtataacccatgtttttgttgatgaaattcatgaaagaggcatgaatgaagacttcttactgattgtgttaaaggatctgcttccacgctgtcgtgatttaagattggttttaatgagtgccaccttgaatgctgagcttttttcgaattatttcggaggtgctcctacatttcatattctgggtttcacctatccagttagagcacactttttagaagatattttgaaatgaccggatataaattgacttccttcaaccaaattgatgattacggtcaagagaaattgtggaagacacaaaagcaactagcaccacggaagaggaaaaaccagatcgctgctctcgttgaggatgctctttctaaatcaagctttgagaaatatagctccaaggcacgtgaatcactagcatcttgggcacctgactgcattgggtttaatctcattgaggctgttctatgccatatatgtcggaaggaacgaccgggtgctgtcttagtatttatgactgggtgggagaatataagctctttaagagatcagcttaaagcaatcctcttttaggagatcccaatagggttctgcttctaacatgtcatggttcaatggcaatttcagaacaggctgttatttccatttgttgattccctggactgtcatatcgcatcgccatgtacttctaaatctttattctttctctgtgtgatatgtatttctgattggccc

SEQ ID NO: 13156 - DNA, 2750 bp, Glycine max
  Clone ID: JC-GMFL02220115B11_FLI
agaatctgattttgaagaacaaccaattgattggaccaattccttcaactttgtctcagattcctgatttgaagattctagacctggctcaaaataatcttagcggagaaataccaaggcttatatattggaacgaagttttgcaatatctaggcttgagagggaacaatttggttggttcactatcaccagacatgtgccagttaactgggctgtggtattttgatgtgagaaacaatagcctgacaggaagtattccagagaacataggcaattgtactgccttccaggtcttggatttatcctacaaccaactaactggagagataccattcaatattggattcttgcaagtagcaactttgtccttgcaaggcaataaactctctggacatattccaccggtgatcggtctcatgcaagcacttgctgtcctagacttgagctgcaacttgttaagtggatcgatccctcctatcttgggaaatttgacttacacagaaaaattgtacttgcatggaaacaagctgactggcttcatccccccagagcttggaaatatgtcaaagcttcactatttggaactgaatgataaccatttaagtggacatatcccgcccgagcttggaaagcttacagatctgtttgacttaaatgttgcaaacaacaatcttgaggggccaattcctagtaatcttagctcatgtaaaaatctcaacagcctcaatgtgcatggcaacaagttgaatggatcaattcccccttctttgcagagtttggagagcatgacctctttgaatctttcttccaacaatcttcagggcgcaattccaatagaactgtcgcggattggcaatttggatacattggatatttcaaacaataacttagttggttccatcccttcttcccttggtgacttggaacatcttctgaagttgaatctaagcagaaacaatttaacaggaattattccagcagaatttggaaatcttagaagtgttatggaaattgatctttcaaataatcaactctctggcttgattcctgatgaacttagtcagcttcaaaacatgatatccttgagacttgaaaataacaaattgactggcgatgtggcatcactttcaaattgcattagtctctctctacttaatgtgtcctataacaaactatttggtgttatcccaacgagtaacaactttaccaggtttccccctgacagtttcattggaaaccctggtctttgtggtaattggctgaatttgccgtgtcatggtgctcgcccttcagagcgagttacattatctaaggctgccattcttggaattactcttggtgcccttgtgattcttcttatggtattgctggcagcttgccgaccacatagtccctctccttttcctgatggatcatttgacaaaccagttaatttctcccccccaaagctagtgattcttcatatgaatatggcactacatgtgtatgaagatatcatgaggatgactgaaaacctgagtgagaagtatataattggatatggagcatcaagtacagtttataaatgtgttcttaagaattgcaagccggtggctatcaagaggatctattctcactatccccaatgtattaaagaatttgaaactgaacttgagacggttggcagcatcaagcaccggaatctggtcagtctccaaggttattccttgtccccatatgggcatctcctgttttatgactacatggaaaatggcagtctatgggatcttcttcatggacctaccaagaagaaaaagcttgactgggagctgcgtctaaaaatagcacttggagcagcacaagggcttgcttatctacaccatgattgctgtcctagaatcatccacagagatgtgaaatcatctaacattctattggatgcagactttgagcctcatctcactgattttggtattgccaaaagtctctgcccctcaaagtcccatacttctacttacataatgggcacaattggctatatagaccctgagtatgctagaacttcacgtctcactgagaagtctgatgtgtacagttacggtattgttttacttgagttgctaactggaaggaaagctgttgacaatgaatccaacctccaccatctgattttgtccaaggcagcaaccaatgcagtgatggaaacagttgatccagacattactgccacatgcaaggacctaggagctgtaaaaaaggtttatcagcttgctctattatgcacaaagaggcagccagctgataggccgacaatgcacgaagtgacacgtgtactcggaagccttgtgctgtcaaacaccccaccaaagcaactagctgcactaccacctgcttcaaatccatctgccaaagtgccatgctacgtggatgagtatgcaaacctcaagactccacacttggtgaactgcccctcaatgagcacctcagatgctcaactcttcctcaagtttggagaagtaatctctcaaaacagtgagtgaaagagtgagcggggattttgaaatgaaaatcaagtccaagaatcatgtatattatttaaaaaccaaaaaagagaagcgaaaaaatggatgaggggtaatagttaatgaaaatgtttataaaaagttttagtactagtttttttttttagtgttggttgatttgaacaaaaagaaagatattatgtatcatcatcatcacaatttgaaaggtgaagtaaatccaattcttgt

SEQ ID NO: 13157 - DNA, 1483 bp, Glycine max
  Clone ID: JC-GMFL02220125E04_FLI
gttagaatacacagaattatgagctgtgaactcttattattcatttaatgttcatatgatcatctgggtctttcttgattatggagtctactaccttctgtcgataatgggaacgaatctcagcactcccaaaactgagaagtcttctgatgatggtgaaaatgagcatcttagatatggtttatcatctatgcaaggctggcgtgcaacaatggaagatgcatatgctgcacatcttgatctggatgcatccacttccttttttggtgtttatgatggtcatggaggtaaagtggttgcaaagttttgtgccaagtatcttcaccagcaggtgctcaagaatgaagcatacatagctggagatataggaacctctcttaaggaatcatttttcagaatggacgacatgatgcgtggtcaaaggggatggagggaattagcagttttgggtgataagatagacaagtttaatggtaagatagaagggttgatttggtctccacgaagcagacatagtaaggagcaagatgatacttgggcctttgaggagggccctcattctaattttgctggaccaacttcaggaagcactgcatgtgttgcaattattagaaacaacaaactttttgtagcaaatgccggtgattcacgttgtgtagtatgtaggaagggtcaggcgtatgatttgtcgatagatcataaacctgatcttgagattgagaaggaaagaatcgtaaaagctggtggttttattcatgcgggacgagttaatgggagtttaagccttgcaagagctataggtgacatggaatttaagcagaatagattcctttctgctgaaaagcaaatggtgacagccaatccagacataaatactgttgaactttgtgatgaagatgaatttatagtgctggcttgtgatggcatatgggattgcttgtcaagccaacaattggtagattttgtacgtcaacaactgctcttggaaactaaactttctgccgtttgcgaaagagtactagatcaatgtttggcaccaacaattactgttggtgatggatgtgataacatgaccatgattttggtgcagttcaaaaaactggcccaatcaagtgcaccggcataacataagagctatcatcttcaaatgaaataagctacatctgaactaagactagagagcagtgaaagttagtaaattttgagcagcaacactacacacatgtagacacatgagtctagatgatcattttcacttcaactagcatttgtttccaaatttctgtgtttattttcacacctagaatctgttttgcttgttcaataagaggctccaaatgttagtttttatagctattagcaacaatctgcaggcattttgtgatgtttagctacttgctatcaactgcaaggatattggccccaacttattagaacattgtgtatatatatagtatatctcatcaaataaccttgttatgtg

SEQ ID NO: 13158 - DNA, 2094 bp, Glycine max
  Clone ID: JC-GMFL02220127B04_FLI
cgccattctcatttctctttccagaagataaaaaacccttttatatttttatatttttatcactagaaaaatcaaacaaataaaattttcattttcattttcttttcttttctcgctcttgttttttcggggaaattgatttcaccgtaataggagccaagaaaaacaaaacagaaaaattccgaacccgtgaactcttttacctgctacaaatgcatttctctctcttttctcacactttttctctgctaaactcgcaaacacgaacactgtttctctctctctgaagtgaagtaatgaagcttcatcttcagatctcgagctgaatcaccgatctctgtgtgtgagagaggagttggattattgattcatggaaacgcggagatgaagttctacatatcaacgaaggggataaagagagtgacgatatcgaacggcgagggaaagggatcggcgaagacgacggcggtggcggccggcgccggtcgccggatatcggctcggacggtgtttccggtgatggtggtgctcgggatcgtgctgccgtttctgttcgtgaggatcgcgatcttgatgctggaatctgctgcggcgtgttcctcattggaatgtgctgggtggaggtttttcagtggagtcgacacgtcactggaactcagagatgagctgaccagagcgctaatagaggcaaatgatggtaatgttaatgagggagcagggtcgttcaatgaacttgtgaaagagatgacctcaaaacaagaccttaaggcttttgctttcaagaccaaagccatgctatcacagttggaacgcaaggtgcaattagcaagacaacaggagtcggtttattggcatctagcttctcatggtattcctaaaagtctacattgtctatgtctaaagttggctgaagaatattctgtaaatgctatggccagatctcgtctaccccctcctgaatttgtatcgcgccttgttgaccctacctttcaccacttagttctcctaactgacaatgtccttgctgcctctgttgttgtaacctctacaattgaaagttcaatcaacccagaaaaactagtttttcatattgttactgacaaaaaaacttatgctccaatgcatgcttggtttgccaccaattctattaaatcagttgtggaagttaggggattacaccaatatgactggtctgaagaagtgaatgctggtgttaaagagatgctagcaactaatcacttaatttggaagcaatactataataaggaaaaggaccttgactatactcaagagaatagcagatatttggaggctttaaggcccagcagcctatccttgatgaatcaactccgcatttatttgcctgagctgtttccagatctcaaaaagatagtattcttggatgatgatgttgtagtacaacatgacatatcttttttgtgggaactagatcttaatggcaaagtcattggttctgtattcaagtcgtggtgtggagacggctgctgccctggaagtaaatacataaactacttgaacttttcacatcctcttgttgcatcaaactttgacggtgatcagtgtgcatggctctatggcatgaatattattgatcttgaaacttggaggagaacaaacattacggagacctaccatcaatggttgaaacttaacctcaagtccgggatgacaatgtggaatccaggagtgcttccacctgccttgatgacatttgagggtcaagtgcatcctataagttcatcaatgcttgtgactgatttaggttatcgccatcaatcagcagaaattagcaaagagaaattagaagctgcagctgttattcatttcagtggccctgcaaagccatggcttgaaattggtttcccagaggttcgaagtttatggagtagatacgtaaatatctctaataaatttattgggagatgtagaattacagggtgaaggaacaaagttttttcacctcccatatttattgagattgaacagtgatactgtatgggatttcagagggaagaaggttctgccttcagtctctgactcatacgctctgcacagtttgatatgagttacgct

SEQ ID NO: 13159 - DNA, 1218 bp, Glycine max
  Clone ID: JC-GMFL02220127B05_FLI
cagcaaccagtctgagtgcaattctgagatcaaattgctatcacaagaaagggcatgaggctccttgcaaatatgggggcaatctgtatatggcactgtttggacttgttcagattgtaatgtcattcataccggatctccataacatggcatgggtttcagttgttgccgcacttatgtcctttacatactcattcattggactaggacttggcatagcaacagtcataaaaaatggaagaattatggggagcttgacaggaataccaactgataaaattgctgacaaattttggttggtcttccaagcacttggtgacattgcctttgcctatccatactccattctccttcttgagatccaggacactctagagtctcctccaccagaaaatcaaacaatgaaaaaggcttccatggttgcaatcttcattacaacattcttctacctgtgctgtggatgctttggatatgcagcttttggaaatgatacaccaggaaacctcttgacagggtttggattttttgagcctttctggctcattgaccttgctaatgcttgcatcattcttcacttggtgggaggatatcagatttacagtcaaccaatatacagtactgttgacagatgggcttcaagaaaattccccaacagtggctttgtgaataatttctacagagtgaaacttcctttgcttcctggttttcagctaaatcttttcaggttctgctttagaacaacctatgtgatctcaaccattggtcttgcaatctttttcccttacttcaaccaaatcctaggagtgttaggagccataaacttctggccattggctatatatttcccagtagagatgtactttgtacagcagaaaattgcagcttggagtagcaaatggattgttcttagaacattcagctttgcttgctttctggtcactgtaatgggcttggttggctcacttgaaggaatagtaagtgccaaattaaaatagctgaaagcctgaaaggttgtttatgccactccccttagtaatgcttactctatttgagtttgtagattgatggttatataatgtttcatataaaaaagtttaaagctgaatgctagtgttattgagagtaagatagagtacaagcaattgtgggggatttcagaaagtgaataaagtggtactgccagtgccattggaataatacaagttttgtttgatgaag

SEQ ID NO: 13160 - DNA, 1632 bp, Glycine max
  Clone ID: JC-GMLE01810022A09_FLI
attgaagttaaaagccttagccttccctacaactccaaacacaaagacatcatcatccatggctgcctccgtctccactgtcggagctgtcaacagagctcttttgaacctgaatggttctggagctggagcttcagctcccagttcagccttctttgggaccagcttgaagaaggttattgcctcaagggtccccaacagcaaggtttccggtggaagcttcaagattgttgctgtagaagagaagaaagagattgaagagacccagcagaccgacaaggacagatggaagggtcttgcctatgatatctcagacgaccaacaagacatcacaagaggaaagggtttggttgactcccttttccaagctccacaggatgctggaactcactatgcagtcatgagctcctacgagtacctcagcactggacttcgccagtacttggacaacaaaatggatggattctacattgctccagcttttatggacaagcttgttgttcacatctccaagaacttcatgaccctgcccaacatcaaggttcctctcattcttggtatctggggaggcaagggacaaggaaaatctttccaatgtgagcttgtctttgccaagatgggaatcaaccccatcatgatgagtgctggagagttggaaagtggaaatgcaggagagccagcaaaactgatcaggcagagataccgtgaagctgcagacatgatcaagaagggaaagatgtgcgctctcttcatcaacgatcttgatgcaggagctggtcgtcttggtggaaccacacaatacactgtgaacaaccagatggtgaatgccactctcatgaacattgctgataaccccaccaatgtgcagcttccaggtatgtacaacaaggaagagaacccccgtgttcccatcattgtcaccggtaacgatttctcaacactctatgcacctctcatccgtgatgggcgtatggagaagttctactgggcaccaacaagggaagaccgcattggtgtttgcaccggaattttccgcactgatggtattcctgaacaggacattgtcaagcttgttgacaccttccctggccaatccattgatttctttggtgcactgagggccagagtatatgatgatgaagtgaggaagtggatttctggtgttggtgttgacagtgttgggaagaagcttgtgaactcaaaagatggacctccaacctttgagcagcccaagatgactctggagaagctcttgctgtatggtaacatgcttgtccaagaacaagagaatgtcaagagagtccaattggctgacaagtacttgaacgaggctgctcttggaaatgctaacgaggatgctattcagaggggaactttcttccagtcttgaattggaggcaaagcaaacttggcaagtaaatatttctgttcgtgaaggttgttgtactaatccaagtgctagaagttgtgatggaacttgcgtgtaacattcttagcattctcaatgtcttaggtgcaaagagaagatgctaagtttgagatgatcttactatatttttcatattggaccgtcttcctctataattttgagttacagtgtccacttaaattgaatttggtgccttttccttt

SEQ ID NO: 13161 - DNA, 2186 bp, Glycine max
  Clone ID: JC-GMLE01810022B03_FLI
caacaggggaaagtggaaggagaacgcaaaagggtacccttgttttcattgtctcgattgttttcctattgtcatttatcatcataaaccttcagagccatgagcccagctttgaaaacaatatcacaacggtgccattactacctatagctagaggggtcgctgagggtgtatcagccaagtcaaatccatatctatcacagaaagcttcatataattggacaaatgccatgttatcttggcaaagaacagctttccattttcaacctcaaaggaactggatgaacggtccattgttttacatggggtggtaccatatattttaccaatacaatcctgattcagcagtgtggggcaacataacatggggccacgctgtatccagagacttgattcactggctctaccttcccattgcgttggttccagataagtggtttgacatcagtggtgtatggtcagggtcagcaacccttttgccagatggcaaaatcctaatgctctacacgggtaacaccgatcgaaacgtgcaagtccaaaatcttgcgtaccccgccaacctatctgatcccctcctccttgattgggtcaaatacgctaataaccccgtcttggtgcccccaccaggcattgggccaaaggattttcgtgacccaaccactgcgtggattgggccagatgagaagtggaggatcactattgggtcaaagctcaacaagacaggtctttcgttgctttataaaacccaagatttcatccactatgagcaaagtgatcgctatttgcatcaagtcccgggtaccggcatgtgggagtgcgttgacttttacccggtttcagtaaacgggcctaacggtttggatacatctgaaaatgggccagatgtgaagcatgtgttgaaggctagtttggatgacactaaggtggatcattatgcaattggaacctacttcattgaaaatgatacatgggtgcccgataacccgaatgaggatgtgggtatcgggttgaaattggactatgggagatactatgcgtcaaagacattctatgaccaacaaaaacaaagaaggatcctgtggggttggattaatgaatcagatagtgaaaccgctgacttgaaaaagggttgggcatctctccagactattccaagaacagttgtgtttgacaagaagactagaactaatttgcttcactggccagtggaagaagtagaaagcttaagacttagcaactccgaatttgaaggagttgtggttaaacctggctcagttgtgccactggacataggcccggccacacagttggacatatttgctgaatttgaaatcgaagatttagcatccaaaggaattggcaaggacaatgtagactgtggaaatggagctgttgacagaagtgcttttggaccattcggtattttggctattgcagatgaccaactttctgaactaacaccaatttatttccatctttctagtactactaaagatggcagtttaaccacttccttctgtgttgatgaaactaggtcatcaaaggctcctgatgtttcaaagctcatttttggaagcaaagctccagttctcagtgatgaaaaattatcaatgagggtattggtcgaccattctatcattgagagctttgctcagggagggagaacagtgatcacatctagagtttatccaacagaagcaatatatggagctgcaagattgtttctgttcaacaacgcgacggacataaacatcaaggcctcgctcaagatttggcaattgaactcagctttcatacgccccttcccctttgaccagaagttgtgaaagtcaaagctatggatgcacatttgcattatatattttgtaaacggttattactattgcccctgccaactaaggaaacaatgaaagtcttgtggcatcaacatgcataaaggcataaagctgataagtttaattagcttgagttatcctacagcttgtaggcatacccatgccatggatatccatattatttggaatttgtcaagagtcattaaagtctaccactagagtaattatatacaaaagagccttctattgttttattttatttttatcttaattttcatatcatattatatacatatcattcttacacttccctcttattctctgaaatagcatatgggtgtcattgtgtcc

SEQ ID NO: 13162 - DNA, 2087 bp, Glycine max
  Clone ID: JC-GMLE01810022G05_FLI
gtcgcgtgagcgaatcgatacaccaccaagctatctctatacatttctagatcggagctccttgtgcagcgcccgacccccatcaccatgtcttacgacaagaacccatcgccggtgccgacgagcacgacgggcgatgaggagaagaaagtcaccggcggcggctacgacgtcggcgtctactctgcccacggacgagtcgaccacaatgcgcgtgcggttgacgggcacgacctcaacgactcgtacgacccgtccaaggagtcgctgctcacgcgattgggtctcaacatcgagagtttcaagcgggcacccggtaccacgcgcggtctcgtcgcccacggtgacatcccacccgagtacctgcaacacgacaacccgctgctgcagcagaagatgaagccgaggcatttgcagatgattgctgtcggtggatctatcggtactggtcttttcgtcggttccggagcttcccttggaaacggaggtcccgctgcggtgctcatggcctggattatcatgggtgtcatgttgatcatggtcacccaggctctcggtgaaatggctatcatctaccccgtctctggaggtttctacaccttggcttcccgtatgctcgacccctcgtttgcctttgctatgggctggaactacgttctccagtgggccgttgtccttccgctcgagatcactgttgccggtacgaccgttcagtactggacggacaaggtgccgctcggcgtgtggatcaccatcttcttcctgctcatcatcttcttcgccacgctcggcacactcggatacgccgaggaagagttctggtcgtcgtgtctcaagctcgccgtcgtcatcatgttcatcttcatcggtatcgtctgtatctgcggtggtggacccgccagcggtgactacggctcgtacgtcggtggccgatactggcaaaacccgggtgcgttcgccaacggcttcaagggtgtctgtgccatgttcgtcactgccgccttctcgttcgccggtaccgagctcgtcggtctcgccgcgaccgagacgcccaacccgcgcaagacgctcccctccgccgtcaagaacaccttctggcgaatcaccatcatctacatcacctcgctcaccatcatcggcctgctcatcccttacgatgaccccgatctgttcggcggctccggcgccaacgtctcgcccttcgtcatcgttctcgaccgagccaacatcggcggcttgaaccacctcgtcaacgccaccatctgtatctcggtcctgtccatcggtctctcgtgtgtctacgccggttcgcgaaccctcactgccctcgccgagactggttacgctcccaagatgttcacctacgtcgacaagtccggacgacccctgtactcggtcctcgccatcctcgcctttggccccatcgcgtacgtcaacctcgccaacgtcggaaccgacgtcttcaactggctcttggccctttccggtctgtccacccttttcacctggcttgccatctgcgtcacgcacatccgattcaggcaggcgtggaagatccagggccactcggtcgaggagctgccgtttaccgccatcgccggcgtgtggggctcgtggctcggtgccatcctcatcgtgatcgtcctcatcgctcagttctacatcggtctcttccccctcggaggcgtcgagagcggcaacgcccgtgctgagagcttcttcctctcgtacctggccttcccgatcctgctcgcattctgggttgtcggttacgcctggaagcgaactctgccccgaaagacgaccgaaatcgacctggacaccggccgaaagtcttggctcaccgtcgaggagatgaggcagtacaaggccgagcgacgactggctccgtggtggaagaggatataccgcatgctctttaccagcagctaagcgtcgcgtggcgtctctccttttcctgtcgtcatcgacaccaaaagtatcagctcacgggagggattggggaagaagagtaagccgggagagtgaagcacttgtagtcgacgcatctaattgtatcttccgatacatgcatgttgctagtcatc

SEQ ID NO: 13163 - DNA, 1269 bp, Glycine max
  Clone ID: JC-GMLE01810049D12_FLI
aaatggagcagcacagaaattaggaatcaggagcctcataccaatggtcctgttctggatgatgttttgctagcagacccagagattgcctatgccattgaaaatgaaaaggtggttaataagaccataaaaatatacaacattgatcgtgctgcatgtggacgtatagctggtgtcattgcaaagaagtacggtgacactggttttgctggacagttgaatataacgaagtgctgggcagtcatttgcatgctttctgacacctggaatgaacattcgccttgttggagaggctaatgattatgttgggaagggcattgctggaggtgagttggttatcactccagttgacaagaccggttttgaacctgaggatgcagctattgtagggaacacttgcttgtatggtgcaactggtggacaggtcttcgttagagggagagcaggggaaagatttgctgtgagaaactcgcttgctgaagctgtggttgaaggtgcaggagatcattgttgtgagtacatgactggaggctgtgtggttgtcttgggaaaagtgggtagaaatgtagctgctggaatgactggaggattggcttactttcttgatgaggacaatactttcatacccaaggtaaatggagaaattgtaaaaattcaacgggtgtcagcccctgttgggcagatgcaactgaagagcctgattgaagctcatgttgaaaaaaccggtagtacaaaaggtgcggctattctgaaggactgggagaagtatttatcactattttggcagctggttccacctagtgaagaggatacccctgaggcaaatgccaagtacgacacaactacggcagatcaggtcacttatcagtctgcttagggtgacgatgcaaggttacattacattgattacgccaggctatggagccattgttgtatccctgatttgtacaggaattggagaagctatcaataaggtggaaatgctagccaaaatatggggattaaactatcccttgaaaccatggtcgctgcattgattctcaagatcatttttgccagcagtacgatgcaccccgtatacatccatctaaagcattagcattctcttttgtatagccatgtgaaagcaaaactgtatataaaatgcagttgattcgaatctgattgggatttttgtggacggtgaaaataaattagttggggcttgatatgcctagtcatcttttctctcctctgattaatgaaaaaatattgttttctccttgcacg

SEQ ID NO: 13164 - DNA, 1498 bp, Glycine max
  Clone ID: JC-GMST02400049G04_FLI
ctttccattttctccattttttcttcctccatctgcattctctttcgctcgacaaaccctagcgatttgatgctgtgcgatgcgactcgctgagttgaaccggataaagatctgagtcgcggtgatcggttcgacgccctcatgggtgctgcgggctccaagctcgagaaggctctcggcgaccaattccccgaaggagagcgttactttggcctcgagaattttggcaatacttgttactgcaacagcgttttgcaggcactatacttctgtgttccatttcgagaacaattgctagaatattatgcaaataacaaaagcataacagatgcagaggaaaatcttttgacttgcctagccgacttattttcacagataagttcccagaagaagaaaacaggtgtcattgctcccaaacgatttgtacaaaggttgaaaaaacagaacgaactcttccgtagctatatgcaccaggatgcccatgaattcttgaactttttgttaaatgaacttgttgacattctggagaaagaggcccaggctgcaaaaaatgatcaagagacttcaccaccttctgaaaaggctgcaaatggacctaagaatagtctagccaatggtgctaaaaaggagcctttagttacttgggtgcacaaaaattttcagggaatactcaccaacgagaccaggtgcttgcgatgtgaaactgtaacagctagggatgaaacattttttgacttaagccttgatattgaacaaaatagttcaattacaagttgcttgaaaaacttcagttcaacggagacattgaatgctgaagacaaatttttttgtgacaagtgctgcagtttgcaagaagctcagaagcgaatgaagataaagaaaccacctcatgtgttggtcatccaccttaagcggtttaaatacattgaacaactgggtcgctacaagaagctgtcttaccgggttgtcttccctcttgagctgaaattgagtgatactgctgaagatgcagatattgagtattctctatttgcagtagttgtccatgttgggagtgggcccaaccacgggcattatgtaagccttgtgaaaagccataaccactggttattttttgacgacgaaaatgttgagatgattgatgagtctgctgttcagacattctttgggtcttcgcaagaatattccagcaatacagaccatggttacattttattctatgagagcattggctctggtaacaggaactagacggaggagcctttgagttttagatacttgaatcagttggacttgtcttttttatctgtttaattattaattattttttccggttttattcaacctgcttgagtagttgttatacatcaatgagaggatacgggttgtgaaaatgtatacttagtggtcggcatgtacagtggatagcggaagcactgtcctttttccccttatttttttgttacaataagagcagtgtatatggtttaagaatttc

SEQ ID NO: 13165 - DNA, 2090 bp, Oryza sativa nipponbare
  Clone ID: JC-OSROLIB3475022E03_FLI
ctcaactgaagaagaagaagaagaagaagaagaagaagaggaggagggttgtgaactgatttgggaagggagggggaggaggaaggcgatcgatcggcgatgggcacgtacaagtgctgcctcatcttcaagcgccgcttccgctggaacgacgcgccgccgcccgacgatgtccgcgccctcttcgccaaccactccgccggcggtggcccccacatggccgccgacggcctccgcgcctacctccaggccaccggccaggacggcgacgtggacatggagcggctggtggagcagatccggcagctgcaggggcgcggcgggcgcatcccgcgggtggggcgggcactcccactcctgacggtggacgacttccaccgattcctcttctcccacgagctgaacccacccatccggcacgggcaggggcaggtgcaccacgacatggccgccccgctctcccactacttcatctacaccggccacaactcctacctcaccggcaaccagctcagcagcgactgcagcgacctccccatcatcagggctctccagaggggcgtccgcgtcatcgagctcgacatgtggcccaactcctccaaggatgacatcagcatcctccatggcaggacgctcaccaccccggtctccctcctcaaatgcctcctctccatcaagcaacacgcctttgaggcctccccttacccggttatcatcacgctcgaagaccacctcacccccgatctccaggacaaagcagccaagatggttcttgaagttttcggcgacatcctctactaccctgacaaagatcacctcaaagagttcccttcgcctcaagacctcaagggccgtgtcctcctctccaccaagccccccagggagtaccttcaagccaaggatggtaatgctgccaccatcaaagaggacgccaaggccgccgccactgacgatgccgcatggggaaaagaagtcccagatattcactctcaaatccactctgccactaaacatgaccaaagagaagatgacgacgacaccgatgaagacgaagatgacgaggaggaggagcagaaaatgcaacagcatctagctccacagtacaaacaccttattaccatcaaagcaggaaagccaaaaggtactctacttgatgccttacagagtgacccagaaaaggttagaaggctcagtttgagcgagcaacaacttgccaaattggcagatcatcatggtaccgaaattgtaaggttcacacagagaaacctactgaggatatacccaaagggcactcgggtcacatcatccaactataatccatttcttggttgggtgcatggtgctcagatggtagcgttcaatatgcagggatatggaagagctctttggttgatgcatggattttataaagctaatggtggctgtggttatgtgaagaaaccagatttcttaatgcaaactgatccagaggtttttgacccaaaaaaatccctatctcccaagaaaaccttgaaggtgaaagtatacatgggggatggttggcggatggacttcacgcagacccactttgatcaatattctcctccagacttttatgcacgggtggggatagcgggagtaccagcggactcggtgatgaagagaacgagggcgatagaggataactgggtgccggtgtgggaggaggatttcaccttcaaactgaccgtgccggagatcgcgttgctgcgggtggaggtgcacgagtacgacatgtcggagaaggacgacttcggcggccagacggtgctgccggtgtcggatctcatcccggggatccgagcggtggcactccacgaccgcaaagggatcaagttgaacaacgtcaagcttctcatgcgcttcgagtttgaatgacccaacacaccgacactttctttctttctcgccgcatcgcattgcactgtgcctgtgcttgtgcagcatccatcatttggtttggtttttcatgttcctgtgcatacgcatttgtgtctgtacataggctcggtcctgtatattgtttgtgagtaacatgtaataataaggcttcacgccatgttcattcctcc

SEQ ID NO: 13166 - DNA, 1252 bp, Zea mays
  Clone ID: JC-ZMSHLIB3569P035G11_FLI
tgagagagactgaggaggcatgtgaccctcttcactcgcttcaccctgttcatcactcgcttgtacaagaagtcacgcaccaaacgggcaagggcaaacaccaccaaagaaggcgagaacgcactccgtccctctcctccaggaccgcccgctcttatcccgtttctcccttctctgggctcggagaatcggagatggcgtccagcgcctctcggttcatcaagtgcgtcacggtcggcgacggtgccgtgggcaagacatgtatgctcatctgctacaccagcaacaagttccccactgattacatacccacggtgttcgacaatttcagtgcaaatgtcgttgtggatggcaccacggtgaatttgggcctgtgggataccgcagggcaggaagattacaaccgactgaggcctctaagctaccgtggtgcagatgttttcgtgcttgcattctcacttgtgagtcgagctagctatgagaatatcatgaagaagtggataccggagcttcagcattatgcacgtggggtgcctgttgtgttggtaggcacaaaatttgatcttcgtgaagacaagcactacttgatggaccatcctgggttggtgcctgttaccacagcacaaggggaggaacttcgtagacaaattggtgctatgtattacatcgaatgcagttcgaagacacagcagaatgtcaaagctgtgttcgatgctgccatcaaggttgtaatccagcctccaactaaactaagagaaaagaagaaaaagaaatcacgcaagggatgttcgatggtgaacatcttatctggaagaaaaatgctatgcttcaagtcctgaatgatcgaagggggtcttacctgaactaataccatgagtgtgaccccaagttcgcgaagcttgaaatcttgatgcgctcgttgcgcatgtatatttgcacctttggttattaatcactagaggtagatgattgaaactaatctgcttaaccaatgtgcactgctgggcgctggcgtggttagctatatcagttaggcagttcgacagaggtcaaagagattgagattttgttctttcttggcaatgtcacagcttttgtgaatctggtctcatcatactgtccgctagtttatccaatgattccatggtggaatcaatccatagcaacattgtgttgaatgatcctttgcttttgcgctaagcatataacattccagttttggtgaaagctggaagtgaaactctcttctttc

SEQ ID NO: 13167 - DNA, 972 bp, Zea mays
  Clone ID: JC-ZMSHLIB3569P036A10_FLI
gcatctataaagaagatcatatccataagaagactgaacatgcttgatatacccgtacccaaactgccatacatgagagtagatagacagagaacatgaagcaaaacagagacacaagctgcagcggcacacatggggcaccgcgccccactaccaccaccagaccagacgacgcacactttatttagcccatgtcactcgcagtccgcaccgggcactgctatagctacgacacacacactgtcacacacagagagatggagagaaaccgtcgcgttcgcgttgtactgaacagtaggcgccagcgcgcgcgacgcgactggcacgccacgcgcgcacgctgagacatcgatctcccgacccgctgtccgccgccgcagtgcgcgtacggcgcacggcctcactcgctggccttctcggccacctcagcggccggctcggccttctcgggctcctcagcggccggctcagccgccgcgggctcctcagcagcagcagcagcctcgggctcagcggctgccggttctgcttctgtctcggcagcgggcgctgccgcttcctccttcacctcttcagccgccgccggctccggctccggctccgcctcctttgccgtctcttcctcctttggcgtctcttcctccgccgccacgggggccgcctcgggctcagcggcggcagctggctcggtctccgccggggcagctggctcctccaccttggcctcggcggcgggagcagcctcctcgggcacggcggcggccggagccggggtctccaccaccggcgcttcctcggtcgccacgacggtcggggtctggacctcggcagtggccatgggtgacgatcagaaggctgatgactacacgaccgagtggctagctactagctagggctagagctagagcagctaaagaatgatcgagctgcaagagtgagcgatcagctgctgatcgggagtgggatcgctcg

SEQ ID NO: 13168 - DNA, 1112 bp, Zea mays
  Clone ID: JC-ZMSHLIB3569P050F08_FLI
caagaccttgactggcaagacaatcacccttgaggtggagtcctcagacaccattgacaatgtcaaggcaaagatccaggacaaggaaggcatcccaccggaccagcaacgtctcatctttgccggcaagcagttggaggatgggaggacccttgctgactacaacatccagaaggagagcaccctccacttggtgctgcgtcttaggggtggcatgcagatctttgtgaaaacccttactggcaagaccatcactcttgaggtggagtcttcagataccattgacaatgtcaaggccaagatccaggacaaggagggcatcccgccggaccagcagcgtcttatctttgccggcaagcagctggaggatggacgcacccttgcggattacaacattcagaaggagagcaccctccacctggtgctgcgcctcaggggaggaatgcagatcttcgtgaagacattgacaggcaagaccatcaccttggaggttgagagctccgacaccattgataatgtgaaggccaaaatccaggacaaggagggtatccccccggaccagcagcggctgatcttcgccggcaagcagctggaggatggtcgcaccttggctgactacaacatccagaaggagagcaccctccatctggtgctccgcctgaggggtggtatgcagatctttgtgaagaccttgactggcaagaccataaccctggaggttgagagctctgacaccatcgacaacgtgaaggctaagatccaggacaaggaggggattcccccagaccagcagcgtctgatcttcgccggcaagcagctggaggatggtcgcacccttgcagactacaatatccagaaggagagcaccctccacctggtgctccgtcttcgcggtggttattaagccatcagtcgttgaagctgctgctgtatctgggttatccagtgtctctgccattgcccatggatggtactgtctttcaaagtatttgtatggtttgtgtcgtgagtcgtgactgagctggtttcatggaccagttgtgttctcgttacccaaaactatcgtgcggcagcatatggcttaatcatgaataaatgtggtgtttgaattt

SEQ ID NO: 13169 - DNA, 1450 bp, Zea mays
  Clone ID: JC-ZMSHLIB3587P027G03_FLI
gtccaccaccgcttcccgtgcagcgccctccctatacgttcccccatttcctgtgttggcggcgatggcgcggcacttcgtgctcaacaccggcgccaagatcccctccgtggggctcggcacctggcagtctgaccccggcgtcgttggcaacgctgtctacgccgccgtcaaggtccgcacaaacccgcgcccgcgtcctgttttcttctccctccgttgactatccagattgcattcttttttctcctccctcctttatactaatccctttatgaatcctgtttcctgggatacgggagatctttcttccccgaggaatttcacatgattgcgtacggatcttgcaggcgggttaccgacatatcgattgtgccagagtttacggcaacgaaaaggagattggtttggcgctgaagaagctatttgaagagggtgtagtgaagcgagaagatatgtttatcacctctaagctatggaatgatcatcatgctcctgaagatgtgcctgaggcactaaatgacagcctgaatgatttgcagcttgagtacctggatctttatcttatccattggccatttagagtcaagaagggaacaaataccagccctgaaaattttgttacacctgacttccctgctacttggggggcaatggaaaagttatatgatgctggcaaagctcgcgctattggtgtgagtaacttctcctcaaagaaattgggtgatttgcttgctgtagctcgtgtacctccagctgttgatcaggtggaatgtcatcctggttggcagcaaactaagctccatagcttttgtcagtcaactggtgttcatctaactgcttactcaccactaggttcacctggtacaacttggatgaatggtaatgtccttaaagaaccaataatcatctcaatagctgagaaactcgggaaaacttctgcacaagtggctctgcgctggaacattcagatgggtcacagtgttcttccaaagagcacgaatgaagaaaggataaagcaaaaccttgatgtttatgattggtcaattccagatgacttgcttgcaaagttctctgagattaagcaggctaggctacttagaggcaacttcattgttaatccagagagcgtttacaagacccatgaggagctctgggatggtgaactttaagaaggacgccgttgtccctcctgactcctgagcagggagcaagcagcgttccattagggctcgttagatcatttcacctccaaagttgctcttttgaaatgaaggttcagtgctcggaagctctggtgccatcctgtatcacgaactattgagaaatttgtcggtgattttactttgtgctacgggatgtgctgctgcagtctatcctagtgtcagttgattttttctggtaaaactgtgaccaaataagttaattcgccaggcatcattactattgg

SEQ ID NO: 13170 - DNA, 2051 bp, Glycine max
  Clone ID: JC-GMFL02220127E09_FLI
gaaaaatttctccttgtttgtacggcacacaagtgagatcaaagatggaaaatatgccaccaggttatcgtttctaccccacagaagaggagctgatttcgttctatcttcacaacaagcttgaaggagaaagggaagacatgaatcgagttattccagtcgttgatatatacgactacaacccatctgaactcccacgtaaaaatcttatatatatatatatatatacatatatatttccctcatctccctctttctcttttcatttttctaatttttttttcctttcaatcaaaatcgagcttgacttgaaagctatggtacaagttgatttattgcatatatatagaagcaaagcacattctggataatttaaggttacatacttttcttttaatttttcttaatgactgtaataccgtaaatgctgttgatatattattattctgtgatcaagattggagaaaaggatatacagtccttttggcttcatgaagattgctcataaaattaatattgatagatatatagatatacactagttttgcgtaactgactggtatatttgatattaaacatgatttactgaaacaaagatatagatgcattgatatatttttatttggtgttgaattgcagaaatttcaggagaggcaagtatgagagacacggagcaatggttttttttcattccgaggcaagagagtgaagcgagaggagggagaccaaagcgtctcacaactacagggtactggaaggcaacagggtctcctaatcatgtttattcttcggataatcgcatcatcggaattaaaaggactatggttttctatagtggaagagctccaaacggaaccaaaaccgattggaagatgaatgagtacactgccatcaaaacatcatcctctagtcccacggtaccttatatttactatacgtgtgtctaagaattagggttggctacattttaattagttgcctattaatttaatttgttaaatcttcaaggtttatcttctctactctccatattctcttcttccttcttctcaaatatcagaatttgagcacccttctgaacaaaaaaataaaataaaaattgagcatttttatttcttacgaatgcattgacacagaggcatttcactgaattttatcaactaataaaataataaaaaccaaaataaattgtgctcgatcgtgatatttcataagtatttcgtacgaaactaactcgtacattaaaaaaattgatcatagtactcaatattattctcagtcgataattaacttacaattaatcaaccattcagtcagaacaattaggtttgaattatatagtatatactatatatatagcatggaatttcatggatgcagtgcaattttaaatatttgttacgtgacagtgcagttttatatatatatattgtatacagatcatatatagttgcacttcttaatataactaaccttctgattctactatatattaattgcagctaaggaaggaattcaatttatgcagagtgtacaaaaaatcaaagtgtttgacagcatttgatagacgaccaccgccaaggagggacacagaaagctattcgggtgctcaaaatgtagaagagcaacaaaagggttcaacatcatatgatgattatcatcataaaatggtggagagaagtgcaacgtgttcaccagcagagagctcttcctccggagaccatgaccaaccccctcttcacggtgaggaagctactcaaatggatgttgacaacaacgatgacccttttttggattgggagaaagtggatatgttcttgggatcagaaccatgaacacatccaatccaatctatctgtgctttgttggtatgctacaacaaagttgactctcaagtctcagctacaccgatgactgaataagtagtaggttatgttaattaattgtgtatgtcgcaccgcatgcagaacaactactttaaatatttgttagatttcttgctagctttataaagttgtgtatagtggctaatttgtctgataaattatcac

SEQ ID NO: 13171 - DNA, 2081 bp, Glycine max
  Clone ID: JC-GMFL02220127H05_FLI
gtttgcaagacttatatgaatgagatcaatcttgcagcccaaacaagaatttatccaaggccggagacgaaatggtggttgcgagctgttggtgttcatcttcatcttcatggctgccactgtcattgccactgcattcgaacttgaaggcagcatcaacgtcactgtccccgaaatggaaatatcacgcattttctgaagcctcctcctcctcgtgttctctcgttcacaacaaccaagacgacgaccttcaagctctcttacagatccttccatctgatttgcatcacaatctcctcaatcaacctaaccgccctcaacttctagaggttattttggatttggggcgttttccagaagcgcgttatctaggaaaacacggaggccattctttaaggaacactgagcttaggtaacagtgaaggagttggaatatgctgaacaagctgttggtgaatttgggaaggacaatagagctggcattgagggtacgttacaccgaatatctgcaattaggagtaggaatggtcacatagttggtttgacctgtcgagttgggagagctgtcactggccagattgatatggtttatgatctgcttcagtatgggaagagcattttatttgttggaaggcctggggttggcaaaactactgttatgcgagagattgctcgtgtactgtctgatgagcttcacaaaagagtggtgattgttgataccagcaatgaaattggaggtgatggcaatattccacatgcagcaataggtggtgcacgaagaatgcaggtgcctgagccatcaatgcaacatagagtgatgattgaggcagtagaaaatcacatgcctgaggtgattgtagtagatgagattggcacagaagctgaagctcatgcttgccgatcaattgccgagcgaggaatcatgcttattgggactgctcatggacagcagcttgaaaatatcatcaagaatcctacactgtctgatctggtttgtttttatttttatatggttgtgccaataacatctggttatgccaataacatctaagggtgtgttgggaaaatgttgggttgaacgtagcccacattttttccaatccactgatatacttctcccttttgagctttggaatgcgtaaatggacgtttggtgccttgcaaactgcaaaccaaacaaacactaagactttttagtttttgctttcaaagtctatctattgctttcttgggtgtaaaaggcctttaagagaaaaaaaaaaaaacttatgatagttcactgtttgctcttatttaactgttccgttagtttaattttagtattttcatgtgaacattaatgcatcattattgacctgcaagctttaggggggaggggcaatcaagtcattattgagcatgacaagtgtgcactgaattctattatgtatttaaactaatatttgtaactgtctgtctcttttaaccttgctttatggtctgcataagtagttctgtagaaaaggcttgaaactgaatcctattttatggtgtaaaagagttttcattgacgttttaattttcaaaagtatcctgaaaaattatatcacccattcagttcaataagcatttagtagattaatatttgatgttaaagatttaaagatttacttgatttgtggagccatgaatcattgtgcaatataatcaacagtaatattcaagattcacctccatttgctttattagattggcggaatagaaagtgttactctgggagatgcagaagccagagccagaaattctcagaagacaattcttgagaggaaagcacctccaacatttgatttcttaattgagatgagagatagacactactggcttacacatcaggtatgttaattgagcatatattactatgatagtaacaatagtcttacttatcccactaggtgcaattagttatatggatcacgcgaccacatcaaacaccgtaaaaaactaaattattagggatatttattattcaacatgagtccccttctaataatttcttccatttttttttcacacacacacacacatgtatatctcctgctgat

SEQ ID NO: 13172 - DNA, 1893 bp, Glycine max
  Clone ID: JC-GMFL02220130A12_FLI
ggaaaactcaaacaagttttgtgcaatttactgagcaatgctgttaaatttaccgaggaggggcacatagctgttcgagcatgggctcagaagccaagcttgcagagctcaatgattgctactcaccaatacgggtccagtagacttttgtcgcgcttgtgttgccgccaaaatgaagcacgtgatgacgtggaagacttgaacatccaacaagatccaaattgtatggattttactattgaagtggatgacactggcaaaggaattcctaaagagaagcacaagtctgtttttgaaaattatgtccaagtcaaagaaactactcttggccaagaaggaactggcttgggacttggtattgttcagtcactggtacgtttgatgcatggagatattgaaatcatggacaaggatattggtgaaaagggaacctgctttaggttcaatgttctcctcactgcccatgagacacagatgaatgatgacacaagagatgaccaagttggatcaggtaacaaaaatcaatctcatggactaaccatgagtcccaagttatctatttggacccgtagtcctagatccgaggcttctcgagttgttttattgattcaaaatgaggagcgtcgagggactacgcagaggttcatggagaggttagggatcaaagttaaggttgtgaaggagtggagacaacttcattacactctgaagaagatcatcaaacaaaagggtctccatccaaatagctcaagctcgccagagtcttcagattctccctctgcatcaagctgcacaaacggagtccctttgagtgcacaagatggaactaattacataagttcaatcttcaagagaacagatattgaagcttcgtcgggttttgtcctgattgtgattgatgctaatgcaggacctttttcagagctttgcaaagtggtagctgagttcaaaagaggcctttgttatccttgtagggtggtttggttggagaatccacttataccttctgtggacaacaaaatccttaacaaggatgtttctaattctaatgacattgtcttgtctaagccacttcatggtcatcgtttattccaagtcataaggattctccccgagtatggaggtgtttggccatgcaattctagtgaaacaaagaaagaaaagggtcaagtttccttaactaatgaaggtgcaattcgacgtgttgaactacaagagtgtggcagctcaagcgttacacagcaatcttatgatagatctagagcaagaaaatctcatatccaccaaggagaaatacaagaatgtgaagagtcaagcaatgaaaaacccttgtggggtatgaaatgtttggttgttgaggacattgttttgttacgtaggataactaagtctactcttgatcggcttggtgcttctgtcatggaatgtgagaatggtgaacaagctgttcagacagttgaagagggtctaactaggaattcttccaatcgtccatgtgatttcatcttaatggactgccagatgccggtaatggatggatatgaggcaacgagacggataagggagattgagaagtctcatggtgttcacattcctatctttgcattaacagctaatacagggaaagaggcaatattgtccattgaagctggaatggacgatcacttaatcaaacccatcaacaaagaggctttacttaaagccatcaaaagaatatatacttaagagtgaacagtaaatcttatcttttttaattgctttatatgattgttatcaagtttttaaattaaacaatgacaggagatatctttttacaccactaactagcctatatataaaacagaaatagtaaataaataaataaagcattcatgtgtcattgtttaatttgac

SEQ ID NO: 13173 - DNA, 948 bp, Glycine max
  Clone ID: JC-GMFL02220131B01_FLI
aaaggagcgagatagcgaggaaatttggttcttacttcttacccgcagacagaggaaggaagggaaatagatggaagctgtgtgtggaagtggaagcagtgtttgggtcacatcctcccttacacgctcacccaagatcacactccctctattccacgccagttaccagcacctaacagcatttccttcacaatcccttcttttctcctatcacccttctcgctatgctaatgctagaaccctccgcgccagaacctcctccaaacccattttccttccccacttaattgcttctctggaacaagttgaccagacttacattatggtgaagcccgacggcgtccaacgtggcctcgtgggagaaattatttctaggtttgagaagaaggggtttaagttaactggcttgaagctcttccagtgctcaaaggaattggccgaggagcattacaaggacctaaaacaaaagtcatttttccctaagctgattgactatattacttcaggtcctgttgtgtgtatggcttgggagggtgttggagtagtggcatcggcacgcaagcttataggggctacagatcctcttcaagctgaaccaggcacaataagaggagaccttgctgttcaaacaggaaggaatgttgttcatggcagtgacagccctgagaatggcaagcgtgaaatagctctatggttcaaggaaggcgaagtatgcgattggaccccagtccaatcaccatggctgagagaataataaaccacagatgcccaattagaatgattcttgccgtttctaggttcaataactgcattaatcgagtttaaacagtaactcaaattttgtaaaattttgctttttgactcggattctccaagcctattcctggcattacattttctgtttctatcagatttgaatgggtcatgcgatgttttgttttttttttt

SEQ ID NO: 13174 - DNA, 1613 bp, Glycine max
  Clone ID: JC-GMFL02220131H02_FLI
ggcatcattggcatgcaacacgtttattgttagcagcacgttaagatcagttgttactcgtgcggaaccacctaaacctggtcctcttttcgatcttagttcattcaatcgccacagctttccggcaggcttcactttcggggcatcatcttccgcgtaccagtttgaaggtgcggcaaaagaatatggtagaggaccaagtatatgggatactttcatcaatcaacatccaggtaagatagcagatggaacgaatggagatcgcgcacttgaccaatatcaccgctacaaggaagacgttcagatcatgaaaggtatgaatttggatgcatataggttctctatctcttggtcaagaatcctcccaaatggaaaacttagtggaggtataaatcgagaaggaataaattattacaacaatctcatccatgaattgcagactaaaggtttaaaaccttttgtgaccctttttcattgggatctcccccaagctttagaaaatgagtataaaggcttcttatccgagtccattatagatgattttggagactatgcgaaattttgtttcgaagaatttggagatagggtgaagcattggattacttttaatgaaccgcatatttttagctcgcatggctatgcatatgggacgaaggcaccgggtcgtaagtctcaggggctccgtccagacagtggagggacagagccttatcgtgtttcacataacatacttcttgctcatgcaaaagctgtccaattgtataggaattcctataaggaatctcaaaatggagagataggcataaccctcgattctagatggttcgtgccctattcagatgcttcttcagacatagaagctaccgaacgagcacttgacttcgagattggatggttcatggaaccattgacatcaggaaagtatccagaaagcatgcagctttatgttggtagacgattgccagagttctctaaagaggaagccgagcttgtccgtggatcatttgattttattggactaaactattacaccaccaataccgcgcgcgttgccactggctatacggactcagtgcatcatcatccagatctatctactgatcctaatgtcgaacttggattaactcgtctcaacgggtcgtctcctataggtccagtgccaggtttaggatggttatgtgtttatcccaaaggaattagagaattgctgctccgtatcaaaaacctgtacaacaatcccttgatttatataactgaaaatggaataaatgaattagatgatccaacactatcacctgaggaatctcttatggatttttacagaattgattatcattatcgtcatctattgaatgttgattatgcaataagggatggcgtgagagtaaagggatattttgtctggtcactgctggactgctttgaatggagtaatggttatatacctcgatttggattgatttttgtggatcacaaaaataatttgaaccgatctccaaaactctctgcaaaatggttccggaaatttttacaaaatcgactgctttgaatggagtaactcttaacaatgtaataaatttaactatgaattattatatgtttgtattttctcc

SEQ ID NO: 13175 - DNA, 976 bp, Glycine max
  Clone ID: JC-GMFL02220132AH12_FLI
gcagaaaaaggagagcacatagctgcatttattttagaacctgtccaaggtgaagctggggtgatatttcctccagatggttatttaaaagctgttagagatctttgctccaaatataatgtcttgatgattgctgatgaaattcaaactgggttagcaagaacggggaagatgctggcttgtgagtgggaagaagttcgcccagatgttctgatactagggaaagcattgggtggaggagttataccagttagtgcagttcttgcagacaaagatgtgatgctttgtatacaacctggacagcatggaagtacctttggtggaaatccaatggccagtgcagttgcaattgcctctctagaagtaataaaaaatgagagactcgttgagagatctgcccaaatgggagaggagcttactggtcagctgcttaagattcagcagcaatacccagactatgtgaaggaggtacggggaagaggattgttcattggagtggagtttaacagcaaaaaattgttcccagtatcaggctatgagctatgcaaaaaattgaagtatagaggagtccttgccaagccaacacatgatgcaattatccgctttactcccccactttgcataagtgtggatgagatccaacaaggttccaaggcactggctgatgttctggaaattgatctaccaaagttgcagaagacaaagccaatagatgctgctccagttgccactagtgcatgcgatcgttgtggtagagtcttgtattaaccataaaaagacacgtatgaattgcatgtgcctttagttttccttggaaaaaaatatatcacatgaagaatgttactccttatacatgaacagctggaaactatgttccaatattccatatatcatcataatataagttcatgatatatgtgataggtagctgtataaataaatatataggagttagaggactcattgtataactttc

SEQ ID NO: 13176 - DNA, 627 bp, Glycine max
  Clone ID: JC-GMFL02220136B03_FLI
atcgaaacctgcatggttacaaaattaaattttccaccttctactgcactccgagtaacaactcgcactatttatgttgcggtgacaatgttaattggcatatgtgttccgttctttggctctcttcttggatttcttggaggctttgcgtttgccccgacatcatattttttgccctgtatcatatggcttaagcttaaaaagcccaagaaatttggcttgtcttggacaattaactggatctgcattattcttggggtagtgttgatgatattatctccaattggtgctctaaggaatatcatactatcggccaagaactacaagttcttctcgtagactattgatgcaatcattgatttcccaactgttttaaaagttagatgggtgaaactaaataacaagaaagcatttacatacatgctttatgcatagaatatagataatagatagcttcataggatttgtagaagtgatagacacacaactagccttgcacaaaattgaagcaactatcttgctcactatgtagaatgtagatcattattggagacacggttgaacgagtataccggttgtaaccgtaatgaagtagtgaatatagtattgcttttatgattttgtagt

SEQ ID NO: 13177 - DNA, 1552 bp, Glycine max
  Clone ID: JC-GMFL02220138D06_FLI
caatactacaacttctgaatcacttagttgaattgaattatcttcaaaatgagagaaatccttcatgttcaagctggtcaatgtggcaaccaaattggaggcaagttttgggaggtgatgtgtgatgaacatgggattgatgccactggaaattacgtaggcaattcccatcttcaacttgagagggttaacgtgtactacaatgaagcaagtggaggacgctatgttcctcgagctgtgcttatggaccttgaaccagggaccatggatagcttgcgttctggtccttttggaaaaatattcagacctgataatttcgtgttcggccaaaatggagctggtaacaactgggctaaagggcattatactgagggagctgagcttattgattctgttcttgatgttgttcgaaaagaagctgagaactgtgactgcttgcaggggttccaaatttgtcactcactgggaggaggaactgggtctggaatgggtaccttgcttatctcaaagatcagagaagagtatccggataggatgatgttgacattctcagtgttcccgtctccaaaggtctctgacaccgtggttgaaccctacaatgccactctctctgttcatcaactagttgagaatgcggatgaatgcatggtccttgataacgaggcactctatgatatctgtttccgtacactcaagctcacaaatccaagttttggtgatctgaaccacttgatctcaacaacaatgagcggggtaacgtgctgcctccgcttccccgggcagctgaactccgacctccgcaaactcgccgtaaacctaatccctttccctcgcctccacttcttcatggtcggtttcgcgcccctcacatcccgcggctcccagcagtaccgctccctcaccatcccggaactcacccagcaaatgtgggacgcgcggaacatgatgtgcgccgccgatcctcggcacggcaggtacctgacggcgtccgccatgttccgcggcaagatgagcaccaaagaagtggaccagcagatgatcaacgtgcagaacaagaactcctcctacttcgtggagtggatccccaacaacgtcaagtccagcgtctgtgacatccctcccacgggcctctccatgtcctccaccttcatggggaactccacctccattcaggagatgtttcgccgcgtctccgagcagttcactgtcatgttcaagagaaaagccttcttgcattggtacactgccgagggaatggatgagatggagtttaccgaggctgagagcaacatgaatgacttggtggcagagtatcaacagtatcaagacgccgccgccagcgaagaaggcgagaacgagatcgatgacgaggaagccatggctgcatgagagcctcattaaagcctctccggaagaaattattatataatctagattaccacgtcatcatggtcgactcaattttcactgttacattaatcaaaatttttaatatacaataacaaattttgattagatgcaatgtgaagattgatcaaaattattactattt

SEQ ID NO: 13178 - DNA, 1366 bp, Glycine max
  Clone ID: JC-GMFL02220138E11_FLI
aaaatactaaaaaaaaaaaaactacacttcacccaccaaaccaaagcaaaagggaaagaggacgatcgggaaagagagtgtctttaatttcacagtttcatagcaattatcgccgaaaaatgcaaaatttccactcatatctctttgtttatgacatctaaaacatctatctactctctacccactttctcagttccaggtcagcaagagaaacagtacttatccatattacagggttatgtgaactgaagagggagggtactggtttgtggaggcagtgacacttttgcaagcttagaatcctctatcctagttttttgtgaaaacaaatagtgtgatgcttttggaggctccttttctcaaagcttgcgtgtagcactatctgcattttggtgataagttgaagtgtgggaaaaaatctaaagctaaagagagtttgggaagctggaacaatgggttctgtttgttgttgtttgagttttgatgattttgaagattatgtaaatccaaatagtcctgtatataggaactgcgtgtgtctcagttgcttgatacagaaccttttgagtgtgtattcgtcaatattccgtagaggggatgctcattcaattccttcgtctattcaaggggcagcatctataacttcagcagcatcactcgataattcactatctgacatgtaccgctctcctccaaggccattaccatatgatgcagaacccagatattttcgctcacaacgtgatggactagtttcaaggcgtgagaagggttcaagtcattcaaatgaggaaacagaacctctaagaagtgatgcagatctggatccagagtctttaaattcaggagacaaatggaatgaaagtgcctgtgaagctgggtcaaaggaataccattctaagtcctccctaagacttcaatcaacaaaatattcaactggagtgggccttgtctatgcatcatcagaggaggaggatgtttgtccaacttgtcttgaagaatacactaaagagaatccaaagataatgacaaaatgctctcatcattttcaccttggttgcatttatgagtggatggagagaagtgacaactgtccagtttgtggaaaggtgatggtattcgatgaaacgactttcacttgatttcaaggtttatgttgtggatgaagccagcaactgaggcatggaagaatacaagtatatagacattgtgaatactacagattaagtgtttgtcatgtatagtaagaatgaaaagtttccttaaccattgttgtgagttcattctaatcccgcttgtttttgtgttttaaaatttccacatgtccaaaactgtgaagaaagaaagaatatgcaattttagatgg

SEQ ID NO: 13179 - DNA, 1209 bp, Glycine max
  Clone ID: JC-GMFL02220139B11_FLI
ggcatatcaaccgcgttaactatatgttgcgttctgtatatgcttgtagcagcagttattgttggcttagtaccatattatgagttgaaccctgataccccaatctcctcagcattttctagctatgggatgcaatgggcagtgtaaggtatataataacaactggagctgttactgctctttttgccagtttgctgggttctgtgcttcctcagccacgcgtctttatggcaatggctagggatggtttattgcctcatttcttctcagacatccataaaggcacacagattcctttgaaaagcactattgtcactggtgtctttgcagctactcttgcattctttatggacgtttctcaattagcagggatggttagtgtgggaacactgcttgcatttaccactgttgcagtttcagttttgataatcagatatgtgccacctgatgagttgtttgaacagatgaacagaatgagaaagctaggcggaaacttgcttcatggaccatagcccttctatgtataggcattctcatagttaccagtgcggcttcagctgactggtgtcccaggattttgcgcttaacgttgtgcggaatgggtggtattcttcttttgtgcagtacaattgtactggcctgcgtaaagcaagatgatactaggcacagctttggacactcaggaggttttgcctgcccatttgttccattcttacctgctgcatgtattcttataaacacctacttactaatcgatcttggagttgctacatggctgcgagtttcggtatggatgttgataggagtacttgtatacttgttctatggccgcactcacagctcactgttgcatgcaatctatgttccctcagcatatgctgatgaaatccatcgatctcaagcaagtcatcttgcctagtatttgcacggcagctaccaaagttaccacacttcaggtctatatccatttgttacataattgtgacatattacattacatggcttacaccaatttgtaaatatcctattctaaaccaatgctttctttccgctatcagacggatgattactatgattatttatttgtttatttaaacaagtggccataaccggatgagtccatccttttacaaacttctccctatgaggcattaaccatgtatagtaaacatactcacgaaatactaaacaacatgcgcacaggtttat

SEQ ID NO: 13180 - DNA, 1196 bp, Glycine max
  Clone ID: JC-GMFL02220139G11_FLI
acatacatcaccaactgatatataatactagatttcttgcagtctattattagagagaagaattgagttggaagaacccagaaaaagaaacaaaaaataaataaaacgatgtggtggccattcagcagaataggatcttctgggttttcatcatattctactgccgaggaagttactcatggaatcgatggaagtggtctcactgctattgttacaggagcatctagtggtcttggtgctgagactgctcgtgtccttgctttgcgtggtgtccatgtgattatgggggtgatagatatgattggtgcaaaaactatcaaggaagcaatacttaaggagattcccatagctaaagttgatgtcatggagttagatcttagctctatgacatctattcggaattttgcatcaaatttcaattcatctggtctttcattgaatattttgataaacaatgcagggatttgtgcagctccttttgcactatccaaggataacattgaacttcaatttgccataaattacttaggccactttcttttaacaaatatgttgttggatactatgaagaaagcaacaagtgaaagtaagaaacaaggaagaattattaatgtctcctcaattggttatcgattcacgtatcgtgaaggaatcatttttgacaaaattaacgaccaatcaagttacaacaattggtgtgcatatggccaatcaaagcttgctaacattttacatgccaatgaactcgcaagacgtctcaaggaagatggaatagatattactgctaattctgttcatccaggagccactgtttccaccaatattcacattcatagtggtttattaaatggtttacacaaaatagcatggctatttggactcgagaagatattgggatatatggcaaaaaatgtgcagcaaggagcatcaacaacatgttatgtagccttgcacccacaagtgagtggaatcagcggcaagtattttgaagataataatcttgcagaagtatactcacatggaagggacatgaatttggccaagaagttgtgggattttagcataaatttgactaagtaaaatgcataatgataattgtcaatgtaaatggaatactgtattagagaataaaaatgccaatgatcatattgtgactgttattaagttaatctatatgatgttactatttttaagag

SEQ ID NO: 13181 - DNA, 1782 bp, Glycine max
  Clone ID: JC-GMFL02220141E06_FLI
cgctttctccttctctctctctctccctccctctctccccttctctccctctctttccttaaaaatttgaaattgatggggtccttcttctaccgctgagcctcaatataaatcatttgtgctgtgaatttgtttttcttcgccataacgagcgagatctagtcccaaattttggaaccctaaaatgggaattggggatctgcacgccgagctcgtcttttgtgtgtgctgtgtttggtttgtgaggaaatgtagggatcgtaatggcgttcagatcgtggggttttcgttttgcggcgattagatcgagcaagttccgatcttttttcactcgggaacggtgaatctggacttgtttgagcctgatttgagaatttgggttcgggaatcttagacattttcaatttttgttgaatttgtgattttggtatttttctcatttttcaattaaattgcatggtgttttgtctatctggaatttaatttccccgttgaagtgtttgtgttttattagttcatggtatatgttgcttgtttgtttaagattattttaatggtggacattgaaagaagaagcaaaggacatattttgaaactttatgatcctttgttttgtgttgtgtgtagttgtcatggatgatgatgtgttgaacatgcccaattggggttattatgaacccttcagggggggacatcttggtcttcagctcatgcctggaataactgaacgagacacaaagccatttttgcctggtcgtgatccggctatgctaatgggtgcaaatggaacttttcacccacgagattgcgctgtttcagaggcaccaatgccattgaactatgtcagagataattggataaacccgagagataggttttttaatatgcagcagcccacaaatcctagttatgctgttcttccagagacatcaggagctcctaacttgcaaattatacagccacctgattcgtcaagtgacgagaaagtggatagagtcgaagaggtagctgtcaaaaaggaaggtggccagtcaaagaaaaggcaaactaagggtgctctgtcgactccaaaagctaagaaacctaggaagccgaaggataatggcaatgctccagttcaacgtgcgaagccaccgaagaagactatggagcttgtgattaatggaattgatatggacatttctggtctacctactccggtttgttcatgcactggggctcctcagcagtgttataggtggggctgtggaggttggcaatcggcttgttgcaccacaaatgtgtcaatatatcctttgccaatgagcatgaaaaggcgtggtgcaaggatagctgggcggaaaatgagccaaggtgcttttaaaaaggttttagagaaacttgctgctgaaggttataactttgctaaccctattgatctgaagactcattgggccagacacggcaccaacaagtttgtcactatcaggtagataggtgctgttgagacgcatgacatttggtctgtttcacctgtatatacacctgtgtggtctttcacacagatgttgagttatttgttatccaagatttttctgttgtggtacttctacctaaaatttggatattccggttcttttgttctttttccctcttcggcttttatgtgataagggacaaccatgttgtatggcatcaacatttatgtagatgagttataactagatagactagctttggataattctccttcacattttaatttaaaattgttaagatttttcaatgctatgattttttgtg

SEQ ID NO: 13182 - DNA, 3030 bp, Glycine max
  Clone ID: JC-GMFL02220142B06_FLI
cggactacagctggtgttgttcagcagtttccaaacaatacatgtagtgtatatattacttactcgaaggaagaagaagcaattcgatgcattcaaaatgtgcatggattcgttttggagggtagacctttaagggcttgttttggaaccactaaatattgtcatgcatggctcagaaacatgccttgcagcaatccagattgtctatatcttcatgagattggctctcaagaggatagtttcacaaaagatgaaataatttcagcatacactagaagtcatgttcaacaaattactggtgctgcaaacaatatacaacgacaagcagggaatgtattgcctcctccattggatgattgcatggataattcatcaggaaaaccaattgtgaaaaattcatcaagtacctctgttagcattgtaagaagttcacctcctaatggaacttctgggagacctatagctctttctgcggttgcatggggtacacgggctacaaattgtcagccagctgctgatggtttattatgtccaaatggactgtccaggcctaaacctgatacaatcagcagcagcctacccttttcctctgctgttgcatgcacaattcaggcttcattaaatagtgatgtgacaaagaggccactgttgagtgatgggagtcgtagtatgacacctcaaataaaaaatgaattattgaaacctgttgaacaaaatagaagcatggatatcctggatagtgctggtgaaagaactttggtttctgatgtttctctttcagctgttaaattgaacaaccagttgtcttctctaccattagccggagatagtggtagaggcagctttactgcaactaacacaactagttcaattgacatcactcgacaaccattaagctttggtcctgaggaagcagttatatctacctgtgaagagattgagaatttgtcctgcgagttttcttctgtttacattgatagaaatgcccaaaataaacactacagcctatccatacctagcagctcacctgataatgtgttggttaaatctatgcaatctcaagaattgcagtataatactgacaaattgaaagatttaatgattaaaaatgcagacagtaaagctgctgcattatataatgaggtttgtaatttaaaggaacagtgtgatttgtcattggattctcaatctcaagtagtatcagctaatactgaagtggaagatgatgtaacaacttttgataatcagagacttaaggatccagaagttattggttcttatttgcccgagtcagccagtttccttcatgtctcaaatcattctagtcctcttcttctgcagcgtggtgacccatgtaatgttgtaaatgctggttttttagatgccaatgataaagttgaggataactcactattacatgcacataacatatgcaatggatattctgatgagatcagtaccagttcttattggttccgccatgatgcaagcaatgagcaccacattggaagattagttagtgatgcagttaatattggaagtgatgctgttatggacaagggtgagagtagtataatttcaaatatattatcgatggagtttgatgcctgggatgactcgctggcatcacatgagagtttgaccaagttgttgggtgacaacactgacagccagaatggtccgttaaaaaaatctagttctaggaaagttcaaagtaacaatcaatcaagattttcttttgcatggcaggaggaatccaaattccaagccaatgtacctccatcttctggtgctacccagccatttccaaagaatggctcactcatccaggattttgtggaaagagacttttctttgaacaagctgggttttgcaaatggcttcccctccaataacctcaaggaatctggaaatcttggcagtggtcatttcattgcttcaaacaataagctttcagctgtttcaagagcacaaatttcagcaccgccaggattctctgttccgaacagggcaccacctcctggtttctcttcagttgagagaatggggcaggcttttgactccctctctgggaattcattgctggacccttctttcttactgagaaattcttatcaaacaccctcaaatggaaatattggtggtccaggtgacgttgaatttatggatcctgctattttggcagttagtaaaggccctgaacagtttaactactttgaaaatgaggccagagttcaattattgatgcaaagatctccctcaccacagcaagaccttcgattttctgaaattgggaattccttttctcagtttggtgattcttatggcatttcttcaaggttaaatcaatcacaagttagtaatctggcttcatttcctcagttatctctgcagcagtctagaaatgcagtcttgtcaaatggccaattggatgggcggaatggaaatggtctgggtgtggcagagcttttgagaaatgaaagacttggatttaacaagttttatagaggatatgatgattcaaaatatcggatgcctaattctatggatgtgttcaacaggacatttgggatttgagattgttgggtatattggccatggtaaagccaagtcagaaataaacaaacagaatttttctgcattgccaaaggtgatggggatggctcatgacataacctgtctattgggctacgaaaggatgaaactctcgcttatagctgcagctggttactgttcttgatttgcagaagcaagctgcgttgagatttaagaaatcaatcatggatcggaaagtatttggcaggtagatcttagttgagtggtttctcttagtacagaacatggaaacctgttgatcgatcgactatcaaataatctctcctattttgttaatgatattttttcttttaccgatattgtggatatagatagaggtttgattattttttaatatgtatattttgtatgaaatacgtcactttttaaagttggaaatcccttctgatatgtgtatgaaagagatcttttact

SEQ ID NO: 13183 - DNA, 1586 bp, Glycine max
  Clone ID: JC-GMFL02220144A02_FLI
atttgaaattaacaagtagcaaagatgtttggaatcatcggaggaaacaagggtcacaagataaaggggaacttggtgattatgcgaaagaatgtgttggatatcaacagcattaccagtgttaagggtgtcatcggaaccggcattaacatcattggaggagtcgtcgacaccgttactgctttggcgtcccacatctccatccagctcattccatatttgaggaaaataaatgcaactaccacaaagacttacgctacaagaaccatatttttcttgaaaagtgatggaaccttgacgccattggccattgagttaagtaagccgcatcctcagggtgaaggatatggtcctgttagcgaagtctacgtgccttcgagcgagggagttgaagcttacatttggttactggcaaaggcttatgttgttgtgaatgattcgtgctaccatcaactcgtcagccactggctaaacactcatgcggttgttgagccattcgtcatagcaacaaacaggcatctgagcgtggttcaccctatttacaaacttttgtttcctcactatcgtgacaccatgaacattaattcacttgcccgcaaatccttggtcaatgcagacggtattatagagaaaacattcttgtggggtaggtactctttggaaatgtctgctgttatttacaaggatccatctgctccccatggagttcggcttttgattgaggactatccttatgcttctgatgggctagagatatgggatgccatcaagtcctgggtgcatgaatatgtctcattctactacaagtcagatgcagcaattcaacaagatcccgagctccaagcttggtggaaagaacttgtccaagtgggtcatggtgatttgaaagataagccatggtggcaaaagatgcaaactcgtgaagagttgattgaagcctcggctaccctcgtatggatcgcttcagcccttcatgcagctgttaactttggacagtatccatatggaggtttaatcctaaacaggccaaccattagcaggagattcatgcctgagaaagggtctgctgagtatgcagctttggctaagaaccctgagaaggagtttttgaagactattactggcaagaaggagaccctcattgaccttacaattatagaaatcttgtcaaggcacacatctgatgagttctaccttggggagagagatggtggtgactattggacttctgatgctggtccactagaggccttcaagaggtttggaaagaagcttcaagagattgaacaaaagtttatacagaagaacaaggacgagacgttgagaaaccgcagtgggccggctaaaatgccttacactttgctctatccttctagtgaggagggattgactttcagaggaattcccaacagtatctccatctaggggctctatggttgttgcagtactttccctggttttcaataaaagtgaatagaaggaatatgattccttcatctacctatgtatggttaagttatgtatttggggtgattgaatgttctcgtgtttgctgttaagtgttaatgaagaaattctgtttgtat

SEQ ID NO: 13184 - DNA, 1826 bp, Glycine max
  Clone ID: JC-GMFL02220144A07_FLI
gaattcctcgcatgaagctctaactcaaagttttcagttggctttttccttaaggaacatttctctcaatgaaaatgtaaagctgcaaccatcacgccgcagatctctctttacactggcaacatccatgattatcttcgcatccaaggcctacaacatcctctctctaatttctattgctaaaacgacattgacagatagaacagttgatccattcctgcaactggttaatgatagcaagttacaagcggttactgatacagataagcagccaagtaaagtttatggatcaaaagaggatgatgaagatgctttaaagtcactttcagcaataaagttaactgagagccagtctaaagaatcatttgctaccatgatagtgcagagtctgggaaaatcgtctaatgaatcatccatcttaagagaacggctgctgaatgatttctcacctgatgatgcctgtcctttgggagcccagttatctgccgagacaacaggaaatatgtaccagtctggactaaaagaagataaacttcctgatatggttgatatttcattatttactattgacgatgacattccaccttgtggtttggagagccaagctaattctgattcaatgcaacagccctcacaaaatctaagcctgctgagtgttgatgacattttgggttcagtttcggagacaacacatcaagtaggacggatttctatttcaacaccgtttgacatgccttacaaggaaatggctctccattgtgaggccctcctcgtgggaaagcagcagaagatgtccactttcatgggtacccttccaatgcaaggatattcatttaggattcctgctcctgaatactaccagcaaaaggacgagtcctcaaattccagcgttcaacagactttatcttcgagtggaaatccgtttttggattcaaacttcgactcgaattcacacaacacattgcctgacactgctccaaggctttgtgcaacagcataccagcatcaggctgccttctttcaactgccagcatcacgcccgtatgataatttcttgaaagcagccggatgttgattcatggcagaaaagatggtgattctcatagttgagcttcttgataaaactttcctcacattagttgatatagaagatgctcggaatagttgcactagctgctttcttgaccatgaatttatggttggatcagtgtctttttaggggcaacaattatcgatcagcctgttcactgaattatatttcttcattgatttgcttcctgcaaggaggcgtatcttttattggcatccttgcaaatttttcagagctgtttttatgtgcataggtcatgcaaatgtgtacgtcacattttttcttttttctttccttccttccttcattgttctttaatttcccattccattattggggtgtgagaattttgtaaagacaaattcttttaggcggagattccaatctgcaaatcgatcaaatcaaaccacatggaaggattgctatgaccttgaacttgatcattccatgaatcagttttgctcctgaaaggaagtgttgagaggatgttatggtttagtagagctctcttgctctggtttacgttccctgttagagcatgcagaacttgcatacaccgccgggatagtccaatccattaaaatattgaaattcagcacaagggatccatgttgttgggaacttgaatcatagtaatcatgtaaaagaaatgcaaagcattttcttgtgtttatagctatctttaaaaactgtcgtgttactacaataaaaaaataaataaaaaatattgtgtttt

SEQ ID NO: 13185 - DNA, 1415 bp, Glycine max
  Clone ID: JC-GMFL02220144D01_FLI
gtttgcttatgtatttatcatgttcttcccatattaatatatgcaggttgatatttgtacctcattaccaattgtcaataataagtgctatgcatattcaaatgtcagatgtttacccaaactctgctacatactgtgcatttgtgtttaatattttaaagttctctctctcttccctgttatcttgtctagagtgaaataatggaattttgatttatttgaagaaaaggaaagaaagggggctatgagtaagtaacaaatagttaatttaccgagtttcaacaggtgtaccttttggttcatacaaatgaagtaaagctgaaggactggcagagaactaaaattgaaatgatgcaaaaagctaaagctaataaggaatttgaggcaaaagaatcacatggggatcctcaaatatcttcaagggggagttcacctgattcctcacttggtacaaaaagtagtggactggaaatagactcaaaccagaataagtcaattatggatcaagggtttgaaatttattctagtgctgaaggtaatacggccaattgtaaacttccattcaatcaaaatggagacgtctctgagaaaacacatcctggagttctttgggatgtttttcgtcggcaggatgttccaatattgactaaatatttgaaaatacattggaaggaatttgggaagtcagatgatcttggaaatgaatttgttgaatggcctctttatgatggagctatttttcttgacaaacaccataaaagaaagttgaaggaagaatttggagtggagccttggtcatttgaacagaatttgggggaagctatttttgttcctgctggttgccctttccaagcaaggaatgttcagtccaatgttcagttaggccttgatttcttatctccggaaagcgtgggtgatgctgtaagattggcagaggaaattcgctgtgtacctaatgaacatgaagcaaagcttcaagttttggaggttgggaagatctccctttatgcagcaagttcagccatcaaagaagttcaaaaacttgtacttgacccaaaacttggcgcccagatcggttatggagatcctaatttgactgcaatggtttccgagaattatgagaagatggttaagcggaggcagattacttgtgcttgaacttccacactcggtcattgaatccggaaagaggggggattgtgtacattagttgtatttgagcaatattttatgggttggtattttcagtgtagttttgatcaaatacctaggtaatcatttaaatgtgtataatagttacgttagagaatcatgtaatgaccaacttcaaatctgattttatttcaaaatgtggaaaagaaacaatgtaatatatacaaagctaaaaatttgtgtctgctgccctttaagttaag

SEQ ID NO: 13186 - DNA, 1046 bp, Glycine max
  Clone ID: JC-GMFL02220144F01_FLI
ggaaattggaagcaaaacctaaggaatcagggttgaacaaggtgtccatgaaagtgacaaaaggggtgtctgagactgataaaaattcatgtgtgattgatataaaccgtggcagctgtgatggctttagcgagaatttggaaggtgaaatgatttgtaggatttgccatctggcctctgggcaacgattggaagcagcagatgttggcactgcaagtagtgctactactaatacagatttgattcagctcggttgtgcatgtaaagatgagctagggattgtgcatagtcattgtgctgaggcatggttcaagcttaaaggaaacaggttgtgtgaaatatgtggtgagactgcaaaaaatgtttcggatgttacggataatggatttattgaagagtggaatgatactagattcatggacagtgataatacctcatccagaaggtttggtggatgcttgtgcggacaaccattttgtaacttcttaatggcatgcctggtaatagcttttgttctgccatggttcttccgtgtaaatatgttctagtggaggagtcaaacactattctttccttcaaatcttcatccctgcctaaatgatgagtgcatcattggttccttgcatattctttttctgaaggggtggtaatgcttaaccatgaccaacttcacatttctcagggtatgtagttccctgaagccttgaaatttggttgtaaagaaacttaccaacttggcaagttatggccaaattgtttcccaattgcattcttttgattggagtgcgtgtggcgtactgagatatatatataactgcgggattcaatttatgaaggagtaaagcaaagaagatattgtacttgtggcataaatgctaagttagaaacagtacattattcgctgtaaaacaatcaaacataaagagcctctccttgattttccttctctctttttcgttttttcacctttttctttctttctttaataatctctgtacacttgtctgctaatataaagttcaaagaatccaatgtcatttgttgtc

SEQ ID NO: 13187 - DNA, 1597 bp, Glycine max
  Clone ID: JC-GMFL02220146E12_FLI
gtttacacactgacacactccttcatccaactccaacagaacaagaaaacatagtacacaccacacagtgaaaaagagagaaactccatcttctttctttctttctcactcaccacagaacacaaaaaaacatttccaaatttcaggtttgggaaatgcacgaaacacattccatcggcggcggcaggttctacggcggcggcgaccggaggctgaggccgcaccaccagcagcagcagccgccgccgctaaagtgcccacgttgtgactcactcaacaccaagttctgttactacaacaactacaacctttcccagccgcgccatttctgcaagaactgccgccgctactggaccaagggtggcgtcctccgcaacgtccccgtcggtggcggttgccggaaatctaaacgctccaacaaacccaaaacaaccaccaccaccaccaccagcaacactaataacaaccgttcttctttctcggcaaccgcaccggccaccgcaccaacgccaccggcaccagagctggagcatcattctcattctcactccagcagtgaaagctccactttaaccgtgaccgcgacggaggagatgtcggcgccgccgccgacgacatcaaacgctccgtcgaagaacagtttattacttgacaacgaccaccgtgaggcgaagatgttcgctaaccctaaccctaacccctctttggatagtggtggcattttctctgagataggaaacttcaccagcctcatcaatttaaacaacaacgaagcgtttgggtttgggaacaataaaaataacaacagcatcctcgatgcgacgtcgtttcgtttcggtattagtgttactaatcaggtgcaggcggcagcaggtggaggccatggtcagtggcagcagcagaatcatcaggagttcggtacggcgtcgtttctcgatcacactgtgccgcttgagttttcttcgctgcagcataagactgggcatcagggagggtttggatcgttggattggcaacccggtgcggatcaaggtttgtttgatcttcctaacaccgttgatcagccttactggacccacgctcattggtctgatcaagataatacttcttctctctttcatcttccttgaaaatacttaagaaatttctctcttttttctttttgttttttatgacctgagagggaaagagtaaagaatatctggaatctaaaccaaagtataaagaaataaaaataaaaattgaaagagaacctggaaggaactcgtaattaagatatgtaaatttttggttttttacttttctgttttttcggagaggtgattgggcttgatcataagtagtgatgttcatgtgcaactaacatccatgttagtttttttttcttttttatgttttattttatgtatgtatttggaatttgatttattagggggggaaacataggagcggtgttttatattaatatatagtggggattggtgctataacaattgtttgttgttttgttgggtgtttgggattgtaatcttattttggcgtgtttgagatgctatttcatccgcactattaatggctaagaatttgaaaatgacgc

SEQ ID NO: 13188 - DNA, 1817 bp, Glycine max
  Clone ID: jC-gmfl02220146h05_FLI
ggctcgagtctgtttccaattcaagctcttcagcagtagtcatcggagacgggtcagaagaagagtacgaggaggaagaagaagatgaagaaggtgttggtgttggtggtggaagaagtatgaagaaacgtagcagcaagattttcgggttctctgtgacccaaaatgaagaagagtccatggacagtgaccatccacctgtgactagacaattttttccggtggaagatgctgacgtggcggttgcaaccggtggtggtggaaccggtgtaagctcaacgttccctcgtgctcactgggtaggtgtgaaattttgccaatcagaaacacttggcaccggaaaatcatcagtggaagtttctcagcctatgaagaagagtcgccgaggaccgaggtcaaggagctctcagtatagaggagtcaccttctacagaagaacgggtcgctgggagtctcatatatgggattgtggaaaacaagtgtatctaggtggatttgacacagcacatgcggctgctcgtgcatatgatagagcggctattaaattccgaggagtggaggcggacattaacttcaacattgaagattatgaagatgacttgaagcagatgagcaatcttaccaaggaagagttcgtgcacgtgcttcgccgacaaagcactggatttccgagagggagttccaagtatcgaggtgtcactttgcacaagtgtggaagatgggaggctcgaatgggccaatttttagggaaaaagtacgtttatttgggtctcttcgacactgagatcgaagctgcaagggcttatgacaaagctgccataaaatgcaacggcaaagaggcggtaacaaattttgatcccagcatctatgacaatgagctcaattccgaatccacaggtaacgctccagatcacaatctggatttaagtttgggcaattcaacttcaaaccctggcaacgatcaagcgttggggaatcaagccccaaatgctgtaacccatgatcagcacatgccatctgagtctaattggcgtaatgggggaatcaagcctaagctggtgaatatactcccaaaaccatgttacagaagcaacaacaaggacacacatggaagggatgtgcacggggagagtgaaacactgaggatgctaagtcaaacccaccttcattctccagccttcaatgaaatgcaacaaagatatggtccctacaggtctccgggaggagagtctcaaatgcttcaaaattttgcgcacattcacccaccaaattttcattttcccagaagcagcattggaggccgaattgggagtgatctttcattatcagtggctgatcaacaacagtggcaaaccgggccttcacgttatttagcaactgctgcagcatcatcaagtttccaacaagagataagaccctcttctcaaggttggctgcagaaaaatgggctccacagtctcatgagaccctcatgatccctattataaatagagaattttctgcctcgccaagtactagttacattcaaataatcgtaatctgctccctaagtaatattattattgttacccttccagggtttcacccccaaaaaattattattttcttttcttagcatgtaaaataggatgcagtgttagattgtgtccatgtccaacccagacccctcgtcacacaaggccacaactttactattgaggtgaaaaagaaaaggataaaagaaaagaaaaaaaaaaagaagagaaaatccaaattgggaacttactactggtctggggtcagtcaaactaacaaacggacgaaatctttaactagat

SEQ ID NO: 13189 - DNA, 2226 bp, Glycine max
  Clone ID: JC-GMFL02220148F08_FLI
gaagaaagcagcgattttgaagtctctccaaaccattatggttgtcttcctgctgatagtactctttagcagcaacaccaaagcagaaaaagaaacaatccacgaccatgcaaacaaaaagacctacataatccacatggacgagaccaccatgcccttaaccttcaccgaccacctcagctggttcgacgcctccctcaaatcagcgtccccctccgcggagattctctacacttacaaacacgtggcccatggcttctccgccagactcactcccaaggacgtagacacacttgcaaaacaacccggcatcctctccgtcatccccgaactcaaatacaaactccacaccacaagaactcccaacttccttggacttgacaaagccaccaccttgtacccgaagctagcctcttcggcttggcgtcgggtacggcgcgtggaatggccacacaagcgcgtgtggcggtttacaaagtgtgctggctcggcgggtgttttacttccgacatagccgcgggaatcgacaaggccatagaagacggcgtgaatgttctgtccatgtccattgggggaagcttgatggagtattacagggatataatagcgattggatccttcactgccatgtcacacgggattctggtgtccacgtcagcggggaacggtgggcccagtcagggaagtttgtccaacgtggcaccgtggataacaactgtgggagcgggaactatcgaccgcgatttccctgcttacataaccctcggaacagggaaaacatacaccggagcttctctttatagcggtaaacccttgtcggattcgccgcttcctcttgtttacgctgggaacgcgagtaactcttctgtagggtatctatgtttgcaagattctctgattcctgagaaagtttcagggaaaattgttatatgtgagagaggtgggaatccgagagtggaaaagggtttggtggttaagcttgctggaggtgctggaatgatattggcgaatagtgaagcctacggagaagagttagttgctgactctcatcttcttcctgctgcgtctttgggacaaaaatcaagcgagattttgaagaactatgtttcatcttcacctaatccaacagctaagattgctttcttagggacccatttgcaggttcaaccttctcctgttgtagcggcttttagctccagaggaccaaatgcactcaccccaaagattctcaaaccggatctaatagcaccaggagtcaacattttagccggttggaccggtgcggttggaccaactgggttgactgttgacacccgccatgtcagcttcaacataatttctggaacatccatgtcatgccctcatgtaagtggcttagccgcaattctcaaaggagcacaccctcagtggagccctgccgccatcaggtccgcactcatgacaacagcgtacacgagttataaaaacggtgaaacgattcaagatatttcaacaggacaacctgggacgccgtttgattacggtgccggacacgtcgatcccgtggccgctcttgatcctggtctcgtctacgatgccaacgtggacgattacttagggtttttctgcgcactaaactactcgtcatttcaaatcaagcttgctgcgaggagggactatacgtgtgacccgaagaaggattacagagtggaggattttaattatccttcttttgcggttcctatggatacagcttcggggattgggggaggttccgatactctgaagaccgtgaagtactctagggttttgactaacgtgggagctccgggaacgtacaaagcttcggtgatgtcgttgggggattcgaatgtgaagactgtggtggaaccgaatacgttgagtttcacggaattgtacgagaagaaggactatacggtgtcgtttacatacacttcgatgccgtctgggacgaccagcttcgcacgtttggaatggacggatgggaagcataaggttggtagtccaattgcgttcagctggacatgatgggctgtggaaaatgtatgacccaaataaaagggcccactcaagtgttgtaggctcttcgtggtttgcttttgggcccggcccgatacggcttgtttttattatgtatctcacttattcactttgctgtttttattccgtaggctgaagttcaggagaaaactttatatatggaataataacaataattgtacatag

SEQ ID NO: 13190 - DNA, 2237 bp, Glycine max
  Clone ID: jC-gmfl02220148g09_FLI
ggctcgaggcctcccatttgcggcaatgcaaatgcacctcctctttccctcattaattgaaatcgctgccccagatcgtgcaagtgaagaagctgctagctattagctatggctagaggaaagatccagatcaagaggatagagaacaacaccaaccgccaggtcacttactctaaacgacggaatggccttttcaagaaggccaacgagcttaccgttctctgcgatgccaaggtttctattattatgttctccagcactggaaaactccaccagtacatcagcccctccacctcaacaaagcagttcttcgatcaataccagatgactctgggagttgatctctggaactctcattacgagaatatgcaagagaacttgaagaaactgaaagaggtgaataggaatcttcgtaaggagattaggcagagaatgggagattgtctgaacgagctgggcatggaagatctcaagctccttgaggaagaaatggacaaggccgccaaggttgttcgtgagcgtaaggtttgattaattatatgttcctatttatacactagtttttgcttttctctcacaagtatatatatatatatatatatatatatatgtatgcgtacagcgcattaagaacttgatattgtttgagatatagagacatatcaagatgaaacggattaacattcatcacatcattactaattggttaactaactggcaaatatggaatttttttacggaaacataattttttaaaatttttcaaagagtagtatcaggactagctagtacattcctatcttttgctttacatgagcaagcaggctagctaccctgtgcatgctatttgaaaacaagagtaaagatcttaaattttgtacataaaaacttgtttgtgctgtgtctgcagcacttatttggttagcgatgtctaacttttgctcaaatttggggaccccccttcgttctttaggattcattgcctgtgacacataatgtttggttttgaggaacaacacatgggtctaagatattattggaaactatatgtttttaattaaatatataaaattagatattctacaaaatttgcttgttttctgggtagaatttctttcgatctatcggtgaaggcgtatcatgtagatctgtgttctattgaatttgctcaatttagcatatttatcattaatgaattcttttgcttatatcaaaaattaaaaaagaaatgtagatctgtgttcttttttccagttcgcttatttggagcaagagcagttcaatttttaatcatttatatggacatatcgatcctctggataactgaattttaatctgcttgtttgtccacgttaacatgtctctagtatatatgttgcagaaaaaataaaagtattggatggtatgaaacatttttttttctaaaaaaggcattgctaacaaaggatattaaaatgctgttgaacatgattaaaatgtttatatttaaattaattttagtgcaaattttataatgaaacgtgttcaagaaattaatttggttgtttaaaggaacccttagtggttgaagatttcgaacttaccataccttaccatgttaacaagtttcttaattttgacaattattgacagtataaggtgataacaaatcagattgacacccagaggaaaaaggtaaaaatagtgaacgtgtttccgctctcattattttcttaatttgatggttattttcgatcacttcatttgattattgaaatttctgtaaattttgtagtttaataacgagaaagaagtgcacaacaggctcctgcatgacttggatgcaaaagcagaagatccacgttttgcattgatagataatggaggggagtatgagtctgtgatcggattctcaaatttaggtccacgcatgttcgcattgagcatacaaccaagccatcctagtgcccatagcggaggagcaggctctgatcttaccacttaccctttacttttctagtacgcaattgcttaagctctctccatcagaaataccatattcactcaaatttcaataagaatgacttgttgcagtttgtacttaaccacaaaacaatctcacgaatcttctccgtggaacgcatgtgtgaattattcaattgcaactactgttatctgtattttctttttgcctaatcatataccataaacatgaagttgtgcttccttttattgagaatgctttagcatgcatgatt

SEQ ID NO: 13191 - DNA, 1199 bp, Glycine max
  Clone ID: JC-GMLE01810005E06_FLI
agcgtgggatttagaaccttggtattataaaggaaagcttgcgttcccccagtattacatctcccatttcgagtctatcatcttccttctcgtcattcttcgtttcaacctcgcaaaatgagcacatttgctacaagatcccttgtttctgtagaatcaacaacaacaattgaaggaactgaagctgacaatgtggatagtgactcactgttccgagggtgcgtgttggaagggagatgggacttcgttcttacagcatatagaaatgacagtaactatcacaaaataaaaatcaacgaaagcagaggcacagcactacacgtggcagtgaatgatggcaaagtggaacttgttaacacccttgttgttgcaatcttaaaccacgaagggagggaagtgctgagggatgatagtgcactgaaaacaaccaatgagagaggggacacccctttgcaccttgcatcctcaagagggttcattggaatgtgtaagtgcatcataggggagcttaaggaaaggaaggatttgattagggttaggaacaataagggtgaaacacctctcttccgggctgtgctcacatgccatacaaagacctttgtgtacctccatcatgtttccaaagatatagatgttccacttaggaactatgatggggataccatccttcaccatgccatttggagagaattcttggatttagcaattataataattcattgctatcctggacttgttgagatgcgaaacaaagatggagccactcctctcaaagttcttgcctgtaagccttcggccttcaggagtggaatcaatctcccatggtggaagaaaattctttattatggtaagtgttgcgtgcgtggtggctgagctcataagatttttcttcttctgttttttacaaaaatggaattaaatttcaggggtggctcaaccctaaagtaatattccaaacacagaaacacttgctttagtttcctcgacaaaattctcttataattattcccttaaaaaatgtttcatacgtaaaaaatctcttaaaatttaagtccaatttaaattgacttttttttttatcatttacatattaattatcgatcttactattttcttaaaaaaattattttgttgtattgcttccttccatgaatgtaaactagtctacttttccattaatttattctcattatcccact

SEQ ID NO: 13192 - DNA, 550 bp, Glycine max
  Clone ID: JC-GMLE01810005G10_FLI
cttcaatttcatctttcttcacccgaaaatggaaaaggagcgacccgcatcatggagacccgacccgtttcacgcacggccgccgccgcgcgaccccatggagttcctgtcccggtcatggagcgcctccgccctcgaagtttccaaggcactgtcgtctcaacagcttccaccttcatccaacaacaacgttgtttgttatgttaataattctaatgcgtctataatactcgaagacatagctggtgaagtggaagagtctgctgcaactgtttctggcaaccctttctccttcgcatcctctgaaacctctcagatgatcatggaccgcatcatgtcccacttctttggtcagcaggaggtatcaccacgcacctcaggaagactctctcacagcagtggccctcttaatggctccctaacagatagccctccggtttctccttctgaaattgacgatttcaagtataaccgttccaacaacaaccacaacactgtcaacatgattaccggcttgaatggtcaatactggggtgccggcggcgcagct

SEQ ID NO: 13193 - DNA, 1040 bp, Glycine max
  Clone ID: JC-GMLE01810006B02_FLI
ctggtttatgggttgaagtctggttcaggatttgtgggggaagagaagagcactcacaccatatccattatcaatggacttggccgcgaagcttcaccacttagacctgaccggcgtggtcattttggacgcccgaaagccctccgcactccgccaccttccgccacgcgttctcagcagaacaaacaccaacaccaatttgatttacacgaaccggttctcgggcccaccgaggcccaattccgcttcctcaacgggcctgtccatgataaccgtcgaggacgatatcgagtctcttttctccgagacgaactcggaggaggagcggcgcgtgaggaagcaacctagcattggggcgtcggggatttcctccggggtgaagctcgaaaacgtggggaaagcctacaagggcgtgacggtgctgaaggacgtgagctgggaggtgaagaagggggagaaggtgggcctggtcggcgtgaacggcgccgggaagacgacgcagatgaggataatcgcgggccttgaggagccggatttcgggaacgtggtgaaggcgaaggcgaacatgaaaatcgcgtttctgaaccaggagttcgaggtggcgccgagcaggacggtgagggaggagttcatgaacgcattcaaggaggagatggaggtggcagggaagctggagaaggtgcagaaggcgctcgagggtgccgttaatgatttggagctcatggggaggctcttggatgagttcgatttgcttcagaggagggcgcagaatgtgaacttggatgaggttgatgccaagattagtaagttgatgcctgagcttggttttgctcctgaggattctgataggctggtcgcgtctttcagtggaggctggcagatgaggatgtgtctcggcaagattctacttcaggtgtgttaatgcttcatgttggattgtcctgaatcatcttgaaatatcagctaatgttatttcaagtaaatgttcacatgtttgttttcatgttgaggaattacttcaattgattttgagttgagct

SEQ ID NO: 13194 - DNA, 1058 bp, Glycine max
  Clone ID: JC-GMLE01810006F06_FLI
gaagaccctgtccccgaggccgaaggcactatcaacgacagcgacgtctctcagctcaagaaggccatcctcaacttgggtgtcgacaacagcaagcttatcaggaccgctttcgccagcgcttccacattccgtggtggcgacaagcgtggtggtgccaacggcgctcgtattcgtctcgagccgcagaagaactgggaggtcaacaacccacgtgagctcagcgaggtgctctccgctctggagaaggtccagaaggacttcaacggctcgaacaagaaggtctctatggccgacttgatcgtccttgctggtgtcgctgctttggagaaggcgtccggcgcatccgtgccattcacacctggtcgcaccgacgctacccaggaacagactgacgccaagtcgttcgagcacctcgagcctttcgccgacggcttccgcaactacggccacggtactgaccgcgtccgcaccgagcacatgctcatcgacagggcggagctgcttactctgaacgtccccgagactgtcgtcctgctcggcggtctgcgcgctctcaacgccaactgggacggcagcaacaagggtgtcctcaccaagaaccccggcaagctgaccaacgagttcttcgtgaccctcctcgacccctccgtctcgtggcgcgcgaccgacagcaacaaggagacctttgagggcgagaaccgcaagactggccagaagtggaccgccggccgccccgacctcgtcctcggctcgcaccccgagctccgcgccaccgctgaggtgtacggcagctcggacgcccaggacaagttcgtcaaggactttgtcgctgtgtggaacaaggtcatgaacctcgaccgtttcgacctgcagggctctacccagccccagagcgctcgcttgtagactgggcgtgggttgagggcgtgaagcgtcattcgggttttttttttggcctggctagatttgcaagtatgggatggctggctgggttgtagctaggattctgtgtttttttccgagtaaatgtttgaaatgaagcatgattatacgag

SEQ ID NO: 13195 - DNA, 365 bp, Glycine max
  Clone ID: jC-gmle01810006h04_FLI
aaggattggtaccatcctgcttgcgtgggcatgactattgaagaagcaaagaaattggaccattttgtttgttcagaatgttcatctgatgatgacatgaagaaaccccaggctacatttcctgtatcaccaggatctgatggcaaggttgagccgaagcggcggaagagatgaccatcatgctgaattaactcatcttgcgaatgcacctcttgctgaatttcacgggctatgtggtagctgttgtgggtgtattgtacagcttctaccagaggctataaacatcattttatgtatttgactccggctatgtatgtattcgtcttagatttatgacagacattgatctgtttcccttgtgtctc

SEQ ID NO: 13196 - DNA, 1281 bp, Glycine max
  Clone ID: JC-GMLE01810008B06_FLI
ggaaaacgtgaggggacggaaggtcgtgttgtctgggattggggttgcgatttgcgaccttagcgataatttgatattcgaggtttctaagtcgctcattggaaatggcactagcaaggtcgctgcggagattaaggctttgatcgaggctttcaatgccgccattgctttggacttgaagcgcgtcgtttattgctgcgattattatccccttttccaatttgtgagtggaaaatggcctgcaaaacagcggaagattgctattttggttgatcaagtgaatctgcttcaaaggaagttttcatactgcaatccaaggtttgtggccagacatgatgtcaagtttgcatttaagcttgcaagagatgcaattgaatctcagtccacaagacttgcagaatctgggagtaggagtttgaatgaaacttgtgtcatatgtttggaggaaactgatgttggtcagattttttcagttgatggctgtcaacaccgctattgcttctcatgcatgaaacagcatgtggaggtgaagttgcttcatggaatggtgccaaagtgccctcatcaggggtgcaagtatgagctcctagttgacagctgccagaagttcttgactcaaaagttaaccgagaccatgcagcaacgaaaattggaagcttcaattcctgttgctgaaaaaatttattgtccttatcctacgtgctctgcattaatgtcaaaaactgaggtcttagagtactccaaagatatcactggtcaatctgaacaatctgaacccaagatatgcctaaaatgtcgtggccttttctgttttaactgcaaggtcccttggcatagtggtatgacatgtaatacttacaaaaggatgaatcctattcctcctgcagaagatttgaagctgaagtttctggcatcaaggagcctatggcaacagtgtctgaagtgtaaccatatgattgaacttgctgaaggttgctatcacatgacttgcagatgcggttacgaattttgctataactgtggagcagagtggaaggacaaaaaagcaacatgtgcttgccctctttgggccgaggagaatatttggttagatgatcatgaggaagagttggaagaagaagaagaagatgatgatgatgattatgatgattataggtctgattatcctgatgattattattattaagtatctggccgcttgaccaggttgacggttttacaactagtaaatattcatattcatatatctatatatatgtaagcaaaatgtgattgtctttt

SEQ ID NO: 13197 - DNA, 927 bp, Glycine max
  Clone ID: JC-GMLE01810009A04_FLI
ccagttactaaaaagggctactggcagattgaaatgggagatttttttattggaggtctctcaacaggtgtttgtgagggtggctgtgctgctattgtggattcaggaacatctttgcttgctggtccaactactgttgtaactgaaatcaatcatgctattggagctgaaggagttctaagtgtagaatgtaaggaagttgtttctgaatatggagaattgttatgggatctcttggtatcaggggtacgacctgatgatgtatgctcacaggttggtttatgtttcaaaagggctaaatcagagagcaatggaattgagatggtgaccgaaaagggacaaagagagttatcagctaaagatactgctttgtgcacttcctgtcagatgcttgtggtttggattcagaatcaactaaaacaaaagaagaccaaggagatagtattcaactatgtaaatcagctgtgcgagagcttgccaagtccaaatggagagtcagtagtagactgtaatagcatttatggattgccaaacatcacgtttactgttggagacaaacctttcaccctcacccctgagcagtatattctgaaaactggagaaggcattgcagaagtttgccttagtgggtttattgcttttgacattcctcctcctcgaggtcctctctggattcttggcgatgttttcatgagggtatatcacaccgtctttgactatgggaacctccgagttggtttcgccaaagctgcctaacaagacatctaggagattatatagggcatgttttaataagcttgttagtgtgttgtaaataagctttctgtaactactatggcacaggtttacattatagatctcaagaatgtacttgtgaaactatgcaccttgatgtattgtgttgtatttgaagggaccattttcatt

SEQ ID NO: 13198 - DNA, 863 bp, Glycine max
  Clone ID: JC-GMLE01810009B03_FLI
gaattaacttgcatcatgagaaaattcattaagttttaaaggtctttgatatttgaattaaattgacgtttttactatatgtaggaagcttattggagcaagatatttctacaaaggttatgaggcaaatgcaggtacaaaactgaatgcctcagagcttagtgtacgtgactatgaacgtagctggttcacatactttatcaaccgcaggtggtaactttgttcctggagctagtgtatttggcttcggcaatggaattgcaagtgcttgaggattatgtaaccaaatgacgctgagctggcaatcctcttctagaagcagaatccaggaattcccctgtgccgttagaggctgtctccatgattagcgcaatgtttattttcctccaaggcatataatgtcaaattctgttagaatatgtatctagaatgtgcactggaatatctacatatatgaggatatgtaattcttatagaggcaataaaacagttttatccttaccttcttctctgctatggaggtcctagacctcgaatcctaggttagctctgtagtctacaacatgcagcctaaggcatgttggccagctacgttcggtggtggatgtttagatgcagacattttggctactttttaggctgccataagtaacggcattaacgcgatttaggtgtcgttgggttcagatattgcatcggaatgtttctaagatgctacttcaatagggtccttccatgcagttgccaacgacataacagtagtggcttctggaggaaattcaggaccttctcctggaactgtatccaacaacgaaccttggatgctcacagttgcagcaagcacaattgatagagacttcgct

SEQ ID NO: 13199 - DNA, 1548 bp, Glycine max
  Clone ID: jC-gmle01810009c08_FLI
cttgtttctctctcttcaatggccgagccccactccaccgccgcgattcttcctccctccaccgcccggttggaggaaactccgtccgggagctctcagactcccctccgctccggaagaggcggctggagtattgtcgatggctccttcgccattgttagggacaatacctgctcctgcttcgtcgtcgtcttcagcttgtggttcttcgtgtcgatgactatgatactgggggtttatgggtccatgaccatcgtgctgggtccaaaatcttcaattgttttccaacctagtcccgtgttcgttcaatctgtgaaggtagaaaacttaaaggcaaaccctggcccaggacccattctttatgggacatatcggtatcccccacttgatgttgttaccacttggggagaaagtattaatgtttctcttccctctggctcatacaaggaatggaaatattatctgaattgtgggtcttcaataaatatttcgtatcacgtgagctctaagagctcttctgttttccttataatcgccgaaggggacgtgagcctcacacggtggctggaggacccaacagaacctaatacaactctgtcatggaatgtgatccatggaactggtatgatcacacaggacatattctggtcgtcgagctattatgtggcattgggcaatttggatgaggatgtggaggtagcattaaacctcagtataagggcctccttgcataatacaacgaatgctttctacaaatgtgatcttgccaatggtccatgcagtttgaatcttttgttttctgatggaagtgcagctgtcttagttactcctggtccacaacagaatgcatccaatgagtggtatgtcaaactgtcctatggaccaagatgggtgacctatatttttggaattggtggattgactttgcttgtgtttggggccttcaacttcttgaacaagcttcagtgtgctcatgaagatagagcaggagttagatctgagggaacagaacgtcagagagcccctttgcttcctcacaaagatgatgatctttcaagttggggttcatcgtatgagtccttgccacaagatgagaaggatcttggctttcttccaggaggccccattgatgggaagactttagttgatggtgaaaccagtaataacacacggcatctttgtgctatttgctttgatgctccgagggactgcttcttccttccatgtggacactgtgtggcttgctttgcttgtggaactaggatagccgaggcagctggtacttgccctgtttgtcgtaggaacatgaagaaggttaggaagattttcactgtttgatcagtgcacttcctagtgtagagattaaatgagtagtcaccagaatcatagaataccttttatgtactcaactatacattattttcttgccaatcattaacaatgatcaagcaaatggtgtctgctgatgagggtcgtattggccattgcagcattgcctactgtaatagtgactagatgaatagccaccggaatcatagattacttttt

SEQ ID NO: 13200 - DNA, 1171 bp, Glycine max
  Clone ID: JC-GMLE01810009D03_FLI
tcttcttcacgtggtacttcttgaacgtgattttcaacatcctcaacaagaagatctacaattacttcccctatccatacttcgtatcggtaatccatttattcgtgggagtggcgtactgtttggtgagctgggccgtgggccttccaaagcgtgctcctatagactccaacctactgaagttgctcattccagtggctgtgtgtcatgcattaggccatgtgaccagcaatgtctcatttgctgcagttgctgtttctttcactcataccattaaagctcttgaaccattcttcaatgctgctgcttcacagttcatacttggtcaatcaatccccatcactttgtggctgtcactggctcctgttgttattggtgtgtccatggcatctttgactgagctctcgttcaactgggtcggcttcataagtgctatgatttcaaacatctccttcacataccgaagcatctattcaaagaaagccatgactgatatggacagtaccaatatctatgcctacatttccatcattgctctaattgtctgtataccacctgccgtaattttggaagggcctacactgttgaagcacggcttcaatgatgccattgctaaagtaggtttggtcaagttcgtctcagatctcttctgggttggtatgttttaccatctctacaaccaggtggctaccaacacactggagagagtggctcctctcactcatgcagttgggaacgtactgaaacgtgtatttgtgattggattttcaattatagtctttggtaacaagattagcacccaaactggtataggaacagccattgcaattgctggagtggcactctactcgttcatcaaagccaggatggaggaagagaagcgacaagcgaaagcagcataagaagttgtcaacctggaggatgtcttgcactgtaaatcaccacaaatttccttcaaaataattgagtgactggttcagtgttgtactatccttgtgatagcgcgcttttatttttccttctatttttgtcaaatattttctttttttcctttttctctcttcattcagaaaacaatgtctcgctgctgatttgcagtcttcttgtgttgactggaaaatgatgtacccttgattcccataaagagctattgaaactattatattagctg

SEQ ID NO: 13201 - DNA, 1389 bp, Glycine max
  Clone ID: JC-GMLE01810010B12_FLI
agcgatccgtaagatgcttccacgtgttctggttttgctgctgctgaatgtgctggctaccaacgtgctggccgactatggcccaggagatgcggtggtgatcctcacggagaaaagctttgcgaaagaggtgctgcaaagtcctgactattggctcgtcgagttctacgctccttggtgtaaacactgcaagaatttcgagccggagtacaaggctgcggccaagaagctcaagaaacacgcgcgtttgggcgttgtggatgccacggtgcaccaggaacttgcccgaaagtactttgtccaagacttcccgacgatcaaggagtttggagccgaaaagaaacgtcctcaggactaccgtggtggacgcaccacgagggaaattgtgaagtacgtgaagaactcgcccgatgcaaagaagctcggggtcagtggtgccaacgtcgtgacgcttacatacgacaaggtgtacacattcttgaacaaagatttgccgttcgctattttcttcggcagcccaacgaagggtaagaagagccccaagatgccaacgtggctggatgatgtagcagagtcattcatggagggcaagaagaagaagaagagtccgacggttcaattggcattcgtgccgggatcggataacaagatcgccaaccactttcgacttgccaaagaccagcttcccaccgttgtttacatttattcagccagtcggaagtacactgtgttggatgtaaacaacgtgaacgaagctacggccagaaagtttattagtgatgcgctggcgaaaaccgaggcagcggagaaggatgaatcgctgcctagcgtgcctctgttcccgtcacccgaagtggccaaaaagaaacccgtggtcggactgaaggaactggatgtagacactgtccgtgattgtgtggctaagcgagacaagatgtgcgtcgtagtggtcaagacagacacggaattggtgcgctcgctggccaaaaagtaccgccgcgatccgttcaccttcttgttcagcaagcctgacgcgcaggttttgcaagctttgaccacttacgttggcgaaaagaacgcggaggtggttgtcctaagggctggtcgcaatatgaagtactcggccctgtcaggcacgaacgatgagagtgccatctcggagttcctagacaagctcattgatggctcgattccgttctcggtgccaagcggagacatgaagacgtttgttgccacggtggctggtatgtcggccagacacgaagagttgtaggttgcaagcctgcgaggattttcatcgtctggaagctggacaatggagctcttgacgcagtaacactgagcgtctagttggcgttgggctcaactaaatacattttttggcagctt

SEQ ID NO: 13202 - DNA, 1951 bp, Glycine max
  Clone ID: jC-gmle01810010c06_FLI
catcctcatggaaatatggcaactggtccggctgattcttatactgaaaccaaatgtggtgtttgtcatgctggaacagatgagcatcttctactactttgtgatctatgtgatactgcttcgcacacatactgtgttggcctgggctatactgtttctgatggtgattggttttgtcacgattgtgctatttcccgggagaccaatatcaatgaagaatcagaccaacaaaaattttgcgccaacagctgagccaagtgtaaccatcaatatctttgatattgtgagggaaacaggcagccgggtggttaatagaccaagggcatctcctttacaacagaacctgtcatctcctgttattcctttacctgataggttaagttacttaagtagattaaaaggaaaaggtcctgtcacaggtgtctgtaatatgcagcggaatgtaaaggtttttcgtgaaaattggaatgctttgagaagtggttcatttcagttccgttgcaattcatttcaacctggaagcacagttagtcaaaaacaagattctagttccttatcacatcacaaattggatggtttgcattctatggcttccacgagccttcaacaatccactgtccaaggtggtccttctaacaaaatgttgaatgagagagtctttaaagatgctgacaaggcatggaaaatgatggacagggcaaagaggatacaacgcctcatcatagaacaggcagcattctacagggagtagataaaccctcatgcagtggaggagctagaaaaatatcattggcacattatatcttctccgaacagaaagatcaacatttcaaagcattagtcttgaggaacactaaaatggagaagcagtgtgactattctagtctcaaccagaatttggaaaatcgctctactctaaatttggaagagaaaaagcaaagtagggttacatgtgagggaccatactactcactcaaaaggatattgtgaacgtccattgttatcaaatttctttttttccttcatatctacatgatcattgtaggctgaaatatttataggtgttttgtgtaccctttttacaatccaaacctgatctttaattaggttgagtgtgtgtctagttcagcttattttggagaaataataggttatttttgtcaatgtctggagaaaacttttgaaaaataacaattgttttcttaaaaccatttccaaacatgcatcaaatgcattaggtttgcattcaacatttagcatatcaaccttatatcatatttctgttcattcgatgcgaggtggagagacagagtgcacctctatgccaggcacaaattctatccctcattacaaaaagtgttcatgataaatttctaatgttgtttttcctgtatgtatgttgtaagctgttaaacaggttgcatgtaaattccaaatggtaactgttacttgaatgaaagtaatttcacttcaagctattatcttgatgcaggtgttgataccttcaaggtagttgcaaggcaggccactcataccatcttggctacttgcagttctgatcagcaaaagtctagtacatcctcctctagctcagtatgcagccatgccgacaatactcctcagtttcagaaatctactttaatgcctaattgttgcaggcaatgcttttatgactttgtaaacaatgttgtcaactctaccatattggagaaagtgggttgcgcttgatctacattattttttttttctttggagagtgcatcatgtatttctcttgctgtgattattgttctcatgcacctactctgtaaaaaatgttacttcgtggcccaggtaactgcattgtaaaatttatgtcgtaggtaggggatagcagtgtaatgtaatctatttatttttcacctgaagggaatagttgaggatataaatggaaaattagagtattttgttt

SEQ ID NO: 13203 - DNA, 1607 bp, Glycine max
  Clone ID: JC-GMLE01810011A02_FLI
atatttcctctcatcagattgaagggtggttagaattagggttctctatctgcaaagcaaaccttatcttttcacctgaaacttgcttttgttcccaattttctcaaattgctttcggttttcgttctgattctgcaaaatcatggagatggagcgcatcgttgaattccctcacacatacatggatcgacccccgagaaagagagcgcgtttgggctgggacatcgctgaggtccccaaggctcaggtaggattgttttgtggacaagaggttgagaatatttcaagctttgctccttcagaacatccccctagttctctgtttaagggagttgctcgaaatggttctcccccatggcgagacgatgacaaagatggccattacatgtttgagcttggagataatttaacttctcgctataagattcatggcaaaatgggcgaaggaacttttgggcaggtcttggagtgctgggacagagaaaggaaggaaatggtcgccataaaaattgttcgtgggataaagaaatatcgagaggcagccatggtagaaattgaggtactgcaacagcttgggaaacacgataaaggtagcaatcgttgtgtgcaaatacggaactggtttgactatcgtaatcatatctgtattgtgtttgagaaacttggaccaagcttatacgattttcttcggaaaaacagttatcgttcatttcccattgatcttgtccgtgagattggctggcaactattggaatgtgtagcatttatgcatgacttacacatgatccatactgacctgaagccggaaaacatacttctagtttcaccagagtatcttaaaattccagattacaagagtacaaccagatcaccaagttcctttttcaagagagtgcccaagtcaagtgctataaaagttattgattttggcagcactacatatgaacgagaagatcagacatacattgtgtcaacacgtcattatagggcacctgaagttatcctcggacttgggtggagctatccatgtgatatatggagtgtgggttgtatactggttgaattatgcactggtgaagctttgtttcagactcatgaaaatttagagcatctggccatgatggagagggtgcttggtcctataccacagcagatgttaaagagagttgaccgacatgcagagaagtatgtccgaaggggtagattggactggccagagggtgcagcctcacgagagagtattaaagctgtaatgaagcttccccgactacagaacattataatgcagcatgttgatcattcagctggagatcttatacatcttttgcaggggctacttagatatgacccctttgaaagacttacagctagggatgctttgaggcattccttctttactagagatcaacttaggagatgattttcatgtatttgtaaacgattggtctgtttttaagtttaaagatcattcgagggcaaatatggctgtaaggaagcctatgtgccatgtaaataaatatttgaatatcttgggctaaactaaagcaagtgaggatggttattcagcagcagttacacctcaaagcctgtatctcaaacgttttctt

SEQ ID NO: 13204 - DNA, 2304 bp, Glycine max
  Clone ID: JC-GMLE01810011H06_FLI
aatgcctccatatacaaccaccttaaaactctcacccgcagaccccatgtcgcaggttccaaagccaacgctgaagctgcctcatacgttgtctcagtcttcacctcctcatacataccatcacacatagtttcctacgaggtttctctcacgtaccctttgtcacgttcgttggttctaataacgaacccttctacaaccttcactctccaccaagaaacctacgagggtgatccttatgctgacgtggcagatgaggttgtccccactttccacgcgtatgccaagtcaggcactgtggctgctcctgtgtgttatgtgaactatggaagagtggaggactatttgactctgaaggataaaaatggtgtgaatgtttcaggcactgttgtgttggcaaggcatgggaagatatatagaggggacattgtgaagaatgcttatgaggaaggtgctgttggggtggtgatatattcagataggaaggactatggtggtgaggaaaagtggtttcctgatgagaagtggttgccaccaagtggggttcaggtggggacagtgtatggtgggttaggggaccccacaactcctggttgggcaagtagtagtagtggtgatggagagtgtgagaggttgaacaaggatgaggtggagaagggaggtgatgttcctctcataccttcattgcctgtgtcagctgctgatggggagaagataatgaggtcaattggtggaccagttgctgaggatgattggcagggaagcaaggatgcccctatttacaggcttggaccaggaccaggaattctcaaccttagttacaaggggcaggatgttatagccacaattcaaaatgttattggtgtgattgaaggggcagaagagcctgaccgatttgtcatactaggtaaccatagggatgcatggacatttggagcggttgatcccaatagtggcactgcagcactgcttgaggtggctcaaaggctagggaagcttcagaaaaaagggtggagacctagaagaacaattttattatgtaattgggatgctgaggaatatggccttataggatcaactgaatgggtagaagagaacagagaaattcttgcttcaaaggcagttgcttacttgaatgctgattgtgtagtaggtggaccagggttcaatgtccgtgccactccacagttagatgaattgatcaaaagagcaactcaggaggtatcaccaaagttgaactaaaaataatagaataagctcttttgtccataatcagggaaagaagatacatgatggtggcaccaaccactttgttagtattgattttttgtaggtcaaagaccctgataactcatcacagagcatttatgaatcttggactagttctggtagttctcctctgtttgggaggttaggaggtggaggatcagactatgcatctttcttgcagcatgtgggaatcccggctgctgacatagcctttggaggagatgttgcaggatacccggtataccactcactctatgatgacttcgtctggatggaaaaattcggcgatcctatgtttcaaaggcatgttgcagctgcaagtgtttggggtctggtagcactttggttagcagatgaggaattcctaccttttgattatctatcttatgccaaggagctccagcttagcgtggagaatctggaggatgagatttcaaataaagacataaatttgtcacctatattcaagtccatcaaggggcttgagaaagcagcaatcaagatagatagccagagaaaggaaatagaagctggtaaaggttggataacagggaagaaggaccacttgagagtgagagagctgaatgatagattgatgatggctgagcgtgcattcactgacagagatggcctctttggaatgtcatggtataagcatttgatttatggaccatcaaaacataatgactacggctctcaatctttccctggaatcgatgatgctgttaaaatggccaaaaatctacatactgcagaatcgtggcatcgtgtacagcacgaagtttggagagtctcaagagtcatcaaacaagcctcgctagttttattcggtctactatcatgaatatcaatttagttgtatatttcgattcatggtaaattatatctccgtaagaataaatatgtatatatgtgtgatgattcataaatctcaataactcaagaagagatttaggattttgtttttccccgcttctctcatctgtcaaattcacttcgcaattcgaataacaagttgcaaaatatatttttttc

SEQ ID NO: 13205 - DNA, 1421 bp, Glycine max
  Clone ID: JC-GMLE01810013F09_FLI
gttcttggaagctgagggaattatggattatagtcttttagttggccttcattttcgtgatgataatacatatgaaaaaatgggattgtcaccgtttcttttgcgcacaggaaagtgggattcttatcagagtgaaaagttcatgcgtggttatcgctttcttgaagcagagctgcaggatagagatcgagttaaatctggccggaaatcattgattaggttaggagccaatatgcctgcgagagcagagcgcatggctcggaggagtgattttgatcaatacaccccttgttgcagtggggaaacctacgatgttgttatatattgtgggattattgacattttgcaagattacgatatcagcaagaaactggagcatgcttacaagtctttacaggttgacccttcatcaatctcagctgttgatccaaagctttactcaaaaaggttccgggattttgtgggtagaatattcattgaagactggtaatagtaagtagaaaaaggttcaaacattaacatgatgggagggttttgatctgaatgtccagaaaatagctgaaagaagaatccattgtttggagttggagagcttgtggttgacggtttgattcacggaccactgtttctgtggctatgaccaagggagctcacctgaatgcacaggatgttttcgtggctgaattttgaatgtacacagccatgataatgaaggcagggagatctttgtacatggaggatgatagaaatgatctctgtcttttttctctttgttttttttttccgtgaaagggggcagggtttgtggattcttttttgtggtcacaaataggatatgaatatgatgtgaaaaatgattgaggagacatgaaaatgtttctcagagattggattcaaaatgggtggatagttttttgttaataaaagaaagtgtacagttcatttagaaaaggatagatggtaaatttctctttttttttcctcgggaagttggcaatttcttgtttaatttgagatattttggagacaaggttgtgaaatggagggccaatggggcattgggatttctcccacagaacccaagtcgtctactttttcaatataaataaatgagttttaatgtgactctgcactatagggtgccgaggaacattaaaattgaaggggtcgttggctaaacttttgcagtgaaagtgaagtcattaggtggggaggtatgaaaagcagagaaagcacgagaaagattcgcaagcgtttcttgttttttcctctcattttgtttactttctcacttttcactgtttctagtttttgtactatttttcttttaatttgtaaaattttcgatgttgacccccgattccacaacttattttttttgttgttctgtagaaagatgaattgttttttagcatattgtc

SEQ ID NO: 13206 - DNA, 3168 bp, Glycine max
  Clone ID: JC-GMLE01810013G01_FLI
gcgactaagatgtggtcgagtttccctctcgtcttgcctttgggtgccgccctagtggcagggcaggatattactacctgtcccgggtactcagctagcaatgttcagcaaaatggtaatggtcttactgccgacctcactcttgttggcgaggcctgcaatgcatacggcaccgatctacccaacttgactctgactgtcgaatatcagtcagccaaccgcctccatgtgattattcaggaccagaaccaaaccgtgtaccaggtgccaaacgagatcttcccgagacctgaatcccctgaaaatagctcatctgaagactctgaccttcaattttcctacacagaatcgccgttcagttttgcagtggcaagatcagatggtgagacgctattcaacacctccggttcgcccttgatcttcgagtcccaatatctgaatctgaggacctcgctaccagatagtcctgctctctatggtttaggagagcacagcgatccatttcgcttgaacagcacgaattacacacgaaccatctggaacagagactcttacggtattccggctggcacaaatctctatggtgctcatccaatatacgtcgatcatagaggtgaaaatggcactcatggtgtcatcttgctcaattccaatgggatccaggtcttcatcgacgacactgacggtcagtatcttgagtataacattcttggtggtgtcttcgatttctactttgtggctggtcctactccgatcgagacttctcagcaaattgcagaggtagtgggtcttcccgcgaatatcccctatgggggcctcggatttcatcaatgtcgatatggctacagcgatatctatgaggttgccggtgttgtatacaactacagccaagccgaaattcctttagaaacgatgtggaccgacattgattatatgtacaggcgctggatcatgactcttgatcaggaacgtttccctctggaaaaggtgcgagaattggtcacttaccttcacgagagagatcaaaagtatactgtgatggtggatcctgctattgcatatttccccgatgctaactacagtactttggatgagggtatcgcccgtgatgtcctgttgaagcgagagatgggtaagtcggaaatcttgaaattcttatcagagtctgacgatctctcagatcgctgtatctaggcgtagtttggcctggacctactgtctttccagattggttccatcctggtactcaatcattttggagtgatcagtttgattccttcttcaacgctgataccggtgtcgatattgactacttgtggatcgacatgaatgaggcagccaacttctgcgtatatggtcagtgttccaacttgacagcggccacacagttcgctgaagagaacaattttccccccgaacctcctcccgtgcgtgactcgtcaccaatcgcgctgcctgggttccccgacgattttcagccgggttcgaattcgaccaatatgaagcgccaggaagctccgagtggctcaagaatgggattgccaggacgcaatcttatcgacccaccatatatgatccagaacgctgccgggagcttgtccaacaaaactatcgacacagacctcgtgcactacaatggtttggtagaatacgacactcataacctgtacggaacaatgatgtcgaacacctcagtcaatgccatgagatctcgccggccagacgaaagagctctggttatcacgagaagtacctttctcggtgcaggcaagtatgttgctcattggcttggtgacaatctcagcaactggaatctgtatcgaacttcaattgcgcagatgctcgctttcaacagtatattccagatacctatggtgggtagtgacatttgtgggttcggatccaacactacagagacactttgtgctcgatggatgatgcttggtgcattctacccattcatgagaaaccataacgagttgggagcaatcagtcaggaggcgtatcgttgggaatcggtcgcggcagcctcgagatacgccatcaacatccgatatcgtatgctggactacttctacactgcattctacgagcaaacagtagatggcaccccgagtctgaatcctctcttctacatctacccggaggacgcgaacacgtttggtatcgatacgcagttcttctggggaggttcagtcttgatcagtcccgtactagaagagaacagcacatcggttgacatatatctaccagatgacgtcttctacgactggaacgatggcctttcacctgtgcgaggtaacggagagacagtcacactggacgacgttgacttccaaacaattcccatccacatccgcggaggaagcatcttacctctgcgcacggagggtgccaacacaaccactctgcttcgtaccaaaccgttcgaagtcattgttgcgccaagtctcaatggcacagccaatggtagtctatacctcgacgatgggatatcactggagcaaacgtcgaccacatacattcagttctcatggaacggtagcctgctaagcgtgagaggaagttatgactacgatactggctcgactattgatggaatcagcatgctcggaatcaccagcccaccgcggagagtgacatacatgggtaccccactgactactacgtacaacgaaacaacccaggtcttgagtatcacctgtggtatcccattgaacgcagatgcggatgtctactttgatcagatacaatcattcacaggagggtcggagcgaacggggctaacaagtatgtggctgctgtcaggtctgtctgcggcagtggcaggtctggttctgctctagagatcgaccaaattctttacttcaggtggactaagcgaatttacggtcttgtcacacacggcaacctagtgaagcgaaatttcaacacaagagggtaccgtccgtaatgcatgatcgtggacgaagtcggtgacatcatgttctgagggactttgaagaaattagaggtcaactggtgccatctagatacgtcggctgactcaagagccgctcgttttgagcactgtgtgatatagccgacctgatacataatgcttgcaagtacaggtgagatcactttcacgacggttgtacttgatcacaatttatgccctcaactacg

SEQ ID NO: 13207 - DNA, 1255 bp, Glycine max
  Clone ID: jC-gmle01810014g06_FLI
aaagcttcaacctttgggacgccctactttttttcttctatcttcattgatcatcacttctctttcttcattttccttttcggtgggaattaggataaccctcctcaatttttcaactctaaatttgatcatcaccttcacccactttactcttactaggaggaacccttctctctgtgtgtgtgttctgagttgattctgtgcttcagctttccacaaagtaaagtagaaagatggcaatgattccttaccacctttgccgtttaccttaccaggattccctcaaagcacttgaggctgatatacagcacgccaatgctttggctgctgcaattcccagagccaagggtgagactcttcttcaaatgaaattggtttacaatcacttggctcccctcttcctgttatttctacaatggatggattgttcttgtgcaggctttctccataggtatctcgacctcttccacatacttatttacaaggtacataatgatggtagatcaatcatgcctactcatggaaggaaggctaccattggggacttttatgctgttatattaccatctctccaacggcttcatggtagtttggagaagttggaggttgttaaagaagaaggccagtcaagcatagaaggtccaagttatggcaagaaggtcattgaagaaggtgtgaaactaaccgccaatgttgatttgcaaagagaagatgaatgtgggatttgcttagagccttgcaccaaaatggttttacctggttgctgccatgccatgtgtattaaatgctaccgcaagtggaacagaaagtcagagtcttgtcctttttgccgtggtagcttgaggagagttaattcggaggatctatgggtattaacttgtaatgatgatgttgttgatgctgaaacagtttctaaagaggacttgttgcgtttttatctctatgtcagcaagctgcctaaagatcacccagatgcacttttcctaatgtattatgaatacctcatttaattttctactaaataagaagaagaaaaaaaaaatgtacagataggaaattccggactgcaaatgtgaatagagtctggtacaaaaagaaaatactctggtaatttaatcacagttgttatggtaagagaaatttctggttttttagtccagaaaaaccattcttcttactcccgtgatatatctccattgtagacattgttcttgcaattaacttggaattccttgcataaaggatccattaagtt

SEQ ID NO: 13208 - DNA, 2146 bp, Glycine max
  Clone ID: JC-GMLE01810015E02_FLI
cttatatctcgcgtcgcaatatattatagtattaccttcttaattatcacaaacgcgcttttcatattcgaatctcgcgccaacatggcggccaccggagcccgtctcttctccgctgcactcttccgccgttatccgccgtcgccggacggaaaaacgaactcccgccggactccgattgcgactccgcgcctcgccgtgtcggtggaccaggttccgccggcgacggtggagaaagagaagcgtagggaagagaagaagaagcgacgcatgaacggttggaatgagtatttggagcggtcgaaggagttgatcaaaccggacggtggaccgccgcggtggttttcgccgttggagtgcgcttcgcgattggacaactcccctcttctgctctttttgccagggattgatggcgtgggacttggacttattttacatcatcagaaactgggaaggatttttgatatatggtgcttgcatattccagtcgctgatcggacaccatttacagacctagtgaaaatagttgagagaacagttaggtcagaatatcaacgttcaccaaacagacccatatatcttgttggagaatctttaggagcttgccttgcactggctgttgcagcacttagctctgatattgatcttgtactgattttggcgaacccagctacttcgatcagaaggtcacacctgcaacttctaacaccattattggaagctttgcccgatccattctctcctgccctgcctaacattctcagatcaacaacaggtgaatctctgaggatggtgttagataatgtggtccaagggctccctctacaaaatacagctggagagctagtgaaggattttactactttctcattatctttgcacgttcttgctgacatattaccaaaagaaacacttgtgtggaaactgaagatgcttaagtcagcttctgcttatgccctttcacgcctttatgctatcaaagctcagactttgatactttgcagtggaaatgatcagttactgcctagtcaacaggaaggtgaaagactactggagttactgcctagatctaaaagccaacttcgtaaatttaatgacagtggccatttcctattcctggaggacagcattgacctggtaactatagtcaagggcacttcatactaccgccgcggcaagtctcatgactatatatcagattatataccaccaacacctgaagaagccagaaaagtaacagaatcatacagtttgtataaccttgtctcaactgtaatgctctcaactttggaggatgggactattgtaaaaggccttgctggaattccttcagaggggcctgttttgtttgttggggaccacatgctactgggattagacaaagttcccctgtggtgtagaattttttctgaaagaaatatcgttgttagagggatagcacatcccttgttttttatgagaactaaaaaaggaaaattgccagatgtatcttattttgacggtctcagaatcatgggtgctgtgcctgtagcaccaaccaacctctacaagcttttttcttccaagtctcatgtcctattatatcctggagggatacgcgaggcttttcataggaagggtgaagaatacaagttattctggcctgaacaatccgagtttgtaaggatggcagcaagatttggagccaaaatagtaccttttggtgtagttggagaagatgacattggtcaagtagtttttgattatgacgacttggtgaaaattccttactttaggtctgaaatagaaagcctcacaaaggagactgcgcacttgaggaatgatgctggtggtgaggtggcaaatcaacaagtgcatttgcctttgattttgcctaaagttcctggccggttctacttttattttggaaaaccattggaaacgaaaggaagggaacaagaactgagagacaagcagaaatctcaagagttatatttacaagtgaaatctgaggttgagaaatgtattgcttatttaaaggagaaaagagaaagcgacccctacagaggtttagggcctcgcctattataccaggccagtcatggctttgagtctgatgttccaacatttgaaatttaaatgaaaaataaatatatttttttatgtt

SEQ ID NO: 13209 - DNA, 1498 bp, Glycine max
  Clone ID: JC-GMLE01810015E07_FLI
tttattacttgcgccttagccctctctcactccgcctccatcgatctctttacgccctctgactccgtctgtacgtgtcactccgcctctgtcagcgccgccaccgtcgtagtgtctcctgcaccgtcgctctctcaccattgaagtcattgttgtcgtcgtgggggttgtgagggcatattcgtgttgctccatctggtgcgcgtctcattcaatttaatttgtttttccctttttattctcctatagcttgaaggggttgttttggtgcatccctttttctggggagaggaatcgtttgggtgtgaagcaaaccgacctgaacaagcgaagaagatgcacgatttgtggcggtttgtgtcccgattgttaacccaagtaaggatccgaagctagggaaggtagcttgtgaaagattgcttctttgcgttgcggagaaggatttggtgagggacaggggtttgttctataaggagttgcttgagaagaatgggtgttctggtgttgcggagtggtggagacgaaggatgaggaccatgttttccatttgcttctatgctttatttttgtttgagaagaatgggtgttgcttctatggttcgaacacccattcttaaaacgaagggagaagagctgaagaaggcaaatggtgctgctgtgtacatacaatgcagctcaaagactctgcagggtgaggcatcatttgatagatatggactgactattgggcttccagcagctacagttgttttattgaaaaatcagcttctatagcgattctctcatggaatagaatactcatggacatacatgaggactgacttagagggtttaactagattcgaaaaccatgtgaagctgggaagatgaagatacttgtgtatgaaacgtttcccatagcacaagtaaaagaagctcatgaggcaaaagtcaagaagctcttctgtctgaaccatcaaattagaataaaaaaaaaagacctttcgggtaaataaggaaagttatttttgtatcctttctttttcatctatatccttctttgatttctttaaataatgattttcatatcattttgagtaactagaatataaactatagtgattattttaagaaaagttccaattctaaatgcctgaaggatgttgccatgctcactaaagttatataattgatcagattgtgcaagcccttgagccaaggtgttacaaggagctacaaaatgagaatttcatttcaaccaaaatagtcatgtgcatttacaagaaatttctgttttcttgtaaagaacaaatgtgagttcatatttatcttatcttttatgcttgtgtacatatatttctgttagaatatcttagatatttttagtagtttatcatgtatatatggcaaaatcaattaggagaaatcttatgaccaatataggatgggatgtgtgtataattaggattgaatcattgtatttgatactaatactttttctttaactaactgttcttag

SEQ ID NO: 13210 - DNA, 1778 bp, Glycine max
  Clone ID: JC-GMLE01810015G12_FLI
gcgttactggtttatctaaagaagcaaggaatcaggtcatggaggctacagatagattaggtggacagtatagccccaatttgcatcctcgatgtacccatttggtggttcagagttttggtggacgcaagtttgagcatgcgctgaagcatggagcaaaaaatggcctctttgttgtcacactgggttggtttgtggatagtgtcaggaaaagtgtgaggttgagtgaatcacattatagagtgaagagttatggggataacaacacgcatttggaggattttagactgcttcctgagtatacaaatgctgaaaattcttgtcttcctgcaagaatcctccaaaccaagcaagctattagtgttgaagaacttcaaagattcactgggagagagtctatcagaaatttggactcaactttgtctggctgctccatctatgttgatccaggcatttcatctgaattgcgaaacaaggttattgagactgcttcaagagaaggtgctagtttggtggaacaatggtttgttggctgcaatgttagtcatgtagtaactgaagggacatcaatccaaagatatcttggatactctagttacctcattacacctctgtgggttctcaaaacagctaaggagaaatatgtgcgaaggcttgttcgcatgtctgttgatttggcaaagcaagttggcctgatgctggaagatatccataatggcatttcaggaaaggaagtaataaagcaaaaagtccttaacaatcttctggatactgaaagtgaagtcggctatgaagaaagacaacaaattgtgaattctgcaaaaaatggagtcagaagtcgccgtggtcgccgaatgcagacttgtcagactccaatacgtcctataacacccaacaaccttctagactctatctgctggtctatatccgagtcgacttcggctgcttccatttatacagactctttcagtgttgaagatcctagtgaaaaccatacttcaatatttttttatgcaaaaggggatggcaaggattcggaagcttcattttcaaactccactcgtcctctgacagaaagtgagaaatccgagttgatatttaaaaaccctttccttaccatactattcccaattgaccgatttgctgagatgggtccttcttcaagaacatttttcagccataatggttttaggtgtcttcaggtgttggatcatatccatgcattttatcaggagaacatgtcaagggaagaaatagaagctgcaattcatagtgattcaagacacgctgataggcttcgatcagtgtactctagtaaggaaacagcagaacatggctatgtactgtttaaaagggtcgaattcttgggtagtcgtacaagttttgaaatgttgaagcgtgtaactggggacaactcctccaacgtttatgagctattacttagggcctaaggtaattttattatacaaggattccccatattggtatgaatggccaaaaatggggaaatgtttagcttgtccctagaacaaatgagaaaaaatgattcattaatattttaatattatttttgttatattatttagagggaagggcaaaaggttatatggtaagaagttcgaaacttggacatcattatcaacgccaaacccggtcttaaatatttgagtgataaggtcctatagaatgaatgttttgaattatattttatactccgttcatgtaaaggtttttctgctttgtgcatataaattaatgataaataggattatgatttt

SEQ ID NO: 13211 - DNA, 686 bp, Glycine max
  Clone ID: jC-gmle01810016h12_FLI
tgagaattgacgtggatttcccaagtccagatgcagcttcacaagtgggactactgcataaggaaattgttggaaaagctatgatttacaagttgtctgaagctgttgaagaaggagatggtgctaactttgttaaggtgttgaagcaacaatgtgaggaaaataagctacgtttgtctgatgtttttgataaagtcaccctagcaggtcattcactgcttcatgtggcagcagatatggggcaaaaaagtattgtgcaggtgctttgtgatctctttcctttgcttctaattaggagaaatgtaagaggtgacactccacttcatgttgctgcgaggtctaagaaatatgagacagtcaagttgattctctcccaatatgccacaaagaagtcaacatatgatgagatgaaagataaaaagatagcaagagaaacaaatgaatgtgggaatactcctttgcacgaggctgtctacagtggggatgttgatgtggttaaagagattttcgaccaggataaggctgtagcctattgtttgaacaagtcaaagagatcaccactgtgtttggcagtggtgaatggtaatgagcaaattctcgaacttctgttgcaaattccattacctgcggaccagccgctttcacagtgtcgtcgaagttctccactccacacagctgtacagcat

SEQ ID NO: 13212 - DNA, 979 bp, Glycine max
  Clone ID: JC-GMLE01810017D03_FLI
ctttttgtgaggattccaaagcatggcttcccttgcagcatccactgctgctgcttcccttggcatgtcagaaatgcttggaaaccccatcaacctcagtggtgccacaaggccagctccatctgcctctagccctgcctccttcaagactgtggctcttttctccaaaaagaaggctgcacctccaaaaaaagctgcagctgctgctcctgccaatgatgagcttgccaagtggtatggtcctgacagaaggatcttcttgcctgagggtctcttggaccgatctgagatcccagagtacttgaccggagaagtccccggagactatggttatgacccatttggtcttagcaagaagccagaagatttttccaaatatcaggcatttgaattgattcacgccagatgggcaatgcttggtgctgctggattcatcattcccgaggccttcaacaaatatggagcaaactgcggtcctgaggctgtttggttcaagactggagctctgcttcttgatgggggtaccttgaactacttcgggaaacccatccccatcaatcttattgtggctgtcattgctgagattgttcttgtgggaggtgcagagtactacagaattattaatggcctgaatttcgaagacaaacttcatccaggtggtccatttgacccattggggcttgcaaatgatccagaccaagctgcactgctaaaggtgaaggaaattaaaaatggaagacttgctatgtttgccatgcttggtttctacttccaagcttatgtcactggagaaggtcctgttgagaaccttgcaaaacatctcagtgacccttttggcaacaacttgctcactgtcatttctggatctgctgagagagctccaactctctaaatcattcatcttcatgtttttctccaatcttacttaatgtacaatacatatcactgagatattaaggcatttggctttgttccttgg

SEQ ID NO: 13213 - DNA, 3624 bp, Glycine max
  Clone ID: JC-GMLE01810018D04_FLI
attggttctaatagaagttgcaactttccactgaatgatcaaactataagtggaaatttatgcaagatcaaacatacgcagggtgacggaagtgctgtagctgtgctagaaagtatgggtagcaaaggatctgttctagtaaatgggacacatgtcaagaagaataccagctgtgtacttaactcgggtgatgaagtggtttttggtgtgcttggaaatcattcttatattttccagcaactaaatactgaggttgcagttaggggtgcagaagttcaaagtggtattgggaaatttctgccgcttgaaaggagaagcggagacccttcagctgtggatggggcctctattttggcttctctttccaacagacaggaccttacaagatggaaatctccatctcagacctccagtaaacctcaccagggcaccgatgtctctagtcgttctgttcatcatgattgtacagaaactgagcttgatggctcagaatcaactccaaatgtgcggagtgataaagcagcagaggttcgaacaagtgacaagaattcaacaatggattgcaatccagatgctggtgcagaggcaggcaatgtaaaaatctctggggtgaatgatttcctaaggcctttcttcaggatcttagctcaacctagttgtaaactgaaattgagcagaagtatctgtaagcaggtgttggaagaaagaaatgggacgctggatatgcaggctgcatcgactttgggtacatctgtgcgctgtgcagtgtttaaagcagatgttcatgctgcaatactggatggaaaagaaatagatgcttcttttgacaactttccttactatttaagtgagaatacaaaaaatgtcctggtggctgcttgctttatgcacctcaggcataaagaacatgaaaagtttactgcagatcttacaaccataaaccctcgtattcttctctctggacctgcagggtctgaaatatatcaggagatgttggtaaaagcacttgcaaaatactttggagctaagttgctcatatttgatagtcatttgcttttggttggtttatcttccaaggaagctgagctactcaaagatggacttaatgctgagaaatccttcggctgcactaaactaagtcctacagaagacatggccaggatcatggacccattagctagcgaaatagagacacctagcccttcaaatgcacctacatcatatggctttgagtctcaacctaagttggaaactgataacatgccatccacctctgggacagctaaaagttgctcattcaaattaggtgatagggtgaaatttagctgttcatcttcttgtggcgtatatcagacatctccaaggggaccgtctaatggaagtcgggggaaggttgtcttactatttgatgataatcccttgtctaaaattggtgtgagatttgataaacccatacctgatggagttgatcttggtggtgcctgtgagggaggtcaaggatttttctgcaatgtcaccgatcttcgtttggaaagcagtgctgtagaagaactggacaaattacttattcattcattgtttgaggttgtttttagtgagagtagaagtgcaccattcattttgttcatgaaagatgctgagaagtctattgtaggaaatggagattcacattcatttaaaagtaagcttgaaaatcttccagacaatgtggttgtaataggttcacacacacaaaatgacagtcgcaaggaaaagtcacatcctggtggtttgctttttacaaaatttggtagcaatcagactgcccttctcgacttggctttcccagatagttttggacgattgcatgacagggggaaggaagccccaaaacaaaatagaactttgactaagcttttcccaaataaaattacaattcacatgccacaggatgaggctcttctagcatcctggaagcagcaactggatcgagatgttgagactctcaaaattaaaggaaatttacatcacttgcgcacagttctgggacgttgcggaatggaatgtgaaggacttgagaccttgtgcattaaggatcagacacttacaaatgaaaatgcagagaagataattggttgggctttaagccaccacctcatgcagaattcagaagctaagcctgattcaaagcttgtattgtcctgtgagagcattctgtatggaattgggatcttgcagtctatccagaatgaatccaagagcctgaagaaatcacttaaggatgttgtgacagaaaatgaatttgaaaagaggcttttggctgatgttattccacctagtgacattgatgttacttttgatgatattggagctcttgaaaaggtcaaggatacattgaaggagttggtgatgcttcctttacagaggcctgagcttttttgcaagggacaattaaccaagccctgcaaaggtatcctattatttggtccccctggaactggtaaaacaatgcttgcaaaggcaattgctactgaagctggtgctaacttcatcaacatttctatgtcaagtatcacatctaagtggtttggtgagggtgagaaatatgtgaaagctgttttctctctggcgagtaaaatttcacctagtgttatatttgttgatgaggttgacagcatgttgggtcggagggaaaacccaggagagcatgaggccatgcgaaagatgaaaaatgaattcatggtgaattgggatgggttacgcacgaaggaaaccgagagagttcttgtcctggctgccactaacaggccttttgaccttgacgaggctgtcataaggaggatgccaagaagattgatggtaaatttgccagatgcccctaatcgagcaaaaatattgaaagttatactggcaaaagaggaattgtctcctgatgttgatttagatgcagttgcaagtatgaccgatggatattccggaagtgatcttaagaatttgtgtgtaactgcagcacatcggcctattaaagagatattagaaaaggaaaaaaaggaacgtgctgctgctcttgcagaaggccaaccagctccagcattatgcagcagtggggacgtcagatctttaaacatggaagactttaaatatgctcatcagcaggtatgtgcaagtgtttcttctgagtcagtaaatatgactgagcttttgcaatggaatgaattatatggagaagggggttcaagagtaaagaaagcactcagttatttcatgtgagagtttttctatagctgacatgtcccctctcccccgcagcctccatctcctgaagcttgcatctatagttttgccaaattttatcgcttaagggtttgctgttgagccatttcgtttgtaaaatgaaatataggtttttatttataaagttatttttattacatttgggatgatgggttttgaaaggagtggagccttccaaaattttggtttgttctgctgcttttgttttgttcctcatccctgaaggacgtcttatttcaagttataaaagttctactagatgaaaagataaagtagtcaggtgatcctgtgatatatttgttctcttatctatcgaaatctgctggaataataagcatttagatcctttct

SEQ ID NO: 13214 - DNA, 1990 bp, Glycine max
  Clone ID: JC-GMLE01810018H11_FLI
gtaaggcgtagcttattgatggttttttatgggttttttttcccccccatttggggtgtttgagacaaagacaaaagacaagaacaagaagcaccgaacagaacagaacagaacacaacacaagttgcttgaaccttacacgtcaccatcgttgcgtgttgagtgttgagagatgggaaattcgttcggatgttcggcctccggcgaaaggctggtgtcggcggcgagggacggcgacttggtggaagcgaagatgcttctgaactgcaacccgtgtctcgccaaattgtggcattgttgctggagaatggagctgatgtgaattccagaaattattgtggccagaccgcattgatgcaagcttgtagatatgggcattgggaggttgcacagacacttttactcttcagatgcaatgttataagagctgattatcttagtgggaggacagctcttcactttgcagctgtgcatgggcatgtaagatgtattagacttgttgtggctgactttgtaccaagtgcaccttatcaagctatacatgctggcacagctgttgacaggggtggtggatcaaatgtgaaaggcaaacatgagcatagtgcagtgccctttccaagtttgtaaataagactgctgatggaggaatcactgcccttcatatggctgcgttaaatgggtactttgattgtgtacaactgctgcttgatcttaatgcaaatgtgaatgctgtgacatataattatggcacatcaatggatttaataggggctggaagtactccattgcattatgctgcttgtggaggcaatttaaaatgttgtcagatccttgttgcacacggtgcaagtcggctggctttaaattgcaatgggtggcttcctcttgatattgctaggatgtgggggcgtcattggcttgaacaattgctggcacccagttctgatgccacaatgcctacattctctcattcaaattacttgtccttgccccttatgagtgtgctcaacatagctagagagtatggattgcaatcatctacagcctcctctgatgagattgacttttgtgctgtatgcctggagaggccatgttcagtggctgcagaaggatgtgggcatgagctttgtgtaagatgtgcactctatctttgctcaacaaacaatgtttcttctgaaatggttggccctcctggctctatcccttgccccctatgtagacatggagttgtctcttttgttaagttgccaggttcccaagcaaaagaaaataaactacatgtgtctcttggcctgtgtaccccatgcatgctacatccacgtgacctagacaagccatccctttctcatacaccagaggttggaagaaatcgtgtagcttctgttccttcggagatactctgccccgtcacttgtagtccatttccatctatggcaattcccttatgtacctgcaatgatggtccatgtccatcatttgaacccagagaagtagaaacacaggatggattacctcatcactctcaagcatcaacagtggatcaggataaaattgaagggccaagactagataaaacaacctgctctagcatgttttggggtagaagaagttgcagcagggagcaccaatgcaattcagaaataaatgcttgactcgcaccatgcttgtacgacacatacaagtgtcgtggatactgggtacactatagatcaacaggatcagtccacaattttcttattaaccagcctcaaatagtgaaactcgggatctctctagaagagaaaaaactgctctgcagatcctcttggctgctcaggttgtatggtaggtgatagacacaattctggcgtttcagcaacacaaccaccctctggatatgtcctttttctgatatttagggagcgtgtgtgaaattagtttcagtttcgtgagatttttattgtgatttattgtaattggatttcattttatccaggaaagtgtcttcttt

SEQ ID NO: 13215 - DNA, 2642 bp, Glycine max
  Clone ID: jC-gmle01810019e09_FLI
tttcatttggcatttacatttgcatttgatttccgcgttcgcaagttgtaatcaaaatcaagccatagcgaccgaggaaggcggtgatcggcaatgagcagcggcggcggaggcgaaggagaaggagaaggcgcgtgtgagtcgaacgtcgctgattctgtggcacgcgcaccaaaacgacgccgcggcggtgcggaagcttctggaggaggatccgtccctggtgaaggcgagggattacgatagccgcacgccgctgcacgtgaagtcactccacggatgggtcgaagtgtcgaagtgcttgatcgaattcgatgctgacgtcaacgctcaggatcgttggaaaaacactcctctggctgatgcagaaagagctaaaagaactgccatgattgagcttttgaagtcacatggtggcttgtcgtatctggtcaggacttcaggcatgaggttaatttactagtgaagctttcgacaccctaatgtcgttcaatttcttggagctgttactgacaagaagccccttatgttaattactgagtatctgagaggaggtgatctttataagtacctcaaggacaaaggtgcacttagtccttcaacagccatcaactttggcttggatattgctagagggatggcctatcttcacaatgaaccaaatgttatcattcattgagacctaaagccaaggaatgttcttttagtcctctggtgctgaccatttaaaagttggtgaatttggacttagtaagctcattaaggtccaaagtgctcatgacgggtgaaactggaagctactgccacatggctcctgaagttttgaaataccggagatatgataagaaggttgatgtgttctcctttgcaatgagtgagatgcttgaaggtgaacccccgttttcaatttaagaaccttatgatggagccaaatatgtggcagaaggacaaaggccttcttttagggcaaagggttatatcctgaactgcaagactgttgttgttgttggcggctggggttagtctctgtggaggtttgggtgttttttgaggcagagcttattctcattttgctccaatggagatgcaggaccaaatagaaagcacaagatcaaccatatttggctcagctagtaacatccattccaatgctgaaaagcaggccgaaaatgttgctcccaaggtgaggaaaccatataccattactaaacaaagggagaagtggacagaggaagagcatcaaaagttccttgaagctttgaaattgtatggtcgtggctggcgccaaattgaagagcatataggtaccaaaactgctgttcagattcgaagccatgctcaaaagtttttctctaaggttgtgagggaatctgaggtcagtgatgagggttctatacaaccaattaacatacctcctcctcggcctaagaggaaacccctgcatccatatccccgtaaatcagttaattctttcagaggacccaccataccaaatgaaacagaaatatctccatctacaaacttgttggttgcagagaaagacaccccatctccaacctcggtgctatctacagttggttcggaagcatttgggtctcaattttcagagcagactaacagatgcctttcaccaaactcttgcaccactgatattcactcagtcagcttatcacctgttgaaaaggaaaatgattgcatgacatccaaagaatctgaggaggaagagaaagcatcaccagcttcacgtcctttatccactgtttctaacccaaaaatgtgcatgaaacctgagtttagttccaaggagatagaagatgctactgatatgccacaaaccactagtattaagcttttggaagaacagtctctatggtaggtaatcagaagtcactgaagatagatgatgatggtaagccgataactgtgaagtccgatgaagtagatgatgttgagaatgagaagcttggccaatcaggagaatccaagcaagtagatacacaattatcactcggcgtggttagtggtaactggcctataacacccgatgctgatggagctaatgtgaccagcatagagcccccaaaggagaaccaatgcttcagtgaatctgcacctgatgcattttttccgcagtggagtttgtcccaaggccttccacctttctacctgaggccatgcaatcaggtcctaaatcccttgcctcttaggccctcctctttgaaagtaagaacaagagaggaggaaagttgttgcactggttccaacactgaatcagtctgtgacatggaaaaccaaggcaagaactcagatgctgttgattctaagtttcaaaaatatcacgaggaaggagctgcaccccagaagaagcctgcaaggggatttgtaccatataaaagatgtttagctgaaagagatggacattcttttattgttgccatggaagagagggaggggcaacgagcacgtgtgtgctcatagccttacattctatttttacatgattcataatcatggtgttaatcagagaaaaaaaaaaaactgagagaaataaggacatgatttaggtagctgtgatctaattgtctaattgacaagcatctgatttccaattcttttttccaatatcttctttctttcacatg

SEQ ID NO: 13216 - DNA, 1786 bp, Glycine max
  Clone ID: JC-GMLE01810020E03_FLI
ctctgtctctctctctccaccattgccatggatccttacaagctccggccatccagcgccttcaattctcccttctggactacaaattctggtgctcctgtttggaacaacaactcctctttaaccgttggagctagaggtccaattctgcttgaggattatcatcttgtggagaagcttgcaaactttgacagggaacgtatcccagaacgtgttgtccatgccaggggagctagtgcaaagggtttctttgaggtcacacatgacatttctcacctgacatgtgcagatttccttcgagcccctggagttcagacgcctgtaattgttcgtttctcaactgtcattcatgagcgtggtagccctgaaaccttgagggaccctcgaggttttgccgtgaagttttacaccagagagggtaactttgaccttgttggaaacaaccttcccgtcttctttgtacgtgacggcatgaaatttccagatatggttcatgctcttaaacccaatcccaagaaccacatccaagagaattggaggatccttgacttcttctctcactttccagaaagccttcacatgttcacctttttatttgatgatttgggtgttccacaagattacaggcatatggatggttttggagttaacacatatacgctgatcaacaaggctgggaaagcagtgtatgtgaaatttcactggaagaccactagtggtataaagtgtctattggaggaagaggccattaaggtgggaggagccaaccacagccatgccactcaagacctccatgattcaattgctgctggtaactatcctgagtggaaactgtttgttcagacaatagatcctgagcacgaagacaaatttgactttgaccctcttgatgttactaagacttggcctgaggacattatacccttgcagcctgttggtcgcttggtcctgaataagaacatagataatttctttgctgagaatgaacaacttgcattttgccctgccattgtggttcctggtgtatactactcagatgataagatgcttcaaaccaggatattctcttatgctgattcacaaaggcacagacttggaccaaactatctgcaacttcctgctaatgctcccaagtgtgctcaccacaacaatcatcatgaaggtttcatgaatttcattcacagggatgaggaggttaattacttcccttcaaggtatgatcctgttcgtcatgcagaaacgttccccatacctcctgctatctgcagtggaaggcgtgaaaagtgtggaattgagaaggagaacaactttaagcagcccggagagagataccgatcttgggcacctgacaggcaagatagatttaatcgccgatgggttgatgctttatctgacccacgggtcacccatgaaatccgcagtgtctggatatcttactggtctcaggctgaccgttctctaggccaaaagatagcatctcgtctgagcatgaggccaaatatttaatgttgttgccaaccccagaatgattgttagagttgcagacgtgcaaagagtacgataaggatgtgattttcgatcaatttgaaagaacttatccatttcttgcaattttagttgtgtacccataactccatgcatgcaactcgttgagctatctcaataaatgccgtttgtatgtgttagtatttatatttatataccttttcggcatgtttcgctgctattgttgtggactatgtgttccttgtaatccaattaattaagaaagaaagtattaaattat

SEQ ID NO: 13217 - DNA, 902 bp, Glycine max
  Clone ID: JC-GMLE01810020G07_FLI
gtctatgcataagttaattcatttaatctagttattttgtttattccgttaacacttatgtatctatgctatttataagtgtaataaataaatgaaatggcatggtggtggtggaattgagttgatttagcatcatttgcattgcagccttccgggtgactatggatttgaccctctgggactttcagaccctgaaggaacaggagggttcattgagccgaaatggctagcatatggtgagataatcaatggtcgttatgcaatgttgggtgcagttggtgcaatagcacctgaaattctaggcaaggctggtctgatccctcaggagacagcactcccatggttcagaacgggtgtgttcccacctgcaggaacctacaactactgggcagactcctacacactgttcgtgtttgagatggcactgatgggatttgcagagcacagaagattccaagactgggccaaaccaggctctatgggcaaacaatacttcctaggactagagaagggtcttggaggttctggtgagccagcttatccaggaggacctttcttcaacccactaggctttggtaaggatgagaagtccttgaaggatttgaagctcaaggaagtgaagaatggaaggttggctatgttggcaatcttgggttactttgttcaagctcttgtcacaggtgttggcccataccaaaacctcctagatcatttggctgaccccgtgcacaacaacatcttgaccagtctcaagttccactgaatgtattatatgttattttacatattctttacgttgccaaaactcaactacctttctacctttctatatcatgtggacattttgttccttggtgtggcgctgtaagaaatgacatgtaaaacaactagaaacattcgac

SEQ ID NO: 13218 - DNA, 1148 bp, Glycine max
  Clone ID: JC-GMLE01810021A09_FLI
gagcaagttgaagagactgcttctttctgcaaataattttacagggaccataccagaaacatatagcaaactaaagaatctcactgagtttaggatagatggaagcagtttatctggaccaatacccagtttcattgggaactggaccaatcttatcagactggatttgcagggaacaaatatggaaggcccgattcctcccactatatctcagttgaaacttttgactgaattgagaataactgatttgaatggtggaccaagtatgacatttcctgatctgaagaatttgacaaaattgaaacgactggaattgagaaattgcttaatcacgggttctattccaggttacattggagaaatggcaaacttggctactttagacctaagctttaacatgttgactggttcggtcccagattcaatacaaaaattggataacctagactacttgttcctaacaaataattctctaagcggaccaattcaggactggatactgagcttcaagaataatatagatctatcttacaacaattttacaaactcttctgcaactagctgtcagctcttggatgtgaacttggcttcaagccatttttcttcagcagtaacttcggcgtcaactttttgtttgaagagggaccttccttgtgcagaaaaaccccaataaaaatgtcacgtctgtagtggatgtgctaacttagctgttaggatataaggagaaggaaaagttagttaacatagttagactattaataagttagttagttagttagaagagtttattagatataaatagggataaaaggataggggagattcagatttggataatttgtaattgagcattagttcttcgtgaaaaaagaaatcctttgtgaaggggaaatccttggaacaaagttttctctcctatatttagttcttttcttactattcaataaaatctatcttttctttcccattatgattcttggctcctaaaaattggtttgaccgattgcacgatggagaacaaagtcagcgctttggagaaattggccggcgagcatggaaaggtgattacagacttgaaaaaaaatatggatctcataaaagaaagattgttggacatgaggcaaatcaaggaattacttcttgaattc

SEQ ID NO: 13219 - DNA, 1359 bp, Glycine max
  Clone ID: JC-GMLE01810021E07_FLI
actagattcatttgagattgttcttgcaggtgctggtggtcacagtaaggaattggatggtgaaagtacccttggattctgatgagttgtatgaaatacaaagtcatgaatctagtttaaagaaaaaactcatccctcacactaaccaattcagggttctagacaaagctgctgttctacctgaaggcaatgaggcaaggagatggaaagtctgcacagtgacacaagtggaggaagtgaagattctgacaaggatgatgcctattcttctaagtacaatcatcatgaatacatctttagcccaattacaaaccttctccatccaacaaggtaccttaatgaacacatacattggcaaactgaacatcccagcagcttccattcccataattccattagtattcatgacccttctgataccggtttacgaatttgctttcataccacttgtccggagaatcactggccatccgaatggaataacagaactacaaagagttggggttggccttgttttgtcagcaatctcaatggtcatagcaggggtgatagaggtgaaaaggaagcatgaattcaatgatcacaatcagcaccgaatcagcctcttttggctctctttccactatgcaatctttggtatagctgacatgttcacattggtggggttgttggagtttttctacaaagaagctcctcaaggcatgcgttcactttccacttcgttttcctttctttccttgtccattggttactacttgagcactgcttttgttgagctcatcaacttggtgactagtaagattggcaagagcaagaaagggtggctagagggacgtgacttgaaccgaaaccatgttcaattgttctactggtttttggctatactcagcctgattaactttctcatttatctgatgtgtgcaaaatggtacaaataccaaagtgttgtaccatttgataagggaatgttgctcaaagatccacctcctcgtaatgatgaaaacgtgtactctactagttttgtatccacggttcaaaacattccccagaatgaagataaataaaccagaaaaatccactctcacgagaaattattatatggtccagaatcgcattattccaacttccaactgatctacacatgacatggaattatatttttatcagtttgttaaaaagaattaataatgtgtcacgtggagattggttaagattgtatagaatagactatacaataatttatacccactgaccatcttcattattgtactttgttgtgattcctgaaactgtatctttgaaaatattcttgtcaaccattatgtattttgtaatatcaattcagattatttcgcgttc

SEQ ID NO: 13220 - DNA, 1163 bp, Glycine max
  Clone ID: JC-GMLE01810025B06_FLI
caaacatttaagcagagagatcaaagttttgagaagaaagaaacaatggcgatacattgtgggttctacagtgtgaatggggggtttaagatatctgatgaagataaaagttacatgcaaggttgcaaagttgttgtatctacttgtgcatttggcggtggagatgatctctatcaaccgatcggagtgtctgaggcttcgcttaagaaggtttgctatgtagcattctgggatgaaatcaccctgaaagcgcaggaattagtggagcgcagaattggggaaaatggatttattggaaaatggcgtgttgttgttgttcgggatcttccttttgcggaccaaaggttgaatggtaaaattcccaagatgttaagccatcgtctttttcctcaagcaaaatactcaatttgggtagactccaagtcccaattccggagagacccactaggtgtgttggaagcactcctttggcgctcaaattctttacttgctatatcagaacatggagctcgcagtagtgtctatgatgaggctaaggctgttgtcaagaagaacaaagccaagccagaggaagttgaagtgcaactgaatcaatacagaaaagatggcttgcctgaagacaagagatttaatgggaaaaaagctctatgtgaagcctctgttatcgtcaggaagcatacaccagtaactaatctattgatgtgcgtctggtttaatgaggtggctcgcttcacttccagggatcagctcagcttcccgtatgtcctgtggcggctgaaagcattcaaaaatatcaatatgtttcctgtctgtacccgcaaggatcttgtcaatagtatgggccatgtccgcaaggccaaacctttgcaaagctgatttaataaaatttgttcaaagcaatgaatgcctacctgcattttcatctaactcattccttacttcattagtttctttagccaatctgaatcaggtatatgtgttttttttttttctatctcacccccttttctctcatagccagtgaatgattataatttgtatttagtatttactgtttactgtgagttctttgattaggttatttcagaaaggatatagaaaggcaaatcaaacaaaaaagagattttgctttggacctgtttccctatacaaatttctataat

SEQ ID NO: 13221 - DNA, 1219 bp, Glycine max
  Clone ID: jC-gmle01810026a02_FLI
cgttgtttgagaatgcagcgcaaagcaggtggtaaattccatctaaagctaaatattggtgcgagacgcccattcaaccataccgtaccagcagaggaaagagagaaaatttcagaacaaaaaagaagcagaggaaaagagagatagagagagaagaaaagctgtgaagagaagagtctgaaatctgaatcataaataattggtttttgagatgaagaactgcgagttgtgcaagcttccggctcggactttctgcgagtcggaccaggctagcttatgctgggactgcgacgccaaggttcatggagccaacttcctcgtggaaagacacacgcgcacgctcctctgccacgcgtgccagtcgcccacgccgtggaaggcctccggcgccgccctcggaaacaccgtctcgctgtgcgagagatgcgccggcggaaccaccgaacaaggtcaagagagccaaggaggcaatgacgacgacatagacaccgacatagacaccgacgatgaggatgactacgatgagagcgaggacgaggttgccgccgacgaggaggacggagacaaccaggttgtcccttggtcctccgagccgccgccaccagccccgagctcttccagcagcgaagaatcggttagccggtgcaacaacgtggacgaggtttcgaccacattgaaacgccgtcgccaggaggacaatgattttcagggttggaattcgaataattggggatgtgaacggagcgaagtggagagaggaggttggttggttcggttgcggcggagaaccgccgatgatgtggcggttgagcaacggagtgctagagcggcgtctccagacggttgctgtggtgatagagcatctgaagacgtttgatctgaagggacacgaggaatctcaaccgcgtgatctacggggccgtaccattggatattatttatgggctctttgattattaactttctctaacgttacagcactcaggttttgataatggcaatcaagtgtatggatcgttttttttattattcctattattttttgttttgatattttgaggatcatggttgtgggggtgatgtaactctttacttctattttattgttgtaaaataacatttttttcttcttctgtttataagtaggtgaggatgctttatgttgtgatgaatacataggaaaaaccacgaagcaaatgaatgtgattccttattcatg

SEQ ID NO: 13222 - DNA, 700 bp, Glycine max
  Clone ID: JC-GMLE01810028A02_FLI
gtcgctctggaaccattcaattgtgggatcgaatgagcggattgtgtgaaagacgctttcagcacccagaaggagtggtcacaaaaatgcagtggctgccatgtgggaatcagttcgtaagtggaagtgcagacaagtctctcgttctatggaacgcaagcgaaggctccactgcgtaccaatggagtggccgaagagtgctggatatcgctgtgcacccacacgatagcaaggtgttcgtgctgacatcagggtacgagattcgcgtgtacgacatcaccctcaaatcggaccagctgttcctgcaagccgaacatcttgtgtcgtgtctaagcatatccccgtctggaaagttcctacttgtgaactttgtcaaacaagagcaaatcgcgtgtgtggagattgtgactggttttgtgatagccaagtaccgcgggtttcgcgagcaacgatacattcttcgtccatgttttggaggtgaccacagcgagcttgttctctctggaagtgaagatggtgcagtgtatttgtggcagcgcgacagcggtaagcaagtgggcaagcttgatggacactcaagtgttgtaaatgtagtagtgcgccatccaattcattccaacgtgattgccagcgcaagcgacgacaagacggtgcgcttgtggtcactcaagtcactggagtaaacaaggctctaagagtg

SEQ ID NO: 13223 - DNA, 988 bp, Glycine max
  Clone ID: jC-gmle01810028f10_FLI
gcagaagaaataccggagaaaagagagttgttgagcagaagagtgttgtgttgtgcattcgcggaagaagaaggagcagatgggtaatccacggaaaccgagtaccgccgacgagcttcacacggcggcaaggtccggtgatctcatcgccgttaactcaattttggcttcaaatcctttggccgttaattccagagataagcattccagaacacctctgcatttagctgcattttctgggcaagcagaggtagtcacttatctctgcaagcagaaggctgatgttggtgcttctgcaatggatgacatggctgcaatacactttgcttcacagaagggacatttagaagttgtccgcgctctactttcagctggggcctctctcaaagccaccacccgcaaaggcatgacttcattacactatgctgttcaaggttcccatatggaactcgtcaagtacttggccaagaaaggggcaaaccttggtgccaagacaaaggcaggaaagacccctttggatcttgctaccaatgaagaaatccgctcctttctggaggattatgagaagtcagcaaagaatggagaattgggaaagaaagacaaagataaagctgaagaatctgatccaaagacatccacattgggatctgaaggtgatttgagttctgaacctgctgcagctgctattgatgaagaagacaatgtgggagagaagaggaagaagggtaatgaagatggcacaagagaagaagagtcatcacaaccaaaaaaggctagagttaacttaagtcatctccaaagttccgacgatacccaagaagaagaaaacctgtagtttggtattttcatagtagaactaaaattttgttattgtaatgtagtatgtaattgtatctgatttggaatccctttgttgggttagttggctggactatctgttgactgttaagtaacgaccgattctggattaatacaattttctcttgac

SEQ ID NO: 13224 - DNA, 1298 bp, Glycine max
  Clone ID: JC-GMLE01810028G11_FLI
gtgaaactccgctcaacttggaactgtctttctggacacatatatattctggtccaatagatgttacaagtgattttggcttccgcttcacactacacccctccattgtaaaagtgcctggaccatcaaaacttgtttcttgggtagcaaaatctgttacctctggtttggatgctttgtacctaactagatttgaatcccaagctgctgagcattggcaggctttatattcttctgttaattttggagctccatttctcattttatgttctgagaatgatgaccttgtgcgataccaaagtatctatgaatttgctcaacaactacgcaatctcagtggtgatgtcaaccttgtaaatttcagtagctcctctcaccttggtcattacaaacaccatccaattgaatatagagctgctgtgagccatttattagagaaggcttcttcaatatattcacaaaaaatgttgcttgaacgagaaagaactggtatggatggtacacaggatgagatatctgagttaatctgtgacctgcagaaggtggcaatcaattcaaataagagccttagaagagttgcagttgggccaaccgaccacttctttttgcctagttcagcaggacattacagtgatagagaatctggtgctccgcaagacgaacaaaaagaaaaacctgtttttgtacctagcttcccaagcatcagcgctcatagtgtccttggccaatttcttttcgacgtttgtgttccaaagaatgttgagggttgggatgtgaaatcttctgggaatctaaatgggaggtcatgtgcttcagctccaaggcattcactattcaggggtactaaacgcatcggtcggtccaaattatgaagttgttcccatatctgacttgaggagatactttatgataaacctgtttgaaacatcagcagtttccctagacaatacaggaaggtatgatagattttggtgcaatgattggctgttatgtctggcaggggacatgtaatggctgcaatggttcaacaattaattccttggcacttttgagaaagtgatggggtgatgtggataaaggttacttgagttccattccttctaatggccctcagaaaaagaaaaaaaaaaccatgactgttgtatcagaaaaaagagcttctgatagttcaaacaggttgatgcttggctatggtaattactcatttggtaattgcatttgcatgaaatgggataaactgtactgacacttatttgtagttagagcaaaagtaaatagatgtacataatatatttttg

SEQ ID NO: 13225 - DNA, 440 bp, Glycine max
  Clone ID: JC-GMLE01810029H10_FLI
ctgattagattaaaaaatttaatcaggagacaatatactttgacattgttaaatattctttgacctaagaaattattccaatttaaatgtatattgtctcctgattagattaaaaaatttaagagaaattacaatagcctctattcaaagaggagaactaggtctagatattatgatgattcaaaatcagaagaatttaattcttctaggcttaaggaaaaagaaaaataacaaatttatgaaaaaagaaatatttgttatcgaaccagttcgcctgtctagaaaaaacaataaacaattttttatgtatcaaaccataggtctttcattaattcaaaagaataaacgaaaaatttatcacaaatacccagaaaaaattcatgttaataagaaaaatttttataaatatattacaagaacaagagatcaaaaaataacag

SEQ ID NO: 13226 - DNA, 528 bp, Glycine max
  Clone ID: JC-GMLE01810030A04_FLI
gcccagggctatggatccttgggaatgatgacatccgagcttatgacccccgatggtctgactatggagtctgaggccgcacacggcactgtcactagacactacaggcaataccagaaaggccaggagacgtccaccaaccccgtcgcctccatctttgcttggacaagaggtcttgccttccgagccaaacttgacgacacgcccgctttggccgaattcgccaaggatctggaggccgcttgtgtcgaggtcattgacaaggacagcgtgatgacgaaggatctcgctttggccatgaagggaaagaacatgcagagaggggactgggtcaccaccgacgagtacatgaaggcggtcaacaacaaactcatcgagaagatcaaggcgaggacatctgcatagtgttggctcgacatatcccctctgcgccctgaacggctggccctgaggaaccggggcttagctaagcctgtgcatagtgcacaaaaggtgcaagtgcgtgagtatgcatatcgtttttggttg

SEQ ID NO: 13227 - DNA, 1268 bp, Glycine max
  Clone ID: JC-GMLE01810030A10_FLI
ctcgtcgtcaccatgccgcaaggggattacatagagcgtcacagaagagactatggctaccgtctcgatcacttcgagcggaagcgcaagaaagaggcgcgtcaagttcacaaacgctctgcaattgcccagaaggtttaaatcaaaaattttgtttttaattggtttttgtttaacctagttctattgtcttaattctaattattcgatttttgttaatttgaattgaacaggctctgggtattaagggcaaaatgattgccaagaaaaattatgctgaaaaggcacagatgaagaagactttggctatgcatgaagaatcaacttctaggcgcaagactgatgataatgttcaggatggagctgttcctgcttatctccttgatcgtgataacacgaccagagcaaaggttcttagcaacaccattaagcaaaagaggaaggagaaggcgggaaaatgggatgttcctctacctaaggtacgtccggtggctgaagatgaaatgttcaaagtggtccgtactggtaaaagaaagaccaagcaatggaagaggatggttacaaaagctacatttgttgggcctggttttaccagaaagcctccaaagtacgagcgattcattcgtcctacaggattgcggttcactaaagctcatgtcactcacccagaacttaaatgcacattcaatctagaattaattggagtgaagaaaaaccccaatggccctatgtacacctctcttggtgtcattaccaggggaactataattgaggtgaatgtcagtgaacttggtcttgtcacacctgctgggaaagttgtgtggggtaaatacgctcaggtcacaaataacccagaaaatgatggttgtataaatgctgttttgcttgtttaaggtcatagcaaccatcagggttccagcttgatttcaaaggcagtggtcaagtccctctcctatgatttttgtggtcttcaaccccaatcttcaagggaaaatcttacaaactttgttggtaccagagagaagattgtctgagaaaatagtgaagcatttttgttttcttgtttggatagtcaatgcaattatctgatctagcacttaacatttaagataactattgtacaacaagagttaagacaaacaagtctcataaatttatgtaatttatttacaagacacagcattttgagtagctgtattttttttatggttcgggtattatgtactgcgaaatctattatctaaataacatgatgtacaattgaaatt

SEQ ID NO: 13228 - DNA, 1414 bp, Glycine max
  Clone ID: JC-GMLE01810030C07_FLI
gttaaagggctttgcatgcatgggaacttgaaccagagcttgcagcttttggataggttgacgaagaagggactcgtcccaaatgcattcacgtattcgttccttctcgaagcggcatataaggagaggggggtggatgaggccatggagcttttggatgatataattgccaagggtggggagcctaatttggttagttacaatgtgttgttaaccgggttgtgcaaggaagggagaactgaagaagctattaagcttttcagggaattgcctgcgaaagggttcagtcctagtgttgtgagtttcaacattttgctgaggagtttgtgctatgaagggcggtgggaggaagcgaatgagcttctggcggagatggataaagaggatcagcctccctcggtggtcacttacaacatattgattacttcgctttcacttcatggaagaacagaacaagctttcaaggttttagatgaaatgacgaggagtgggttcaaagcgagtgctactagctacaatccaatcattgcccgcctctgcaatgaagggaaggtggatcttgttctccagtgtctagaccaaatgattcaccgacgctgtcatcctaatgaaggaacgtacagtgctatcgcaatgctgtgtgagcaaggtaaggtgcaggaggctttctttataatccaaagcttgggtagtaaacaaaacttccctatgcatgatttttacaagaatttgatagcaagcttgtgtaggaaagggaacacatatccagcctttcagatgttatatgaaatgataaagtatggattcactccagattcttacacttattcatctctgattagaggaatgtgtagagagggaatgctagatgaggctcttaacatattcaggattttggaagaaaatgaccacagacccgatattgataactacaacgcacttatacttggtttttgcaaagctcagagaacagacttatcaatagagatatttctgatgatggttaacaaaggatgtgtgcctaatgagaatacctataccattcttgtggaagggcttgcttttgaagaggagacagatatagcggctgacctgatgaaagagttatatctgaaaaaggttctgagccaaagtactgttgaaagactttgtatgcaatacgacatcaaggaattagtagcaacagggtagtgaagtgacatatactcccatagtatacaacagaaagtaagtagaggtatatgaatgccttcatatatgaatggagttttctcagcttgattgcctttagacgttgattagtcaggtaaaacaaaatgttcccaaatgcttggaattttggttgaatgtaatgtttagaaatgattaatgaaaaggttcaagcatataaattaatgctgactaaattctctcc

SEQ ID NO: 13229 - DNA, 2019 bp, Glycine max
  Clone ID: JC-GMLE01810033B05_FLI
attgaatgattgataatcttattaagatgtcacaatgaaggtgaactaaatcattgtttacaatagattaagcaccagcacaaatatgaagaagctcttacaatgatcaatttccatgtcacaaaaagttattaaacggtagtaatgcagggggacaatcagtggagtgagagaatgaaacatttttacttctgagttgcagtattggacaagtcttaacatatttaatgattcctttgtagctgggaatttttatttggcagcaatctaatttgtatggaaaggagtaccggaactctgtcaatcattgcaggcatgtggatgccatcaaaggaagttcaagattaattgctgctatcagaaatgttttggaatgtcaatatcatcaacatctacccagaatctaataggtgtgtggatggccttgcgaaaccagctttgatgattttttattctctgggagttgtttctcctagatttgtttctgtaaggcctcgcccagtataaaaaaagaaaaagaaaataatggaagagagaaggttctacacttttacacttcaaaaattgagaaaagcatctcctatttttgttacaaattattattattatctttatattttcagttgacttcatcttaaaaatcatgtgttacgacttacatgtatacttacttatacaagaatatgtaaaaaaagtatttttataaattaaatatattaatatcttaagttccttaagaattgaatttgttttatataaaaaaattctattttgttctttatatgcatagtcaattaaaattagactaatgaatatattacctaagagagagaataaaagtttcaaactaataaaagaaatttaaaaataattaagaataatttaaaacaaaatgtattaattaagaacaaaatcaatattagcgcatataaatggaattattttatttgaagaaagaaaagaaagataaagttgaatggatagattgagttgtaacctgtagctagcagcctcattactctttaaggggaaacatggcattggcagctaatgctactccctctctggccttcgcttcttcctccttactgaaccacaatccccaatttggtgctgctcccaaacgattcgtttcttcttcttcttcttctttgtgccttgccgcggggctcagctccaaggctagggccttcagtttctctgcctcggctgcggcccttgacggagaagaactcgcggtggaagaaacgtggaagctagcgagaccaaccgaagtgtacgtctgcaaccttccacgaagctgtgacacggagcaactacttcatatgttcaaccctcacggaaccgttctctctgcccaggtttattgcttatttaacatcctactatcttctgttttcttgttcttttgtttatccctcgtgatttctctttttcaggtttgccggagtgcggaaactggtgaaagtagagggagtgcttatgtcacaatggcttctattaactcggcaagaaaagcaattgcggcattggatgcatcggttagtcactcccactccctgcttctatttcgttcatatcttctggctgctgttttatctgaaatttcggttttttacgactcaaggattttggtgggcgtgaagtgcgggttagattttcagctgagatgaatcccaagagaaggaatcttgaaacaatgaactcatcacccaagagagttatatactatgaaggtcctcataagttgtatgttggcaatctttccaggagtgcggggcctcaagacttgaaacaactttttggtagatttggtattgtagctagtgtaagggtgttgcaagatttgaggaaagggaatcgcagggtctatgcgtttgtctcttatcattcagagtcagaacgtgatgcagcaatgtcgctcaatggaacagtataatctgcctctgccattttccatttttctgcttcttatttcttttgcttgagttgtgtctgatacccggtctggtctggtct

SEQ ID NO: 13230 - DNA, 2299 bp, Glycine max
  Clone ID: JC-GMLE01810033E06_FLI
gacgatctcgccattatgctggcactaggtatttgaggcgaggtgtaaatgacaagggtagagtagctaatgatgtggagacagaacaaattgtatttgaggatgttcctgaaggtcttccagtccaaatatgctctgttgtccagaatcggggttcaatccctctcttctggtcacaggaaacttcacgtctaaatcttaagccggatattatattgtcaaagaaagatcagaattatgaagccactagacttcactttgaaaatcttgtcaaaagatacgggcatcctgtaataattttgaatttgattaagtcacacgagaggaaacctcgagagtccatacttcgttctgagtttggtaaggctattgatttcattaacaaagatttatcacaggagaacaggttgaggtttcttcattgggatcttaaacattttcagagcaaagcgacaaatgttttgctacttctgggaaaagtggctgcatatgctttgacagtaacaggttttttatattgtcaagtgccaccaactcctagacctgaagactgtataaaatgtccatctattagctttcaatccacaagacaagctgatgtcgacaacaaagatggtaatactttagagaggaaacctagtggagaaagcaaccttgctaacggaaaccattttgtcaagccacctatgttccagaggggggttctcagaaccaattgcatagactgcttagatcgcacaaatgttgcacaatatgcatatgggttggctgctcttggccaccagcttcatgctctgggaattattgaccacccaaaaattgaccttgatgatcctctaagtgatgatttgatgggattttatgagcggatgggtgacacacttgcacaccagtatggtggttctgctgcacacaaaaagatattctctgagaggagggggcaatggaaagctgcaacacagtcccaagagttttttaggactcttcaacgctattatagcaatgcttacatggatgctgaaaagcaaaatgcaattaacatattcctggggcattttcagccacaactgggtaagcctgctctttgggatttgggctcagatcaacattatgatatagggagatatggggatgatgatgcaagcttatgtggtaactctgaattatggctttttaggtcatttgtcaaaaggtgtttctcagatggaagcatcattgatggcaattctacacctatgtcaaccccaaatccaaagcttgaaaaattctcaaagctaggtttgcaggaccaatcagaagaaggaagcaaggctttttgtgagtcatcgcctgaaatatcaacttcttctgagactgagagtgacatgtcattttcaaggtacactcccttaatgcctcatagacatctttttggagatatacaaagagagcgcttctttcatagtgaccatatttcctattctgggcatggagattcattcagctcttccaactttgttgacctggattggctgtcttcaggaaattcatgtgaagaagagccatttgagaggttatcaattaccaactcttcgattgctaggctttcttcagaaaatgttatcaatggagttattatgggaggagatactccctccactagtgatttggactcaaacaataagggaagagagcgaactgggtcagagttatccaaccgtgatggccggtccaaagttctagaggaatttcctgatacttttgtaaactgggtgactaatggacagacactttgcaattgaattttcacatagaatggtcctttgcatttatatatatgatgtaaatttatttaattgacttggcttgcccgaaagatgctgaatagaagaagagactagaatgagctaagcatatgatacagacggggcaggaaaaataaataaacaggctttcaattcaagtaggcttctctgtaaggtgccgatcgatcgcagaagaaatcctaccggctttcttggtattgacttgaatcattaattctgtcgtgaaaatctcaatcaaatcttgaggtataataggacagagtaaatagcaagctgttgtaaaattgtttttttcttttcagctttggagcttattgtcttactttttctttcatcagttcatgaccatattaggtgcatttgtaaatatgtatgttaccctgtatgtctgagctccacttctagaattgcaaataattaattcttttaaataattttgcttcttgtaatgtgtaattctctcccgctgtcaaactagcggtgatttatgtttt

SEQ ID NO: 13231 - DNA, 2262 bp, Glycine max
  Clone ID: JC-GMLE01810034B10_FLI
cgaattatatctacaatttctcgtttgtgacgaacgagaacgagagctatttcacatactccatgtataactcgtccatcatatcgcggttcgtgatggatgtctcggggcaggtcaagcaattcacgtggttggaaaatgctcagcagtggaacttgttttggtcgcagccgagacaacagtgtgaggtttatgccttttgtggcgcgtttgggagctgcactgaaaattcaatgccgtattgtaactgtttacctggttttgagccgaaatcaccgtctgattggaatctggttgattactcaggtgggtgtgaaaggaaaaccatgttgcaatgcgagaatttgaatccctctaacggggataaggacgggtttgtagcaattccaaacattgcattacctaaacatgaacaatctgtgggatcagggaatgcaggggaatgtgaatcaatttgcttgaacaactgctcctgcaaagcttatgcatttgacagtaacgggtgttcaatttggtttgacaaccttctgaatttacaacagttatctcaagatgatagtagcggacaaactttgtatgtcaaacttgcagcatctgagtttcatgatgataaaagcaaaattgggatgatcattggtgtggttgtgggtgtggttgttggcattgggattctcttggcaattcttttgttttttgtgattaggcgaaggaagagaatggttggagcaagaaagcctgtggagggttcgttggtggcatttgggtacagagatttgcaaaatgcaacgaagaatttctctgagaaattgggaggaggagggtttggttctgttttcaaaggaacattgggtgattccagtggggtggcagtgaagaaattggaaagtattagccaaggagagaaacagttccgaacagaagttagcacaatagggacagtgcaacatgttaatctcgttaggctccgcggattctgctccgaaggtgccaaaaggttactagtttatgattacatgccaaatggctccttggatttccatttgttccataacaagaactctaaggtgttggactggaaaatgagataccaaattgcgttgggaactgcaaggggattgacttatcttcacgagaagtgtagagattgtatcatacactgtgatgtgaagccagaaaacattctcctagatgctgaattttgtcccaaggttgcagattttggcctggctaagcttgttggaagggatttcagcagggtcctcacaaccatgagaggaacaagaggctatcttgctccagagtggatttctggggtggctatcacagccaaagctgatgtgtacagctatggaatgatgctttttgagtttgtatcaggtaggaggaactctgagccatcagaagatggcaaagttaccttcttcccttcctttgcagcaaatgttgttgtccaaggtgacagtgttgctggcctgttggaccctagtttggagggtaatgctgagatcgaggaagtgactagaataataaaagttgcttcatggtgtattcaagacaatgaggctcaacggccaagcatgggtcaagtggttcaaatccttgaggggatcttggaggtgaatttgcctccaattccaaggtcccttcaagtgtttgttgataaccaggagagtttagttttctacactgaatcagactccacccaaagttcccaggtgaagagcaacgtctcaaagacctcctcttctcatgccataagtaacatctcttcagcaagctccaagtccttgggaggagaaaattagagggcatgtttatgtctttttttcttattcggtttttaccaatgtaattgtaatgtatggtgcaaatcactagattttattttccatgttagtttatttttcaatcaatatataatttgatatagctgttactgtattcaatgatatgatcaagatctggagaggtgtttggtgagatcagacaagatgttatcttggttatccagaggcctctccatctctggaattttctaacaggagaaagacacaaagtagatatgagtgcgaattttttaatttttctcattagaaatttccggttcaagaaaggagtatgctgtgaggaggggagtggtttgtgctacctattgtatcaaaatatgataggtttggtttctctctggtattttattatcttttattctgtaatgccatgctaaatgcctaaatttatgcaccccattttattttggtcttc

SEQ ID NO: 13232 - DNA, 690 bp, Glycine max
  Clone ID: JC-GMLE01810036B12_FLI
aaaaaacctctcaaagatatatcagttgccacaggagttgcagaaggaaccattaggaactcatacaaggatctttatccccatgtttcaaaaataataccaagctggtatgcaaaagaagatgatttgaagaacctgtgcagtccttaaagcaaaacaatagcgaccacatttaacaacttagatgccattggaacgttctgttctggatctactgaactgttttatacttttaattcaaaatgaaaatgcctcttctattagtattttcttcttctaactgcacattaattttggttaaccctcccaatttgagaattctaggggagaggcaccgctgatatatagaattagctcaacctttatgatagtaagctcattttgcacttgcgttgaaattgctgggtcatatagggtaatagttatttgtagcatgagaaatgctaaatgctctaattttttttttgaatatatcttttattattagatgaagtttattggaaatctcaattttgtagggttcattattttttctttttaattttgtaattttaataaattaactaacaaataacaatagtgtgttgtaggagtgtgttagtgctaatgtgttaaaaaaagtacgttggagagtgtatctttagcaattcttttgtagctttgtagattatacaagatactattgaatct

SEQ ID NO: 13233 - DNA, 1711 bp, Glycine max
  Clone ID: jC-gmle01810036d01_FLI
ctttcttttcaccatgttattgctaaacggttcatgacatgcccttgaaaaaccttggttggtattaattgtagcactagctttgattttggtgccaagttcttgagctgtggtggtgctgaccctgaaaagttctccaagtccaacatgagataaggctgaaatattggagctggtttcaattagtagacaaatttggttgctgactttcgtattcgtgtgtcttcaatagatggtatttttaaatagaaagcatagttgacaatttcttgaatgttgttgtttcttgccttttgaattatctccaagacttcaaataagttggctctctcctacaattttttaaatgctattatgttcagtattgagaatcaaacaagacttggtctcaggcacaacaggtttttcaattttggactagttctgatttgcatacttatatagaggcaaaaggggtatcctctttttcattatcctctattcatacatatccaaagacaacaacatttcctttcagtacccctattagttgaatcagcatggcttcatttccttcaaattctgcattggaacatagcatggccagtgcacaacaaaacagtaaccctcatgcttcctcaccttctttcatgactagagtggccatgagaatatctagatcaagatggttcactttcttgagaagagtattccattaccaaaacggaccaagatccaatctcggctccaaccctttcaattccagcacttggatgatgctggagttgattgctttgttggtccaaatagcaagcacaacattcactttggccatttcgaagagtgagaagccaatttggcctatgagagtgtggatagcaggttatgatattggttgtgtccttaatcttctgctactttgtggccgctaccatcaacttcatgtgactcaagggaataatgctcttagcctctctgaattggagcagcagagaaacaatgaagaatcaagtgtgtacaggacttcacatttgatagacaaatgccgtagttcactagagcttttctttgccatatggttcgtgatgggcaatgtatgggcctttgactcacgttttggatccttcccacaagccccaaaactccaagtgctctgcatcatcttgctttcttggaatgcaatatgctactctttccctttcctattgtttttgcttttgtgttgttgtgtgccactaatgagcaccctccttggatacaacatgagcatggggtcctctgctagaggggcatctgatgatcaaatctcacaactcccaagttggagatataaagggcttcattccaacttggacattgccaatgactctcaaagcagtgaaagattgatcaaccaagatccagaatgttgcatttgcttggccaaatacaaagacaaagaagaagttaggcaattaccctgttcccatttgttccacctaaaatgtgtggatcaatggctaagaattatatcatgctgccctctttgcaaacaaggattacaaaggtagcaataggacgaggcagaaaatacacaagaacattcataatcttatacattcccaattattttgttttatctcctttggttacacgagtgagtttgtacatgtacagaagaggtcaccagtaaccaaaactacattgaatacttggttcttaggagtgaatcaatccctttatttttcaaatt

SEQ ID NO: 13234 - DNA, 1137 bp, Glycine max
  Clone ID: JC-GMLE01810037C06_FLI
gggagaggagcatggaattcaaacctcccaaattctatggagaaggattaaattgccttaagctgtggagagctgtaacgagattgggtggctatgataaggtgacttcatgtaaattatggcggcaagtgggagagtctttcaagcctccgaagacatgtaccactgtctcatggacttttcggggattttatgagaaggcacttcttgattatgaaagacataaaataaaaggtggtgagctgaatgttcctgttgcttctcatccagagcctataaatattgaaaatcaggcctctgtatcaggtagagcacggagagatgctgcagcacgagctatgcaggggtggcactcacaacgcctcctaggcaatggtgaagttagtgaccctattattaaggataggaattctgtgtctgtgcaaaagcgtgaaaagcagcttaaaagcatcaatatacacaaacgtaagaagccatcttcaccttacatggataatgcagtcaaagctgcacgcagtaaaccgtctaaaccacaattggacacaactgtgattgatattggacctcctgctgattgggtaaaagtgaatgtacaaaaaactaaagattgttttgaggtatatgctttagttcctggcctgctgagggaagaggtccgtgtacagtcagaccctgcaggacgcctagtcataagtggggagcctgaacatcccaacaatccttggggtgtgacacctttcaaaaaggttgtcagcttgccctcaagaattgatcctcatcagacatccgcggtggtgacactgcatgggcagttgtttgttcgtgtcccgtttgaacatttagaatagtggtcgcttatgctttcaatgcctctctctttgaccatgatatgtatgtaggatagttgacccggaaaccatgtagaaaactatttctgcctgtaaaacatgtcaatttctagcttagcgtagcatttactttaatgtttgagttcacttataaattctcgtacatgattttctcaaacaatactttaaccttgttaatatgagttaggtaggttctgtaattgccgaggatcaatgttgtaatattgtaactttgttagtgatattacatttaacttttgaccttttt

SEQ ID NO: 13235 - DNA, 1761 bp, Glycine max
  Clone ID: JC-GMLE01810037H09_FLI
agagggtgcaactttggaccctgttacaccaagccaatagccaagttattgcttgctatcagaactcagaagaggttgaatcatggagatgaaagtaaaggagaggattggtacagtattctgtaaactgtagttgattgaataatatgatagtacctatttataaaacaagagtgatagtcttctaattgctcacctaactaacatctaagttctaactaactcttctaaaagaatgacagctgcatgagttgagtatgttctctgatactatatataactataaattgcctaattacatgtataatttccacttatttatcaatgaaacggcatgcagaaaaaataaaagaccacagtaatgcagatgtaacggtagacgaatatcatcggtataaggaggatattggaatcatgaagtacatgaatttggatgcttatagattctccattgcttggtctagggtactaccaaaaggaaagcttagtgcaggtgtaaacaaagaaggaataaactactacaacaacctcatcaatgagctactggctaatggtctgcaaccatatgtgaccctttttcattgggacgttccccaagccttagaggatgagtatggtggtcttttaagccctcacattgtagatgattttagggactatgctgaactttgcttcaaggaatttggtgatagggtgaaacattggattactttgaacgaaccgagcactgtaagcatgaatggctatgcagtgggaagccatgcaccaggtcggtgttctgattggttaaaaatgaattgcacaggtggtgattcaggaactgagccttatttgagttcacactatcaacttctttctcatgctgctgctgccaatctgtataagaccaagtatcagacatctcaaaaaggtataatagggattaccttgaatactgactggtttttgccggcctcagaaaagataacagatcgagacgctgcgcgtcgagcccttgacttcaggtttggatggtatatggatccaatcacctttggtgactatccaaaaagcatgcgatctttggtgggaaaccggctaccaaagttctccaaagaagaaaccaggcaacttaaggggtcatttgattttctgggcctaaaccattacgcaaccgtttatgctggccatgcgcctcacctacgtggtcccagaccaaccctactaactgatcctctaatttatgttacaaatcagcgtgacggcagggtcctttgtccatacgctgcttctaactggttatgcgtttatccacgaggactccgacaactgctgctttacatcaagaagcaatacaacagccccgtaatttacattactgaaagtggttatgatgagctcaacgatccaacactatcacttgaagaaagcatgatagatacttacagagttgattacttttatcgttatctttattatcttcaaatggcaatcagggatggtgtaaatgtcaagggatactttgtatggtcattgctggataacatggagtggagtgctggctatactgtgcgatttggattggtctttgtggattacaaagatggcttgaaaagatacctcaaactctcggcacaatggttcaagaattttctcaacaaatcttagtagttacacatatatgttcagcatggttccaagtaaaataagatatgaagttgatgttttaaaataaagtgattgtttgaacatatccagtggattcaagttcaaatcttgagt

SEQ ID NO: 13236 - DNA, 1013 bp, Glycine max
  Clone ID: JC-GMLE01810041B11_FLI
cgatcacgcagaagacgaacttccatgtcgaagacctgaacctgttccctatcgacaatggccacaagaacaaggcgcataagctcaatgctggatatcatgagtgggacttcagcttcaagctgccgtccaacttggatcagagcgttgaggggctccccaccaattgggtcgtctacaacatcaaagcatctgtagatcgcggctacatgagcaaggcgctctctgcctcaacgcacattcgtgtgattcgtaccctgggacgcgatatgctggagtcaatgccgatggagcagatcaacgaagatatttgggcgaataaattggcctataagattactgttccccagaagaactacatcgtgggaacacacatcaaggccgacttcgtgctgataccactaagaaaaggtgtggagatcgcgacgatcaagatggaactcatcgagtcgcgccaactcttcgctgattatgcgggccggcgcatcagccaccagcaagacgtccaggttgctgtcaccgaaggcgatatgccagccgactctgcgcaacgggtgcccgatggtgttgagaacggagacgagcttttcgacgagtcgcatcgctttgccatgacgctcgaactgccgaaatctctcaagaactgccgccagtccgttgacacagagaacattcgcttgtcgcataaattaaggctatacgtcaatctgaagaatcctgaaggccacaccagtcaacttctcgtcaagaaccacgttcacctgttcatctcgccaaatatgccccctgcagaggaccaaagtgttcttatcgaccaacatatgctcaaccagcaagcggtacaagatgaggtcaaccagaatgctccaccaacctatggactgcatcagctcgatgaattgtacaacgatatcgatccttcgggcttcatgacaccaggcggctaccacagcatggtgggcagcggtgcaaacacacccttctatgcacagagccgcagtggctcggccgag

SEQ ID NO: 13237 - DNA, 1183 bp, Glycine max
  Clone ID: JC-GMLE01810042D06_FLI
tggacatattggtgaaagacagcaatggaaatccatacatggttccaaacacagcttttgatgttggaatgctagatctaacgcacccaaaaactgcaacttggttcaagcagattctacgagaaatggtggacgatggagttagaggatggatggctgattttggtgaaggccttcctgttgatgctgttctatattcaggtgaagatcctatttcagctcataacagatacccagaactatgggccaaaattaacagagagcttgtggaagaatggaaaagtagctccctggacaaggtgaaggaagatgaagacgagggcttggttttcttcatgagggctggttttagagatagccctaagtgggggatgctattttgggaaggagaccaaatggtcagttggcaaacaaatgatggaataaagagttctgttgttggcctactcagcagtggaatttctggctatgcctttaatcacagtgacattggaggatactgtacagtaaacttacctatagttaaatatagaagaagtgaagaattgcttttgcggtggatggagctaaattcttttaccacagtcttccgcacccatgaaggaaacaagccatcatgcaacagccagttttactcaaaccaccaaacaatgtcacactttgcgcgttctgcaaaagtatacaaagcatggaaattttaccgaattcaactggtgaaggaagctgcacagaaaggattgcccatatgtcgccacctatttctccattatcctgatgatgaatgtgtgcatcgtttgagttatcagcagttcttggttggttctgagttcctagtggtgcctgtccttgacaaaggaaagaaaaaagttaaagcttattttccattgggagagagtagcagttggatccatatctggacaggaaaagtgttttccaaacaaggacgtgaagaatgggtagaagctccaataggataccctgctgtatttgttaaggttggctcccaggttggagaaacctttttgaataacctgagaagtttaggcattctttaataaagcattcatcaaaggatgaactttagatatgtataacatagcatccaagtgatttttcaattcttgcccctgaattaattcgcttgtatcgttgcaatcaaagctagtgtaaagaaattagttgg

SEQ ID NO: 13238 - DNA, 964 bp, Glycine max
  Clone ID: jC-gmle01810042e11_FLI
cactatctcatttctttctattcatttcttcattccaccatcaccatggtcaaggagaagaagaacgtggtggtcaagaacaagaagccaaacaacaatgccgacgagcttcacttccgcggcgtccggaagcgaccatggggccgctacgccgccgagatccgtgaccccggcaagaagacccgcgtctggctcggcaccttcgacaccgccgaggacgccgcccgcgcctatgacgccgccgcccgcaacttccgcggccccaaagccaaaaccaacttccccgtgccccccgacgacaacaacaacaacaacgttaacgtgaacaaaaacaagagtgttaacgttaaatctacagtcccagccagagcagcaccgtggagtccgccaccccggagcgtgaagccacgcgccgctccacctccgccgcaatcgaccgtttcccgttcctacccatccagcagcaaatcctcatgacccaccccgtcgcagcacccatgcgcccggttttctttctcgaccgggcccacttcatgacccagtctttcccgctccggttcgaacccggtccggtccagagcgactccgactcctcctccgtcgtcgtcgattgtcagcccaaaagagagctcaatctcgatcttaacttggctccgcctaatgaatattaacccttttttttatctctttattttttcataaaaaaagatagcagaaagaaaggactaaggagattttttttctctcttttttttttttggaagattaatcttccattaagaagttaattagtacatcctttgatgtaaataggttgattttctcttcttttttgttttttaggtccttgatagtattatcagaggacatgatctgaaattgtctagatctgatataatttttcatgtaacatctgaatatctgatgtaattctggctaatatcaattaatcttcttttattac

SEQ ID NO: 13239 - DNA, 1413 bp, Glycine max
  Clone ID: jC-gmle01810043d11_FLI
cccatccaatcgcaaccaggaaatggatgtggttccttatccagtaacacccccaaacctcatttctctgccacatgaaccctcccaaacacagaaaccatagcaaaaagaaacccagattattgattattaataatggaagccatattcgtcaccaaacccgcttcccattctctcctcttaactaaactctctccgaatcccaaacacttgttccctccacaccaacaatcctttcacaacatccgccacaaacccacgcgcttccgccccgtcatcgctgttttccaaaaccaacatcaacaagatgcagctgcagcttccaaccacaccgaagatgagtcctacggcgaagtcaaaggcatcattggaagcagagccttggaagccgccaccggaatggagtacctcatcgagtggaacgacggccacgcgccgtcctgggttcccgccgacttcatagccaaagacgtcgtcgccgagtacgaaactccctggtggactgccgccaagaaagccgacgagtccgcgttgaaaaacttaatcgaatccgacgacggccgcgacgtcgacgccgttgacgccgacggccgcactgcgctcctcttcgtcgccggactcggctcggagtcctgcgtgaagctgctagcggaggccggcgctaatctggaccaccgagaccggagcggcggcctcgcggctctgcacatggcggcggggtacgtcaggcccggcgtggcgaaggttctcttggatctcggcgcggatcccgaggtggcggacgaccgcgggagaacggcgttggatctggcgagggagattctgaaggtgacgccgaaggggaatccgatgcagttcggacgcaggattggactggaaggtgtgattagggttttggaaggggcagtgttcgagtacgcggaggtgcaggagattctggaacggagaggaaagggtgagaatttggagtatcttgtgcggtggaaggacggtggtgccaacgagtgggtgaaggcgaagtttgtggcggaggatttggtgaaagactacgaggctggcctcgagtacgccgtcgctgaggcggtgctcgcgaaaagggtagcggatgaagggacgccggagtttttggttaaatgggccgatttggaggagcccacatgggcagcccgaggagaatgtggacccagagcttgtcaaagctttcgagggaagtaacaaccaggcccagcccagtagtaatgggcccgctgtggtcttttccaatcaggatagccctagcctgtgatttttcatagtttgtttggactgggattttgttgcaaaatttcgggagcaaattaattaataattgttttgtaccaaatcaagttgtggacatgaaaaagctaatcaaatccaatacatattttcctc

SEQ ID NO: 13240 - DNA, 1801 bp, Glycine max
  Clone ID: JC-GMLE01810043H06_FLI
cagtcggataagggggaagcgagcaatactctcgaatgtcacagataagcattctgctacacataaccaacactgccttctcgtttgagcattatataaactcagtcggtgctcataacttttcctcacacgactctgctcactcatatttatattgaacaaacagagatcccaaatcaatggatattgaagcaggtaaagatattcctgtaagagacccagcgctactcgatgacgacggcagaatcaaaagaaccgggaacgtgttcactgctaccacgcacatagtaacggtggtggtgggtgcaggagtgctggctctggcatgggccatggctcagcttggatggatagctggcatagccgttatgatcctctttgcatgcatttctgtttacacttacaatcttgtagctgattgctacagatttcctgacccagtcagtggcaagagaaactacacttacatgcaggccgttgatgcctaccttggtggaaaaatgcacgtgttctgcggatccgtcctatatgggaagctcgccggggttacagtgggctacactataactagttctgtgagcttggtggctataaagaaagctatttgctttcacaaaaaaggccatgatgcttattgcaagttttcaaacaatccctatatgattggttttgggatttgccaaattttattgtctcaaatcccaaatttccacaagttaacgtggctttcaaccattgctgctgctacctctttcggttatgcattcattggaagcgggctttctctttcggtggtggtctcaggtaaaggagaagcaaccagtatatttggaagcaaagtaggaccagatttatctgaagcggataaagtttggaaggttttcagtgctttgggaaacattgcacttgcttgctcatttgctactgttatttatgacataatggatacattgaagtcctatccaccagaaaacaaacagatgaaaaaggccaatatgttaggaatcacaacaatgacaatacttttcctgctatgcggtggccttggctatgctgctttcggagatgacacgccggggaacatcctcaccggctttggattttacgagccattctggttggtcgcccttggcaatgttttcattgtagtccacatggttggagcatatcaggtgatggctcaaccactatttcgtgtaattgagatgggtgctaacatggcgtggccgcgttcagatttcattaacaagagctatcccatcaaaatgggctccttaacatgtaacatcaacttgtttaggataatttggaggtcaatgtatgtggcagtggccacagttattgccatggctatgccatttttcaatgagtttcttgccttgcttggagcaatagggttttggcctctcattgtcttcttccctgtacaaatgcacattgcacagaaacgggtaaaaagactatcattgaagtggtgttgtcttcaaatattgagcttcgcgtgcttcctagttacagtttccgcggcagttggttcggttcgtggaattagcaagaatataaaaaaatacaaacttttccagtataaacaatagggcatttggttgcacattccagtgtctcacatttgagaaatgtgaaaatagctatagctaggcagaaaaagaagggagacaagttaattaaaacaaggcagtgaaaattatctgaatgcaaaattatttgtcagctacattattccaacttacagtgtgagcaacactatttcaactagtcaaaatatttctgtctcagttatatc

SEQ ID NO: 13241 - DNA, 1385 bp, Glycine max
  Clone ID: JC-GMLE01810044A12_FLI
cctttgcaaaaccacgtttcgcaaactccactcagatacaccaattcacagtccgatacaaacaccaaacagccaagatgcaccgaacatacagcatgcgctcgtctcgcgcgcccacggcgtcgcagattcagagcccgccccctccgtcgtcctcgacgaagagcggacgtttcttcggaaaggccaatatcggccacaccttccgccacaagtcggcaggcgcattcggccccgacctcgcgaagaagctttcacagcttgtcaagatggagaagaacgtgatgcgcagcatggagctggtttccagggagcgcatggaggtcgctcaacaactctccatttggggcgaggcttgcgacgacgacgtctctgacgtcaccgacaagctcggtgtgctcatctatgagattggtgagctcgaggaccagtatgtcgatcgctacgaccaatatcgcgtcaccatcaagagcatccgcaacattgaggcctcagtccagcccagccgcgatcgcaagcagaagatcaccgaccagattgcgcagctgaagtacaaggagcccaactcccccaagattgtggttctcgagcaggaacttgtccgtgctgaggccgagtctctcgttgccgaagcccagctttccaacatcacccgcgagaagctcaaggccgctttcacctatcaatttgatgccatgcgtgagcattgcgagaagcttgccatcattgccggctacggcaagcatcttctggagttgatcgacgacaaccctgtcactcccggcgagacccgccaggcctacgatggatacgaggctagcaaggctatcattcaagactgcgaggacgccctgacgaactgggtctcacagaatgcatccgtttcctccaagttgtcgcagcgttcccgaactttgtcgcagcgccgccgcaacgctacccgccgtggcgaaggccatgacctctccggccaagaccagccactcgacagcagggagtccggcctctggatccccgccacagagcaccaaggtaacgactacgaggaccgtgacgacctcgatgatgatgtcaactccactattgctagcgagcatcagcgcggtcgtgaggaggagagggtcatcgctgcatagacgtctcactgacgtgtatgctagtgttggcctccgtgtcctctaatgatactccgcggttgacgatgtatacccccgacggagttaccgatgttgatggcgctgcggagagtgacttgacgcgtcggacttgcgtggcctcggcaatatgaaggagcgcgttttgtatacacgaacttcttgatgatttacgatgcgataggcggggtgggcatctcgcaataataacgtaatacagtaattgttctt

SEQ ID NO: 13242 - DNA, 980 bp, Glycine max
  Clone ID: JC-GMLE01810044G05_FLI
accttgaggatccaaaggctcaggaagaaattttacttccactttcaagattatgttgatttgattatctggaaggtgcaattcttggaccgacaccatttactaatcaagtttggtagtgtagatggaggggtgtcccgaaatgctgatcaccacccagcttttgttgctgtatataacatggatacaactgaaattgtatcattttatcagaattcaccagacgagctttatctgttgtttgagcagttctgtgaccacttccatgcaacatcaaggaattcaatgtatatgaatttcatatcttctcattcaaataatatccacgcactggaacagctccggagcattaaagataaggcaagcagctctgcacagtttgtgaagaagatgcttgcctctttgcccttcagctgtcagtcacagagtccttctccttacttcgaccaatctcttttccggtttgatgataagctgatttctgcaactgatcgacataggcaatcaactgaccatccaatcaagtttattttaaggaggcatccgtattctctcaaatttaagatcaaaccaggtcctgaagctggtagtatggatggtcgtgcaaaaaagatctcgtcgtttctttttcatccaattttgccccttgctctctctgttcaacagactttgttcttgcagccttcagttgtaaatattcactttcgaagatgagcgtagatttatagattacaaatgagagtagatttacatttacttgtcttccactgttaccgtctttactgaatcaagaggatgtatattcagtcggtacttgcaagccaaaatgtatgtcaatcagattctaacgattgctgtgacaatcgacgctcttctaaattttggtcattttattttattttaaaattttaaactaattaccgaaatttttatcatttaaaaaatattggaaaagtattatttgcaacagcattctaatt

SEQ ID NO: 13243 - DNA, 884 bp, Glycine max
  Clone ID: JC-GMLE01810044H09_FLI
cgcttgagctctgcgagatcttgagtcgccgatttgaaaagatgagtaagcttcagagtgatgctttgcgtgaagccatctcaggaatcatggccgattccaaggagaagaatcgcaaatttgtggagaccatcgaactccaaatcggtttgaagaactacgatccacagaaggacaagcgtttcagtggctccgtcaagttgccccacatccctcgccccaagatgaaaatttgcatgcttggtgatgctcagcatgttgaagaggcagagaagataggactggactggatggatgtagaagccttgaaaaagctaaacaaaaataagaagttggtgaagaagctagctaaaaaataccatgcttttttagcatctgaagcagtcattaagcagattcctcgtcttttgggtcctggtctcaacaaagcaggaaagttccctacacttgttactcaccaggaaactcttgagtcaaaggttaatgagtctaaggccatggttaaatttcaacttaagaaagtgctctgcatgggagtagctgtgggcaatgttagtatggaggaaaagcaaatcttccaaaatgttcaactgagtgttaacttccttgtctctttgttgaaaaagaactggcaaaatgttaggtgcttgtatctgaagagtacaatggggaaatgttaccgtgtcttttgaggaatttctttttttatttcggtgaaattgtgatcgtgcatgatatgttgattaatcttaatagctagatacaaattatcatcttgttacagttttgtgggatggatttttatgttaaagtgtttcgttttcatgttcaaaaacatttgataatgatatgcgctgtttttggtgctgcttttgtttttactc

SEQ ID NO: 13244 - DNA, 1132 bp, Glycine max
  Clone ID: JC-GMLE01810045A11_FLI
ccgccaccgattacaggatgcttcgaagcgctcgcagctcttccatccgcagcgtgcttgctgctcaggctcagcgtggatatgccacggaagctggcgccatcaagacgctcctcttcctcgagcaccgcgacggcaagatcaatccgggatccttgaacgctctcagcgccgcgacagcgcttggaggggacgtcgtcggcctcgtcacgggagagggagacgctgcgcagaaggtcgcagatgctgcaaagagccttccgttgaagagcgtaatcctgcagaagagcgagaagctcgctcatggactgcccgaacccttggccccgcttctcgtggatttgatcaagtctggcaactttacgcatctcgtcggcgcgcatactgcgcttggaaagaatgccttcccccgtgctgctgccttgctcgatgtagctcccatatccgacgtacagaaggttatctctggtgacaccttcgaacgccccatctatgctggaaacgctgttgcgacagtaaggagcaaggacgctatcaagatcttcacggtgcggacagctgcgttcgatgcagctgccgagagcggctcgggggcgagtgtcgaagatgggtctggcaaggaaggagaattgcagtcggaatggatctccgaagaattgacagtttcttcgagacctgatctgggcagcgcttcgagggtggtatcgggcggacgaggcctcaagaataaggagaactttgacaagatcatggaacctctggcagacgctctaggtgctgctattggtgcgtcgcgcgcggcagtcgattcaggctatgcagacaactcccttcaggttggccagactggcaagatcgtttcacccgacctttacttggctgtcggagtcagcggagctatccaacatctcgccggcatgaaagattcgaagactatcgctgccatcaacaaggatcccgatgcgccaattttccaagtcgcagacgtcggtctcgttggcgacctgtttgagctgacacccgagctcacgcagaaggtcagccagaagtgaggatgctctgcatgatgtgtacatattgcagatgtccagagcgctgttgcgcatgcagatcgataaaacgcattgctcgc

SEQ ID NO: 13245 - DNA, 883 bp, Glycine max
  Clone ID: JC-GMLE01810045C09_FLI
ggcatgcatcactccattacctaataatggatatggaggaaatgttacagagtggcctttgcggcttcatcaaccaccagacaggcttcatagcatccaattggatgccattatatccagagatgaactcttgagggctgacacaaaatattggtttgaaataatagaaagttatgttcgggctttccgttggcaggactacaacctgagaaatgtaatggacatgagggcaggatttggaggagttgctgctgcgctgcatgatctccagatcgactgttgggttatgaatgttgttcctgtcagtgggtttaataccttgcctgttatatatgaccgtgggctgataggagttatgcatgattggtgtgaaccatttgatacatacccaagaacatatgatctgctgcatgcagcaggtcttttctctgttgaaaaaaagaggtaaaagtgtaacatctcaaccattatgcttgagatggatcggatgctaagaccaggaggacgtgtatatatacgtgacaccacacatgttataggtgagcttgaagaaattgcaactgcactgggatggtcaaataccataaatgatgtaggagagggtccctattcaagctggaagatattaaggtctgataaagggttctgaattgctcaattgtgtctgtaacttatagaacaccatatattggctcatgcaaccggaacatggtactccaccagaaatctcattttgtgccagaaatgtggccaaaactaacccataaaaaattctgctatttgccagaaatggtagtcttaattacaatgttgaatccctactaacaggttttcttgtaaacactttaaagaacttgccttgtatcaatctctacagcattat

SEQ ID NO: 13246 - DNA, 478 bp, Glycine max
  Clone ID: JC-GMLE01810045C11_FLI
ggctttttaactagtccaatacttcagttgaatgattcatcatcaggaactggtcaagaagaaggactcaaacttgttagaaaatatggtgattcttgcaaatcactattgatattcacaatgttcatcattgttttaagctccttccttttcttcatggagcccccacctaatgcactggcatctgtcaatgcagcagctgttgatgccttggaatatatgttgatatttggctgatgcaacatgtcataaggtttctgccctaagaaggacttataccttggaaggaaggcagtcgctactgccctacaaagacatgtattgtaaaaaaggaagtaaaaagtgagaaatgcattagaggcactaattactgagattaggctctactgtttcttctagtatataaatattatagggttacaaaagtataattgtgtaagctcagtccccagcccaataaactaagttttgcacaagc

SEQ ID NO: 13247 - DNA, 1149 bp, Glycine max
  Clone ID: JC-GMLE01810045G07_FLI
cggaaccggaaatgaatagggtttggtttctactattccttctgctgatctcgaaatgcgatcatgtgtggagctcttacgcgggttccgctagctccgtcatcaacccttccaaggtcaaacagatttcctggaagccaaggtttcctcacggatttggaatgcgaccacttgatctctctagcgaaatcggagcttaagagatctgccgtagcggataatctctctggagagagccagctaagtgatgttcgaacaagctctggaatgttcatttccaagaacaaggatcctattgttgctggtattgaggacaagatttcgtcatggacctttcttccaaaagaaaatggggaagatatacaagtattgagatatgagcatggccagaaatatgacccgcattatgattacttcactgataaagttaacattgctcggggtggacatcgcatcgcgactgttctcatgtatctcactgatgtagccaaaggcggtgaaactgtcttcccttctgcagaggaacctccacgtcgcagaggtgctgaaacaagcagtgatctttctgaatgtgccaagaaaggaatagcagtgaaaccacgtagaggggacgcacttcttttcttcagtcttcacacaaatgctaccccagacactagcagtctccatgctggatgccctgttatcgaaggtgagaaatggtccgcaacaaagtggattcatgtagactcgtttgataagactgtgggagctggaggtgattgttctgataatcatgtaagctgtgagagatgggcttcacttggagaatgcactaaaaatcctgagtatatgattggatcttcagacattcccggctattgtaggaaaagctgcaaggcgtgttagaaattttactgaatgctttcctagatactacaagccatctctgcctcgggtttcaaatttcaactagttcttgattttttttcccggactgtaaagtaattctgcattattataatggttccaatcagggttctactatcacaaccccacttcaagtggaagaattgagaccttctcgggggattctgcttttttctttcattgcttatacttatcttctatgtataaaacgatataacaaatacaaattaatttattatt

SEQ ID NO: 13248 - DNA, 650 bp, Glycine max
  Clone ID: JC-GMLE01810046C01_FLI
gttacactgaaggtggtcaattgaccgaggcagttcggcgtcgtccttacactgttgtattatttgatgagattgagaaagcccatcctgatgtgttcaacatgatgcttcagatcctggaagatggaagactaacagacagtaagggcagaacggtggatttcaagaacacacttcttataatgacatcaaatgttggaagcagtgtgattgagaaaggaggccgcaaaattggatttgatctggattatgatgagaaggatagcagttataacagaatcaagagcctggtaaccgaggagctaaaacaatacttcaggccagaatttttgaataggttggatgaaatgatagtcttcaggcagctcacaaaactggaggtgaaggagattgctgacataatgctcaaagaggtgtttgaaagactgaaggtgaaaatagcgccgtatttggtataactttggcatcaatgaactattctgtcggaagctggggtgcttttatgtttccactagtttgactacgatgtaatatcctagcattactgtaaatgttccttatggcgcgttcattgcttgagattgaaacatgtaatgacaggattcttgcatgataatgacaggtttagggtattagatcaatttgaaacg

SEQ ID NO: 13249 - DNA, 1289 bp, Glycine max
  Clone ID: jC-gmle01810046f05_FLI
cttcaagcagttacactggtaaagtatacacatacgatggcttgtacaaggttgtcaattattgggcagggaagggaatatccggatttacagtctacaagtttagacttaggaggcttgaagggcaacctacattaactacaaatcaggtatattttacatatggacgtgtacctcaatctctaacagaaatacaagggttggtttgtgaagatatcactggaggtcaagaagatatgcccattccggctacaaatttggttgatgacccccctgttccacccacagatttcacatattgtaagtcactcaaggttgcaaaaaatgtgaagcttcccatgaatgccaccggatgcaaatgtgaaggcatttgtaatgacccaacaagctgtgcatgtgcattgcgtaatggctctgattttccctatgtatctcgggatggtggcaggttaattgaagctaaagatgtagtatttgaatgtggtcccaaatgtggttgtggtcctggttgtgtgaaccgaacgtctcaaagaggacttagatatcgtctggaggttttccgtactgccaaaaaaggatgggctgttagatcctgggattttataccttctggagcaccagtttgtgagtacaccggaatacttgctagggccgaggatatggatagcgttctagaaaacaattatatttttgagatagattgcttgcaaactataaaggggctcgggggaagagagcgacgatcacaggatggagagattcctgcaaatcttttggacaaatatcatgatcaatgttctgaaagtgtgccagagttttgtattgatgcaggatctactggaaatattgctaggtttataaaccattgttgtgagcctaatctgtttgttcaatgtgttttgagcacacacgatgatttgagattggctcgtataatgttgtttgctgcagacaacataccccctttgcaggaattaacatatgactatggttacgtgcttgatagcgtgttggactcggatgggaagattaagcaaatgccatgctactgtggagcctcagtctgcaggaagcgattattctaatactctggaagttgtatgtggtatttttgcaattgcaaaactagtgcggttaagtattggttgtttaaaacatgagctgcaaagtggtctctattcattcacggttaatttgcgcagtttatgtattgggctgaaatggcagcagaggaacattgtaactttttgtgcagatgcaaggaaatgatataggtttattttttggct

SEQ ID NO: 13250 - DNA, 2607 bp, Glycine max
  Clone ID: JC-GMLE01810046F12_FLI
ggggcctgagaccgacaagaatgaagtggccaaaattcgggatgcaactagaaatggaagaagttattgtggcagacttttaaactacaagaaagatggaactccattctggaatcttctcactgtcacccccatcaaagatgaccatggcaatactatcaaattcattggaatgcaggttgaggtgagcaagtacacagaaggcatgaatgaaaaggcattacgaccaaatggattacctaaatcattaattcgttatgatgctcgtcaaaaggagaaagctttgggttccatcactgaggttgtccaaactgttaaggacccaaaatccattattaatgataggaatggtgatactgctaccatgcctgaagagcaagagaaattcaattttgattttgttttgccaaagtctgctgatattgggaatacaagcacacctggtagacaagcttctccactgaatatccaacgcatgagttctagtcatgataagagcaagacatcatcacgatcaggacggatttctttcaagggtttaaaagggagatctccgagttctgcagaggagaagccaatatttgaacctgaggttttgatgactaaggaaatagagtggtctaacaatttggagcattcactaagagagagggacataaggcagggaattgatctagcaaccacattggagaggatagaaaagaactttgtgatttctgatcccagacttccagataacccaataatatttgcatctgatagctttcttgaacttacggaatatacacgagaagaaattttgggacgaaattgtcggtttcttcaaggaccagaaacagatcaggcaactgtttccaggataagggatgctatcagagaacaaagggaaatcactgtacagttgataaactatactaagagtgggaaaaagttctggaatttgtttcacttgcaacctatgcgtgaccaaaagggtgaacttcaatacttcattggtgttcaactagatggaagtgatcatgtagaacccttaaaaaaccgcctgtctgagacaactgagcaacaaagtgctaagttggtgaaagccactgcagaaaatgttgatgaagctgtccgagaacttccagatgccaacttgagaccagaagatttgtgggcaattcattcccaacctgtctttccacgacctcacaaaaaggacaatccttcttggatagcaatacaaaaggtagctgcaagagatgaaaaaattggcctgcaacattttgtgcccataaggccgttgggttgtggagacactggcagtgttcatttggtggagctcaaaggtacgggtgaactatatgcaatgaaggcaatggaaaagtccgtaatgctaaatcgtaataaggttcaccgatcatgcattgagagagagattatatcattattggatcatccttttcttccaacactatacacctcatttcagactcctacacatgtatgtttgattactgacttcttccctgggggagagttgtttgccttgcttgacaagcaaccgatgaagattttcaaagaagaattagcaagattctatgcggcagaggttgtcatcggtttggaatatctccactgtttaggtataatttaccgtgacttaaagcctgaaaatatcttacttcagaaggatggtcatgttgtgttagctgattttgatctatcatttatgacatcttgtaaaccccaggttgtgaagcaagcagtacctggtaaaagaagatcacgaagtgaaccaccaccaacatttgttgcagagccagttacacaatcaaactcatttgttggaactgaagaatacattgctcccgaaattataactggagctgggcatactagcggtatagattggtggacccttggtatcttgttgtatgagatgctctatggtcgtacaccattcagaggaaagaatagacagaagacattttccaatattttacacaaggatcttacctttccaagcagcattccggctagtcttgcggccaggcagttgattaatgcactactgcaaagagacccaacaagtcgtataggttcaaccactggtgccaatgaaatcaaacagcatcctttttttcgtggaatcaattggcctcttatccgcaacatgactccacctccattagatgttcctcttaaattgataggaaacgatccagtggcaaaggatataaagtgggaagatgatggagtgctagttagctcgattgatatggatattttttgacagtttgcactgtttactcaggatcttaatttggtcagcatcttatctgattcatgctgcaacagtcggagtctaagacaatattcaagtataatagtgtctattgatttggttatagtcaaataccatcatgtgatcttccaatagacaacttcaaacaaaatctaagttgtgtaggaatagcagaaaagtagaatgtacattgaataaggacgttttctgaaagaaacaggcatcctagtcaagcacatcgacaatacatcaataacatatacttttgtagatggcttaaaagaatcgtacatgtaatcaaatttatttattaacagtct

SEQ ID NO: 13251 - DNA, 1703 bp, Glycine max
  Clone ID: JC-GMLE01810048H03_FLI
ggtaatttgtcagggaaggatgattatatggagattgatggtcaaggtagcagaagtgaaactagtggttatcattcggatacagatttggaagatgattgcagagaaacttctgaacctccggttcctccacaaagagttgtcaacatgcttcagggttgtagaagtgttgatgagtttgagagactgaacaagatagatgaaggaacatatggtgttgtatttagggcaaaagataagaagactggtgaaattgtggcattaaaaaaggtgaagatggagaaggaaaaagaaggttttccactgacttctctcagggaaataaacattcttctttcctttcaccacccatgcatagttgatgttaaagaagttgtggtagggagtaaccttgatagtattttcatggttatggaatacatggaacatgatcttaaaggactaatggagggaatgaagcagccctttagccagagtgaagtaaaatgcttaatgctccagcttttagaaggtgtgaagtatcttcatgacaactgggtgcttcatagggatttgaagacttctaacctgcttctgaataataggggcgagttaaaaatttgtgattttggattggctcgtcagtatgggagcccattgaaaccatatacccaccttgtggttactctttggtacagggctcctgaacttcttctggggacaaaacaatattcaacagccattgacatgtggtctctgggttgtataatggctgagctattgtccaaggaaccactatttaatgggaagactgaatttgaacaacttgacaagattttcagaattcttggcacaccaaatgaaacaatttggcctgggttctcagaattaccccgagtcaaggtcaattttgtcaagaataagcttccaactctgggtggttctggctggctatctggcctctcttggttacttcttcacaactttttctagtttatattaattaccagaatgttcctttcaggtataatctcctgcgtaaaaaatttcctgcaacatcattcactggatcaccagttctttctgattctggatttgatttgttgaacaagcttctaacttatgaccctgaaaagcggatcacagctgaagaagctctaaaccatgagtggtttcgtgaagttccccttccgaagtctaaagaatttatgcctacattccctgctcaaaatgctcaagacaggcgaatgaggagaatattaaagagtccagatccattagctgagcagcattggaaggagatgcagcagggtgaatcagggactggtggtatttttggttaagaatggtgcaatttaattttttgttcacaataatcattctaacatgctctgctgaatggttgcacacttgaggtgagagtaagcgctggatggatgctgctaattttgattgttagacaatcacttttgtggtttttttatcaggcgcttcttgttggtttgtgtcgagatatgtattctttacttccttggagccagatctatttcaggttaacctctttatgctttatcattatattgaaatgcacatggggcgcagcttgcgcataaagtctggcatatttgccttctgaaaataggaatagtcagtatctgctgaaagttgtatgtgtaacatttgcattttgactgtgtaatcaatttaaactggttttgagtatt

SEQ ID NO: 13252 - DNA, 1686 bp, Glycine max
  Clone ID: JC-GMLE01810049A12_FLI
cttcagccagcaacttgcgtctctatccattgatttgcaacttgcaaacaacacgaaacaattgcggtgttttttgagcattccgaggatatattttttctctgtaattaattatcctttaaattcccaatattcctcgctctattctcttctcttcgtactaccataggaaggaaggaaggagagagagttatgggttccccagaaaatcaattgtcgctcgcagaagaggctcttcttcaggatgatgagagcaaacaatacacaggagatggatcggttgactttaaagggaggcctgttcttaagcggaatactggcaactggaaagcttgcccatttatcttaggcaacgagtgctgcgaacgtttggcgtactatggcattgcgacaaatcttgttacctatcttacccagaagctgcacgaaggaaatgtctctgctgctagaaatgtcaccacctggcaaggcacttgctatcttgcacctctcattggagctgttttggcagatgcttattggggacgatactggacaattgccattttctccaccatttatttcattgtgtcttgatagagcagctgtagcatccgctgctgagagcaaaagtggtgattattctaacaagtggagactttgcacggtgacacaagtagaggagttgaaaatcttgattcgcatgtttccagtttgggctactgtgatcgtttttgctgctgtttatgcacagatgtcaacactgtttgtggaacaaggaacgatgatgaacacaaatgttggttccttcaagattcctcctgcttccctctcaagttttgatgtgataagtgttattgtctgggtccctgtctatgacaggattattgttcccattgcaaggaaatttacaggcaatgaaaggggcttttcagagttgcaaagaatgggaattggcctttttatttcagtcctgtgcatgtcagcagctgctatagtggagattgtgcgtctgcagcttgcgaaagagcatggccttgttgatgaacctgttcctgtaccacttaatatattttggcaaattcctcagtatttcttattgggggcagcagaagtattcacattcatcgggcagctggagttcttctatgaccaatctccagatgccatgcggagtttatgtagtgctttggcacttttgactacttcacttgggaattacttgagctctttcattctcactgtaatgacttacttcactacacaaggtggaaatcctggatggattccagataacttgaacaagggtcatcttgattacttcctctggcttttagctggacttagcttcttaaatatgtttgtgtacatagttgctgccaaaagatacaaggaaaagaagtctgcttaagattttccaggcatttctttggactggaaggatgttctgccatttccctgtcaatgtggcgattgttctgcatgtggaataaagatgctctgcaattatgtacgctttttatttacaaaggaaaatctgttatttatgccggttcaaaacagccttgtctctgccctctcccacgaagcctaaaattgataagattgcttgctaccatttaggctaaatatgggcagttaagattgcttgcaacatttacatgtgtaactattgatgtagaaaaggttgatactccttttatgtgc

SEQ ID NO: 13253 - DNA, 900 bp, Glycine max
  Clone ID: JC-GMLE01810051A06_FLI
gtctcggccacgtcattgacaaactgtcagtgagctttggcctagagatccttaaggttgtgccgggctacgtgtcgaccgaggtcgacgctcgtctgagttttgacacagcagccacgatcgcacgcgctcatcgcattatcgatctgtacgagaaggctggcatcaagaaagatcgcgtcctcattaagattgccagcacatgggagggcattcaggcttgcaagcacctgcagaaggagggcatctcgtgcaacatgacgctacttttcggctttgcccaggccgtgggctgtgccgaggccggtgccactctgatctcgccctttgtgggccgtatcctggactggcacaaggccaaaactggcaagtcaagctacgaatctcacgaggatcctggtgtagtatccgtgaccaagatttaccagtattacaaaaaatacgactacaagaccattgtcatgggtgccagcttccgtaacactggtgagatcactgaacttgctggctgtgatcgtctgaccatctctcctggcctcttggaagagcttgccaagtctaccagcaaacttgacaagaagctggaccccgagacggctgccaaggcgtacacaggagagaaggtgtcgtacgatgagaagggtttccgtctaagcatgaatgaggacgccatggccacagagaagctcgctgagggaatccgtggctttagcgccgacatcgtcaagctcgagcagatcctcaaggctaagcttagcgcttgagcaagaaaagttctcgagctcctacgcgcggctgccagtactaagcgtagtgatggaaacgaattggtcaacttggataataggtggtttggatgcatctgtacacaagtaatgatcaaaatttaatgacaaaaac

SEQ ID NO: 13254 - DNA, 1423 bp, Glycine max
  Clone ID: jC-gmle01810051e03_FLI
aaacgaaaagccattgttacaagcatttcacacttaacatatcaaaaaaacaaaggtttctactttctacgatgagagacatgaaagacgcaggtgccttgggaggcaagacagcaagagcctgcgacagctgcgtaagcagaagagcaaggtggttctgtgcagctgatgatgctttcctctgccatggctgcgacactttggttcattccgcgaaccagttagcaagcaggcacgaaagggttcggcttcaaactgcttcctcaaaagtaaccaccacgcacgcatggcacagtggattcacacgcaaggcaagaaccccgcgtcacaacagcaagcactttgcgctgcaacagcgtctcaaagacgaagttctcttcaacaacaccagtgttcttcccctcgtgccggagctcggaggggaagaacaagaaccggtggttgtggataacgatgagacggaggagcagatgctgtgtcgggtgcccgtgttcgacccttttgatgtgagaaccgatgacttggatagtttttctgacatggatttcgctgagtttgctgctgatgttgaaagcctacttgataaagaagacgatgaaataagtgcgtgtgtgggagggggagagggagagggagagggagttcaaggtgcaatggtgaaggttaaggatgaagaagaaattgatggtgatgtagcgtgttatctggaatcggtttttgatgatgcctttcattggaataacattgagtctgtgctgtcagatgcacgggaagagaaggagggtgtggtggcgtgtgatgtaggtgtcggtgatgaagaaggaggaacaaagagagacatatttttgagactaaactatgatgaggttattactgcggtctagccaaggttcttctccatggacaacttcaaacccacctaagttcaactctgattatgacttctccttgggtttgagtggtgtaggtggggaagtaagaagcttaagagggcacctagatggtggaagagaagcaagagtgtcaaggtatagagagaagagaaggactcgtttgtttgcaaagaagataagatatgaagtaaggaagttgaacgcagagaaaaggcctagaatgaaaggtcgttttgtgaagaggacatgctttgttggagccaatgcttttcctgcttaccactgacatcaatcaattaacggatccatctttgctttttctgcaaatttgggttaatacttggtttggctatatatatgtacgtatatatagcctgtattatataaatactagtaaataatattactgggccaggttaattttactagaattgttgcttgggatatttctgtctatatatatctctagacaggtttagtaattagtactaattaatgatcatctttattggcaggtttaagccttttgg

SEQ ID NO: 13255 - DNA, 858 bp, Glycine max
  Clone ID: jC-gmle01810051e08_FLI
catttgttcaagaaactaccaagtagcaagcttgattattattattattattatcattatcccattgagcttctaaaaatgtgcaaaggtgcagaaggagaaaagcaacatggtttctgcagcagctatctacataaagaatgtgcaaccagaagtgctacatgttgtgagctatgtgggttacaggcttcattgtattgtcaagctgatgatgcatacttgtgtagaaaatgtgataaaagggttcatgaagctaattttttggcccttaggcacattaggtgctttctgtgcaacacatgtcaaaaccttacgcgaagatatctcattggagcatcaatagaggtggttcttccagccaacattaactggaccattggaaatctccctagcaacagaggaatccacagaaagtgctcaagaatgcataacaacctttccctcttgttataacttccatctttctttttttctccttagaatatcttttgtaatagaaaaggttagtgagtaccatctcaggtacatagggaagtgctaaatgtttttaatgtcatgatttaaaaaaaatggttggtaatagaaccgtgttcaatagaaggagggcatttgcaatgttttttatttctttaatttctggtagaagtagttagtttaattgaaatttaacttctacggttatttttattttaagccaattctaaagcaggaaagcgaatttctggcagaagtaagttatactatgttggcagatatacaatgatatatcttacaagtatatgtcatggtagttcctggcatctcatattgtaacctatatcagtagcaattataatggcgatactcactttttgtctc

SEQ ID NO: 13256 - DNA, 1440 bp, Glycine max
  Clone ID: JC-GMLE01810052E06_FLI
ccttggtaagcttcggtattttcttggtatcaaagttgctcaatccaaggatggtgtggtgatctcacagaggaaatatgcccttgacatcctggaagaaacaggcctgttaaattccaagccagtaggcactcctatggatcctagtgtaaaactgtcaccagatcaggtggaaccattctcagaccctggaagatatagaagattggttgggaaactgaactacctcgcagtcactcttcctgatattgcctttgcagtgagcgtggtgagtcagttcctgaactctccctgccaggatcgttggaatgcagtcagttgaatcctgaaataaactaagagtgctcctggaaaaggtctcatttacgaagataagggacattctcaaattattggctattcagatgcagattgagtggggtcacctagtgatagacatcaggatattgtgtattgattggaggaaacttgatatcttggaaaagtaagaagcaaagtgttgtagccaaatcaagtgctgaagcagaatacagggccatggctttggtaacttgtgagctcatatggctgaaacaacttatttgagagctcaagtttgaagaggatacacaaatgacactaatatgtgacaatcaagcagctttacatattgcctccaatccaatctttcattagaggaccaaacatattgaggtggattgtcattttatcagataaaagattgaatcgggagatattacaagatttgttaactatagtgatcagttggcagatatcttcacctagtctctaaggggaccaagaattggttatatttataacaagcttgacgcttatgctccagcttgagggggaatgtagagaatcagtattgatattctgcattcattgtaataaatatagtttataggcacataatcactgatttagaggaaatcaaatatcctccatttatttgcaataagtgcaataagcctctgttctttctcctttaacaagaccaatcaaagtccacaataatgttaatggttgatttctcctcacctacttttgcagcttgttcgagagacagctattcaatgtcttgttgccttgtctgagttgccccacgcccgtatctatcctatgaggacacaggttctacgagcaatatcaaagtgtcttgacgattcaaagagagctgttcgccatgaagctgtcaaatgtcggcaaacatgggcatcaatgtaatctaggagtctccatttctgaagttcaaaaccaacttcccaaggtactgggaaagcttttgacctttgttttctaattaacagtgattctttcaccgaaaggaaaatctgaatttttgaaatgtaaaataacttgtaaatattaaagtctatcaatcttattgtctactcttatagctgcattaatgagaatttgattttgaattcgccc

SEQ ID NO: 13257 - DNA, 1042 bp, Glycine max
  Clone ID: JC-GMLE01810053F05_FLI
acggaatttaactatcaacagatataccacttcgtgcacacgcacggagtgtcgatcccgatccaggtcgagatgatgcgtagcatggcgaaggaccacccgatctacgctctactagactaccatttctttggcaactttgatttcgaattcctgagcggaatagtcctttttgcggctaatacaccgtacgacgagtcgatggcgttcggggcgagcggctctattcgctgcctctacgacgagtactcaaaaacgtcgctagctgaagactttcccgctgaaattgcaaataacggtctccagtatctgccaaaccaccgctacgtcaaatatggcgcgatgtactactccatcatcaagaccttcgttactgcgtacgtgaaagcgtactacgtctcagaggataccattaaaaacgattcggagctacagacttgggcagctcgagcgactatcgtctggggcgtcaacgacttcccttcttccttcaagggctatgatgatctcatcaaactcgttaccaatctggtgtttcaaaacgcggtgaaacaccacttcatgaacggaagagtgtcgtggcacagtcaagcggcaccgttccgtactggagcactttataacgcaccacttccgactaaaaaaggggtgaacgtcaacccgttcgactacgtcattccgtccgacctgttcccgttgctgtcctccacggtagtacaattctaccgcccgatcccgctgtcccagtccttgctgaatggctacacaacggctccattctccaacgaggccatcctgaccgatgccatcacccaattccaccaagccatgctagccatggaaacatcgatgagcgcatccgatacaaagaagcattacctcgacacgtttgtaaagccttcggtgatgccgtggttttcgtacgtctgaagcggtaagaatttttttacttccaatagtaagtaaaaatggttttttgaaacaacgctgacccttttgcatttttgcccatttcttaaaatggctaataaaattttcaatc

SEQ ID NO: 13258 - DNA, 1982 bp, Glycine max
  Clone ID: JC-GMLE01810053H07_FLI
gaagaatatagtgttaaagagagcaagttctgtttaacacagacgagctgtggtagcagctagcgggtgaaggtttttgcgccgcgccttatatcacaccgtcgtccgaaagcgtcgttgccgtgaaaccctagaaagaaacgacgacgtaaatggaggtggagcccgtggagccgcagtcgctgaagaagctaagcttcaagtctctgaagcgcgctctcgatctcttctctcccatccacggacacctcgctactcccgatgccgaaagcaagaaaatacgcactagccacaaggtgagcgtggagtatggtggaatcaaaagcactgccaatcaacctcctcctcgtcaagttagttctgccacccaggatccagggtcctctaacactctggctcttccaggtcccggagattccaaggattctcagaaaggaggaccccaaaatgccttggttgttggtccaactatcccatccacaacaccgaatgatactggttttcagaacaaaagtacagcggttgtttcagcctctggttcatctgaaagaaatttatcaacatctgctttgatggaaagaatgccaagtaaatggccacgtcctgtatggcacgcaccatggaagaactacagggtcatcagcggtcacttgggatgggtgagatctgttgcagttgatcccagtaacacatggttttgtactggttctgcagatcgaactatcaagatatgggacttggcaagtggagtattgaagctcacattaacaggccacattgaacaagttagaggtcttgctgttagcaacagacatacttacatgttctctgctggtgacgataaacaagttaaatgttgggatcttgaacagaataaggttattaggtcttatcatggtcatctgagtggtgtttattgcttggctcttcatcccacaattgacgttttactaaccggaggacgtgattctgtctgccgggtttgggatatacgaagtaaaatgcagattcatgctctttcaggtcatgataacactgtctgttctgtgtttacgcggccaacggatccccaagttgttacaggttctcatgacactaccatcaagatgtgggaccttagatatggtaaaacaatgtcaactcttacaaaccataaaaaatctgttcgagcaatggcccagcatcccaaagagcaagcttttgcatctgcttcagctgacaatattaaaaagttcacccttccaaaaggagaattttgccacaatatgctctctcaacagaaaactatcatcaatgcaatggctgtcaatgaggagggtgtgatggttactggaggcgacaatggcagcatgtggttctgggattggaagagtggtcacaatttccagcaatcccaaacaattgtccagcctggttcattggacagtgaagctggtatttatgcttgtacctatgatcttactggttcgaggctcataacctgcgaagctgacaagacgataaaaatgtggaaagaagatgagagtgccactccagaaacccatccccttaacttcaggcctcctaaagacatccgtcgattctagacatgctcctcatttatctcaggcaacttattctgctaatacagagtgggtatgtgctatctggagggcttggtgtaaatttacttgttgggagattcacagttctcttcttagcaggcttttatcatcatatttgtatcacgagaaatgttaggaaaatactctcaaatactcttttgaacacaatctttcttattgattgaaaatcacaaattggtggatgctacatatttaacgaacctccttattttgtattttctgataattttcaactagtaggagagtgtggtgtcagaaagtatgtgttaaagagtgtgtaacacttctgtgtgcatcattggattgcttgtaagattattcctacatagttcgtgtgtctcaatagctttgcatttc

SEQ ID NO: 13259 - DNA, 1676 bp, Glycine max
  Clone ID: jC-gmle01810054b09_FLI
gtgttctcacgtctttcacttcccatgcctagcaggtcacgtgaaaaaacaccgaatggtcacgtgccctgtgtgcaacgctaactggaaacaactgcagcaaaacgcagacgaaaacaaaggaaacgcagaactcaaaacgacgaggtcgtttaagctccacaactacgacgacgacgagcctctcatgtcgcccacgtcggtctcgcgtttcaatccgattcccgaatctagtgagaacgaagaagaagaagatgaagaacaaaacgacgaagaaacaaatttcaatgtgtcgtcgatgatcagaaccaaaaacatcgacgcgttcttctcgccggaggctgcggttgtggcttccaaccggagttccgagacgtacgttgcggtgttgaatgtgaagtctcagccgcgtaacgcggcggcgaatcggccgccggcggatctcgtcgcggtgatcgacgtcggagggagtgtttccggcgaagagtatcggatgctgaagcgctcgatgcaggttgttatctcgtcgctcggctccgctgatcgtctctctgtcgtcgcattctccggcggatcgaaacggctgtttcccctgcggaggatgaccggccgcggccagatggcggcgcggcgagtagtcgacgcgctttccaccgttgagctccgccgcgatggaacggcggcgaggaacaacgcgctgaagaaagccgcgagggttctggaagatcggcggcagaagaacaccgtcgcgaaaatcattctcctcacaaacagccacgaggatcagcgattatcctccacgcgcttcgacattcattcactgagatactcttacgatggcgcgtgtaaccacgcgcaacacgaccacgagttagcgaagcgcgtgggcaatttgttgagcgtggcggcacaggacttcaaactcgagttaaaactcacgtctcgctcggctccggcggagatctccgccgtgtattctctggccaagggttgcaccgacgctctctcgccggaatccgtcgcgctcggcgatctctacgcggcggaggggagagaaattctagtggagttgaaagtgccagctggcacagcttcgcgtgggtcccaccaacgtgttatatccgtacggtgttcccatcgtgaccccttcactcgagagcttgttatttccaaggatcgtgagttaaacgttccgcgaccccgcacggttcgatcatgcgaccccagaatcgaacggttgagacgttgccaggtcagcgctcgcgccgtagccgagtcgagaaggttgatggctcgtaacgacgtgtctggcgcgcttgagttgctatcctcggctcgagcatctgtgagccgcgaacagggtgatgagtgcttgcgctggctcgaatccgaacaagccgagctgaggagccaaaagttaagaagtagttgtaataataattgcttcgatgaaaagggggagccacttacgccgatgtcggcttggagagtagctgagagactggctaaagtggctattatgagaaagtctatgaacagagtcagtgacttgcatggcttcgaggatgccagattttaaatgtattttttctctttttttcagtatagttctaaattttgtagtttgtaaagggagaaaataaagtgtcaataaaatttttttccgatttatgctc

SEQ ID NO: 13260 - DNA, 1168 bp, Glycine max
  Clone ID: JC-GMLE01810054B11_FLI
ctgagttcaattacaacctaggaactctcacatcttcttactcttaattttctcttcagaccactcagataatggcaagcactcctagcattccatcacacataaaagcttgggcttattctgaatatgggaacacagaagagattctcaaatttgaatctaacatacctataccagacatcaaggaagaccaagtgctcatcaaggttgtggctgcagcccttaacccaatagattataagagggctcatgggtttttgaagaacactgattctccctttcctactgttccggggtacgatgttgctggtgtggtggtcaaagtgggaagtcaagtgagtaaattcaaggttggggatggggtttatggtgacatcaatgaggatcctgtgaataatccaaaggccattgggtctttggcagagtacactgctgttgaagagaaagtgttggctcacaaaccctccaatttgagctttgttgaagctgctagccttcctttggccatcataactgcttatcaaggatttgaaaaggttgagttttctgctggcaaatctatacttgttcttgggggtgctggtggagttggatcccttgttattcagctcgcgaagcacgtttttggcgcatcaaaggttgcagccacagctagtactgcaaaactggatttgttaaggaacttgggagcagacttagctattgattatactaaggagaattttgaagaactggaagagaagtttgatgtagtgtacgacacagtaggagaaagtgagactgagaaggcattgaaggctgttaaagaaagtggcaaagttgtgacaatagtgagatttggacatcctgaagctatattcttcatacgaatttcagatggtactgtgttggagaaactaaaaccttacttagagagtgggaaggtgaagccaatattggaccctaagagtccctatccattttctcagaccgtggaggcatttgcacacttgaagactaatagagccattgggaaagtggtcatacatcccattccataatttatgtttgcgtgatcaaacgtgaatatctctttcagaattgtggtggtgaaaattagatacttggcttgtggtttggttgcaatataaataataagactcaattggtccaaaatttccaaaggatg

SEQ ID NO: 13261 - DNA, 1552 bp, Glycine max
  Clone ID: JC-GMLE01810054F11_FLI
caagaatctacttgccctcctggtactgttgacctcaccaaagatgatgatggtttggatacagtgggctcttgtgatattgtagaaagaaaacctaccccggcatctattcatagtcagtttgtcaccccaaattcaacttccttgggtatgaactctactggtgttaatcaaaatgttgccactcaaatagatgacttttggcctggagtttgttttgtccgtagtaggtctgataccccaacagttggtaattctgagctacctgttctgcctgatactgtttctcctacatttagtcaggaatctgctggtcatgacaataaccctgttgttaactctgccatgcataatcaatttttgggaccaaacaacttgcagatgcagatgaatcatatgaattcagttaacgagtatggcagatcatcctcagcaccaagacatattcataggactccggtagctgttcaggccctcccagtccaatctcaggcattgggaccacagcaaaattcaataactaatttgaatagttccttgctacctagcaattcctctgctactcctcatatttctttgtccaaccctacctctgtagatactttgaatgccatactaagtgatacggaaagacaacaacatttttctcgaaccccaatgaatctgcctcaggtctcaggtgtaaattcacctgcatttcagcatcacactgcaacacagaatcggggaccacttataaatacgtcagcaccaactcaaccgcagaaccaatacagagcaaatgcgttttctgaatttagaaatttgcatctgcagcaagctctgaatctccggccacccccaccaagatcatctaatgcccaatggccccacatccagcaaggtgttccgcaatctgggaattttcaggcggcagccaggggtgcttcagtggctgctggacaaggtagttcccatgctaggaatgttccaacatctggagctactactcatagccatcaagctagaggtatggttgctaaccagcctgccaggccatctgttttggttcaaaatcaaagtaccgtagcaggcacccctttccacgggttaacaacagagcaaagaggaaatacagcacagtcagtttctaggcctgaagaattattcagttcgcaatcagaacagaattgggctcccactggacgaatgcgtggaagtctagatttaagtcagcttaacgatgagtctattgcacagcgaataattacgccaacacaaggtcaaaattcaaggccaccaggtccacaacccattcgacggaccggtatttcctctttgcaacccgccacgacccaacaggatgtgcttattgcaaacaatagaaatgcaaatgctcataatcgttcttccagtagataacatttctgcaaggctccactcacacattggaagacttaaagaaagctgcacctgaatttcatctttgataggctgtaaatacagttatcttgtggcaatatatattttgactataaccagacagacatattaaaggttttttatttttatt

SEQ ID NO: 13262 - DNA, 929 bp, Glycine max
  Clone ID: jC-gmle01810054h06_FLI
ggctcgagggtttcaataactccaaaccatgctagttccatcaaactgaaccaactcaccccatcacagatgtttcaaattcaagcccgaatccaggttccacgaggccagtttctgagcccaaagcccattcccatgaagcacgtgcgggcttctccttcttcaaagcccacgaagctttaccgtggggtgaggcagagacactggggcaagtgggtcgctgagatcagactccccaagaaccgaacacgtctctggctaggtacatttgacaccgcagaggaagcagcgttggcttacgacaacgcagcgtttaagctaagaggagaaaacgcgaggctcaacttccctcacctgcgtcaccatggagcacgcgcgtacggtgagtttgggaactacaagcctctcccctctgcggtcgatgcgaagcttcaagccatttgtcaaagcttggggaccaattcgcagaaactcaaaactcaaaaccctattgttctagatacacacaaggcagagacagagacatcggagtttcaggattttaataaggttgagaattaccaaacatcatcgtcctcggccttctccgatgaatattcttcttcttcttcttcttcttcacctgaatccgatattaccctcttggatttctcggattcttgtgaaacaatggacaatcttgggttggacttggagaagtacccttccgtggagattgattgggcagctttatctgactcatgaataatcagtggttaacgggtatagtttagatttgatgtgttttaggttgcttttgtttgtttttttcttgttaatcagtgttttagatattgttttggaagttcttctaaatcacagcgcattataatgtcactgtgactgataaattattaagccattaatcgaataaaattttacacaatcac

SEQ ID NO: 13263 - DNA, 630 bp, Glycine max
  Clone ID: JC-GMLE01810055H08_FLI
gttcatctctgagggtggcctgcgggccatagactccctctggagggagtacagtggcgggaaattcgggtacagcgtgcagaagaagctactggagaaggccaatggggacttcaccaagttcttcatcaaggttgggtggatgaagaagcttgacactgagatggagcaatacaactacaggtccttccccactgagttcatctgggagctcaatgatgacaccccagaggggcatttgcctctcacaaacgctctcagagggacacagttgctcaacaacgttctcaaacacccagcttttgatgtagttgatgacaaagaagaaaaagaaaaagatggtgagaacaaggaaaatggaggagcaatctctgccacaggattaaaggataatggttcttcttcaaagaggatcttcaaaacggactatagcttctgagtgcatagaggaatggatgtactttaatttggaggttaaattttacgtataagataaacatatagtagttattagtattaatttattatcaaacagtgcaactgtgcaagtggtttcttcattgtatcttcgggggagcaatgtgctcttaaactttctttgcctttataattaggctgaccgcattttac

SEQ ID NO: 13264 - DNA, 3215 bp, Glycine max
  Clone ID: JC-GMLE01810055H09_FLI
gtgataattatgtgtatgtgaaacaatttgatgataatagatgtgtcattttatgtttgtatcttgatgacatattgatatttggtggtaatatgcatttcataaattatgtgaagtccttattgtttagaaactttgacataaaagaccttggtcaagtagatgtgattttgggaattaagcttataaagaaaaatgatggcatgacttttacccaatcttattatgttgaaaaactattgaagaagtttaattattttgatgcgaaacatgcttttactccttatgactcatccatgaagttaaagaaaaatttgaataaaggaatttcttcacataaatattctcaaagtatcggttctttgttgcatttgacaaatttctctaggtctgtctaatattgcacatgcagttggtagattggaaagtaattgaggaatttagtgatacaagattgaagttctgattttgatgaaataaaattgacgagtgattatgtctttgctttagctggatgtgcagtatcatgaaaatctactagacaaattattatttcatatgaaagcaaaaattattgctttaaatactgctactagtgaggctgaatttcttaaaaatgtattatgtgatttgtcattgttaaataagcgtatacctccaattccaatgcattgttatagtcaaattgctatatctaaagtgacaagcaaaattttaatgaaaaaagaagacacttaagagtgagacataagtctattagaaatttgatttctcatggtgtcatttctcttgactttgtcaggtcagaaaataatattgcggatccgcttacaaaaaggttgacatgtcaacaagtatttgagtcgtcgaggggaatgagattaaaacccattatttagttacaacaatggacacccgtctccgtgtgattggtgatcccatgaatagagttcaacgggtaacaacgaaattgtttgttgactaaagtacaccaaaatgaaattggacggagctgttccgtttctcattcctatgacgaggtgtattataaattgtggcaatattaaggttgaggtatttatatatgtgtatttttggtaaaaaacaaaatacctcttaatgaatccgatgacaattattgtaggggtgggggtcacaacccactctttgaggattcacctagtgagtgtggtggtggggccgccactgtgagatatgggctaatctctaagggacactcacgaaacaagatataagctcaaggccgtgtaacgcgctatcactgattagaacctaattgaacaccaatattgtaggagttgtgtactaaagtccggttaaagaatatgtagttcaagacaatcaagtcactacatttttctcggatgaaagttcataaacactaggtataaggttcaaacccgaaaggttccttataccgaaatacaatatcacatgttctttctcttattttttatacaaattatctttcggaaaatatattttaaaattttaaattatgtgggggaatgttggtaaatatttgtgttttaatttaaaatttataaatatatattaattccatcttataaaataaaatatttattttagattttcttaagattttgttttaatgagtcaaactagtttgttagatttgttttgacaactataagttagtttccaacggtcatattttgtttgttgcttaaggtgatctgtgcctatatattatctttcattatttctaaaaagatgacagaacaacagtctcatctttttctcccaaaattttctatttcttctcttataaaataatttatttcttgagagtaagagcattggtgttcataaggttcggagatcctttcgctgcacacgatcggaaccaatgggttgtcgtatcttgggagaggagcgcaatcaaattttcctaccagtgcagtggggcgttttctctctaaggatagcgtttacgcgcttcaacccaggctatatctttctttctctaatttattttttccttgtgcttattgtatgttataatccattattcatgtgttgtcaattaaatttattttgctactgttattttgttatttaattcaagactgtgtatcttcttcgtatttattttccttcattttttgttttattttccaacaagaagttccaagacaatttaattcaattttttgtttccaacactactatttcctaagacatttaactgaacacaaatttccacacttcctaaggtagacccattttactggaagctcggtaacagcttcctgcttaccaaccttccaaaattgaggtcattatcctattatcttgtacatatttttaattactattgtctccctttcctgttaaataccatatgaacttctaaacacgtgcaagaatttacaaaggtccccgatttccttactttttaaaaatatttttctccactattttcccctatacgaactcgtgttttatttttaaacagtgtataattgcggtgtgctgatcctctattcattcttgtttcagaggcctgttgaaggaaatgcaacaatgaaacaggatttaagaagctttaagcttatattggaatatattaaagtcttgcctactgggcaagaaaccgattttgtattagtttcatgttctggactaggaattgagccttccaggcgggagcaggttcttaaagccaagagggctggtgaagattctctaagaagatctggccttggatacacaatagttcgtcctggtccattgcaggaagaacctggagggcagcgtgctctaatatttgatcaaggaaacagaatatctcagggcatcagctgtgctgatgtagctgatatatgtgtgaaggcactacatgatacaactgcaaggaacaaaagctttgatgtatgttacgagtatattgctgaggatggaagggagctttatgagctggttgcacacttgcccgacaaagcaaataactacttgacaccagcactctctgtcttagagaagaatacctgatcatcccttgttgagacaaaatacttcccagaagtaagatttcataaatttgcttcctacggccttctacttctacacgactgccaaagtgattcatgtaactatttttcctgtatatatattcttgtgtagaacaatttactacttgagaaattaatatatttataaattcttccttt

SEQ ID NO: 13265 - DNA, 1239 bp, Glycine max
  Clone ID: JC-GMLE01810055H11_FLI
gtcgcaaccaatagggaaaccggagcattatgtgcaatgaaggaagtagagttatttcctgatgatccaaaatctgcagagtgtataaagcagttagagcaggaaattaaagttcttagcaatctaaaacattcaaacatcgtacagtattatggcagtgaaatagttgaggaccggttttatatttatctggaatatgttcatcctggttcaattaataaatatgtccgtgaacattgtggtgccataacagaatctgttattcggaatttcactcggcatattccctcagggttggcttatttacatagcaaaaaaaccattcatagggacatcaaaggggctaacttgcttgttgactctgctggagttgttaagctagctgattttgggatggctaagcatcttactgggtttgaagctaatctttctttgaggggaagtccatactggatggctccagagcttttgcaggctgtgatacaaaaggataacagccctgatcttgcttttgctattgatatttggagtttgggttgtaccatcattgaaatgttcactgggaagcctccttggagtgaatatgaaggagctgcagctctgtttaaggttatgaaggagacccctcctatacctgaaacactgtcatctgagggtaaagattttttgaggtgctgctttaagagaaatccagcagagcggccaacagctgcggttttactagaacatcgatttttgaaaaactcgcaactgctggatgttttatcttccacccagctgtataatgaaacaagcttcatggacaaaccacatactccaagtaggcaatctgaaaatagttatgatcagttgtcaaccccctgtgcaaagattgcaaagggtaaagctgctgagaggcgaggatttctcatttcttcgtttgatattctccctgcatacttggaccaataatgtaatcctgttttcggtctatctttttggcctgccacgatctattgcctgctttttatgtgccattctttttctctgctgaagttgggaatcatctaacaataacttccgcatagcaggggtgtcatagggtgttcttttacttccttctactcttgaagcagttcccatgttgtaatgtaccgcacacacattccagtacctttgattgtctgtgactgtcaaacgaaaaacaaaatatgatctttaaaaatgactgtgctgagggaagttttcatcatttatgcc

SEQ ID NO: 13266 - DNA, 1044 bp, Glycine max
  Clone ID: jC-gmle01810059c05_FLI
gattcctggaaagacagtggttgatgtgataaggcagtacaaggagttggaagtggatgttagcaatatagaagctggtttgattccagttcctggctatagtagcactgctatctcacccttcaccttagattgggtgaacactcctggctatgatgggtttaaaggatgtggaaagagaccttcctcagtgagacccattgagcatgaaaggaagaaaggagtgccttggactgaagaggaacataaattgtttctattgggtctgaagaagtatgggaaaggcgattggagaaatatttctcgcaatttcgtgattactagaactccaacacaggttgctagccatgctcagaagtacttcataaggcaactttcaggaggcaaagacaagaggagggccagcatacatgacataacaacagtgaatctcacagaaaccatcacaacttcttgttcagaagacaccaatagatccacttcaccacatgttctctcacagccgcagcagcaaaattctactcctactacccccagaactcattttcagtggactaatcagtctaacacaggagtagctatgactctcaaccctgctcatgaaagagtcttcatgtctccttatggtgctaactcctttggggttaaaattgagggacagaatcttcatgagtcttcttacttgggacctcagacacagaacatggttttccaaatgcaacagtcctcacaacactagttccatgcattagaacttgttgtagtgaattattaatgggtagaagtagaaccagaatcttctgtccatttcaataagtacggtgcttgagttgagctttttcctaagttcttatgtgaatatcctagattattggttagttattatgaacttgaaggaaggtacatagatttgtttctttaacaaataagaacttcctgaaaggagtggcaggcaaccaagtcccaaacgttggtcttggttggttttgttgtctgggaataatggatttcaagcaaagtgtataaataatggaatttcgactt

SEQ ID NO: 13267 - DNA, 2471 bp, Glycine max
  Clone ID: jC-gmle01810059f08_FLI
ctcgagcgttttgctttgccacccttcagccagaacactgtttaagttcatgtcatgttggccaacttcggattccaacttttgtttccttgtacttcactgtttactaggttaattaatctcacttcctagaattttcatttttcaacaacttttagtccaagagaataagcatatattctgttagtggtgtgtgctttcactttttgcttttatgacgggtctgataggcatcttttcactgctgttttgcaactagaattgaacaaagtggtagtgagtgtcctttgttgtaaaagggtcatctctaaaagtactactactactatgcctccttcacaattccctcttcgttgggagagcacaggagaccgatggtggtatgcatctccaattgattatgctgctgcaaatggcctctatgatctggtcactgagcttctccaccttgacaccaacctcctcattaagctcacttcccttcgtcgaattcgccgcctagaagccgtgtgggacaacgagtccaagtttgaggatgttgccaggtgccggtccaaggttgcaaggaatcttatgattgagtgtgagacaggaagagggcataagcataactctctcatccttgcaggctatggtggatggcttctctacactgctgcttcggccggggatgtggactttgttcttgagttgttggggagagaccctcttttggtgtttggtgagggagagtatggtgtcactgatatgttttatgctgcagccaggggaaagaactgtgaggtctttaagctgctgcttcgttctgctctttcaagaaaggagtgccttggtggaagtgaagcagaattggaagagaagttggatgagggttctaaggttttcaagagggatgtgatgaatagggccatccatgctgctgccaggggagggaattgggaaatactgaagcagattctagcaagtgtttctgtttctcaggttttgtcttatagagattcacaaggatgtactgtcttgcatgcagcagctgcaagaggccaagttgaggtggtgagaaatctaattgaatcctatgatatcatcaactcagctaatgctcaaggcaatacagcattacatgtggcctcttacagaggttacttacccgtggtagagattctgattggagcatctcactcgttagcaacgttaaccaatcactatggagatacttttcttcacatggcagtggttggtttcagaagccctggtttctgtagactggacaagcacactgagctcatgaagcaactgacaagtgaaaaaattgtgaaaatgaaggatatcatcaatgtcaggaacaatgatggaagaacagctcttcatgttgctgtggttcataatatccaatttgatgtagtggaattactgatgtctgttccatcaattgatttgaacatttgcgatgctgatgggatgacacctttggatcatcttagacaaaaatcacgatcagtgtcttctgaaatcttaatcaagcaattaatttcagctggagggatctctaattatcaggactatgtgacaagaaatgcccttgttaagcatcttaggactcatggtattggaggcagtcctggaacatcatttagaataccagattctgagatattgttgtacacaggcattgagaattcatgtgatgacaattatgatcaggcaagtgtagaatcaaattcatggtcaagtgaaataaacaattatgactcggccaattcgccatgtaacagcaagtctagttctgtcaattatggggcaaggcacctaaagtttctgctccaaagttctagaagaagagacacaaaagaggcagcctcagatttagaagatgatgtttctgtgaattctttcagctcaaggaacaacttggaagactttccaattccattgaggcaaagatactcaaaaatgtgttctcttccaaacaacaaaagaacactatctataaggacttatcttccaagtcctacagccaaaaaatattttcatgcaggtctaacgcaaggcgtgattaaggtaaagccacaagtgcctctacctgttcattcaacatctaatctttttcaaaaactatctatctcttctaattctacgaataataagcaaaaacgtgttgatataatgggaccctcttgctccaatcgaccaatggatgggggtggcaccctacagttgaactttaagcagggcactttcaataggagattgatgaaccggtacttttcttttggagcacatggccaggctttggaagatgcaaatagctgcacaatgtcaaattgcagttctaagcattttagttctttagttgcataaatgttaaataggagcttcgaaaaagtttggttgatcacgtttcaaaagttcatgtagaatatgaaacaataataattaatattaataatactgataatatatgttcggcgctc

SEQ ID NO: 13268 - DNA, 1097 bp, Glycine max
  Clone ID: JC-GMLE01810059F10_FLI
aagaaattgattatataaatgaaggaaagaatgctgacagattccgccgagattttagaaacataaagtgggttcggatacctctggtatattgggattatactgctttaaaggtgttgaccatggagtatgtaccaggcatcaaaatagaccaggtggatacattaacttcgcgtggttatgatcgattgcgtatctcatcacgtgctacggaggcgtacctgattcagatattgaaaacaggtttctttcatgccgatcctcatcctggaaatcttgctattgatgtggacgaagcaattatttattatgactttggcatgatgggacagatcaaatcttttacccgggagagactgcttgaacttttctatgccatatatgaaaaggattccaaaaaggttatgcaacgccttatagatctcggagccctccaacctactggggacttgtcatcagtgaggagatctgtgcagtttttcctggaccatttgctaagccaggcaccagatcaggagcagaccctttctgcaattggggaggatttatttgcaatagcacaagaccaaccattccgttttccatccacctttgcctttgttctcagggcgttttcaacacttgaaggcataggttacacactgaatccaaatttctccttttctaagattgctgcaccctacgcacaggagcttttagagataaggcaaaagcagcgcactgcaccacagcttgtggaggagataagaaagcaagcagatgatgctacaacctataccatgtcaatgccatacagagttcaaagaatagaagagtttacaaagcaacttgaggcaggggatctaaaacttcgggtccgagtgcttgagtctgaaagagctgctcggaaagcaacgggtttacaaatggcaactatgtataccgtattaggaggaactctgctaaatcttggtatcactatgagcagccaaggcaacataactattgcgaatggatctttcattggtgcaggtatttttatgacactatttgtcagatccatgcaaagggtaaaaatgcttgataagtttgagaaaatgatataaatggttaccaac

SEQ ID NO: 13269 - DNA, 1238 bp, Glycine max
  Clone ID: JC-GMLE01810060B11_FLI
cttaatttccctctctttaacaaacgtcgtcgtttcagctcgactctttcccaacgtctcctcctggctcaacgcccacgcccctactggaggcgcgtgggatgcctttctcaactttaccggttgtcaccgcggcgacaagtacgacggcctcgccaatttaaaatcatactttgaacgattcggttacttccctcacgcgccgccctcctcgaatttctccgatgaattcgacgacgcgctcgaatccgccatcaaaacttaccagaagaacttcaacctgaacgtcactggcgtcctcgacgacgccaccgtgcagcagatcgtgctgcctcggtgcggcgtcgccgatataatcaacggcacaaccacgatgaacgccgccaaggagaacgagacggcgtcgtttagcaagccgaagtttcacacggtggcgcacttcactctttttcctggcatgccgcggtggccggagggaacgcaggagctgacgtacgcgttcttccccgggaacgggctgagcgacgccgtgaaaggcgtgttcgccgccgcgttcgcgcgctgggctgaggtgacgtcgctgaagttccgcgaaacggcgtcgtacttcggcgccgacatcaggatcgggttcttcagcggcgaccacggcgacggggagccgttcgacgggagcttggggacgttggcgcacgcgttctcgccgacgaacgggaggttccacctggacgccgccgaggactgggtggtttccggcgatgtgacgcggtcagcgctgccgacagcggtggatttagaatccgtggcggtgcacgagattgggcacttgctagggttaggtcactcatcggtagaagaagcggttatgtttccgacgatttcttctcggaagaagaaggtggtgttggcaagggacgacatcgaagggattcaattcctctatggttccaaccctaatttcaatggctccaccgccacgtcagcaccggagagggacgctagcgacggtggtcggtgcctcacttgtgtggggccctcgtccggcgttttcgctttgttgacatttgcgttcttattttaggtttttctattattatttatcgtaggggtatgatgctttgcacattttattaattcgtgcccaatattttttgttcttattgttgtttggttttccattcactttcgtatagaatttttcttggtgtatatgatataataataaaatttcattatat

SEQ ID NO: 13270 - DNA, 2882 bp, Glycine max
  Clone ID: JC-GMLE01810062A10_FLI
acacccaccaccctctccatcacacctgcccgcctccatcacaggcgctcgttccacatcaccggcgcctttcctgccgtctcgcacgcctgtcgcctcgccggccgacagcattccaaactcgcccgtcggacttcggtgactgacatagcaacaacgagcgagacaccgctcatcacacaacaccgcaatcatgtctgcagagccagaccactccgccagcaagggtaaggtcaagctcgataatgacccatcgggcgccgagaagcgcgatgagaatgaggtcgccacagcaatcctcaagaagaagaagaagcccaacagcttgatcgtcacagacgccaccactgatgacaactcgattctcgccctctccaacaacaccatggagacgctacagctgttccgtggtgacacagtgctcgtcaagggcaagaagcgaaaggacaccgtcctcatcgtgctggccgatgacgacctcgatgacgggtcagtgcgcatgaaccgcgtcgtgagacacaacctccgcgtcaagctcggcgacgttgtcacagtcaatccatgccccgatatcaagtacgccaagcgcatcgctgtcttgcccatggccgacaccatcgagggcctcacaggctctctcttcgatgtgttcctcgcaccatacttccgtgaggcctaccgaccgcttcgacaaggcgatctcttcacagctcgcgcggctatgcgcacagtggagttcaaggtcgtcgagattgacccacccgagtacggtatcgtggcacaagacacagtcatccattgtgaaggcgagccgatccagcgagaagacgaggagggtaatctcaatgaggttggatacgacgatattggtggctgccgcaagcagatggcgcaggtgcgagagctggttgagctgccccttaggcatccacaactgttcaagtccatcggtatcaagcctccgcgtggtatcctgatgtacggacctccgggtactggtaagactctgatggcgcgagccgtcgctaacgagactggtgcattcttctttctgatcaacgggcctgagatcatgtcgaagatggctggtgagtccgagtcgaatctgcggaaggctttcgaggaggccgagaagaacagcccggccatcattttcatcgacgaaatcgactcgatcgcacccaagcgtgagaagaccaacggcgaagtcgagcgtcgtgtcgtttctcagctgctcaccctcatggacggcatgaaggctcgctcaaatgtggtcgtcatggccgccactaaccgccctaactcgatcgatcctgcccttcgccgcttcggccgcttcgatcgcgaggtcgacatcggcattcctgacccaactggtcgtctcgagattctgcaaatccacaccaagaacatgaagctcgccgacgaggtcgacctcgaaacgatcgccgccgagacgcacggttacgtgggttctgatatcgcctcgctctgctcagaagcagccatgcagcagattcgtgagaagatggacttgatcgatcttgatgaggacacaattgatgctgaggttcttgacagccttggtgtcacacaagagaacttccgcttcgccctgggcgtcagcaacccaagcgctcttcgcgaggtcgctgttgtcgaggtgccaaacgtgcggtgggaggacattggtggcctggaggacgtcaagcgcgagctcgtcgagagcgtgcaatacccagtcgaccacccagagaagttcctcaagttcggtctcagcccgtctcgcggtgtgctattctatggtccaccaggtactggtaaaacgcttcttgctaaggcggttgccaacgagtgcgccgccaacttcatctctgtcaagggtccagagctgctctccatgtggttcggagagtctgagtccaacattcgagacatcttcgacaaggctcgcgctgccgcaccatgcgtggtcttcctcgatgagctggattccattgccaaatctcgaggcggctctcagggcgatgctggcggtgccagcgatcgtgtcgtcaaccagcttctcactgagatggacggtatgaccagcaagaagaacgtgttcgttattggtgccaccaaccgacccgagcaactcgacaacgctctgtgccgtcctggtcgtctcgatactcttgtgtacgtgccacttcctgaccagccgggtcgtgagagcattctcaaggctcagctacgcaagaccccagtcgccaaggatgtcgatctctcgtacattgcctccaagacacatggcttctccggtgccgatctcggcttcatcacccagcgtgctgtcaagctggccatcaaggagagcatctcgctggccattgagaagcagaaggagcgtgaggccgcagagggcgatgacaccaagatggacgaggatgtcgatgaggaggacccagtgccagagctcacgaagcgtcacttcgaggaggccatgagcatggctcgtcgctcagtcacagacactgagattaggcggtacgaggccttcgcgcagagcatgaagaacagcgctggcggcagtgctttcttccgcttccctgaaggtggtgccgagggtgctgcggccgaggctcagcagaatggtgctggcgaagaggatctctacgattaagtacgacaagttgtggtatacaggcatggggacggaaactggttggccgcggcggattctagttttgcgtcgatgtatgcttatgatacagatgatgcggatggctcggtcagtcgttgcatgaatgaggcgatgcgcctcaccaggagctggccgttatgatagagtgtctcaatagttcgcgccctccgctggcgaaatgaagcatttgcacgat

SEQ ID NO: 13271 - DNA, 2472 bp, Glycine max
  Clone ID: jC-gmle01810062f11_FLI
agaaaaaccacagccaaaagtcaagtggagcaaaaacaatgggcagctagtgcttccaaatagggtcactgttctctgcaatggtgttgaaggcatatattttccaagccttcatttagttgtgtgcaagtgtgggttttgcaggacagaaaagcaagcacttagtgaatgggaacgacacacaggttccaaattaagaaattggagaacaagtattagggtgaaagattctatgctacctctggaacaatggatgctgcagttggcagaatttcatgctactgctcaggttcccaccaaacctaagaaaccttctctgaaagaaagaaagcataagttgcttaccttcttgcaagagaagtatgaacctgttcatgctaagtggactacagaacgctgtgctgtttgtagatgggttgaagactgggactacaacaaaattatcatttgcaacagatgtcaaatagcagttcatcaagaatgctatggagcaagaaatgtccgagattttacatcttgggtttgtaaagcttgcgaaagacctgacatcaagcgggagtgttgtctttgtcctgtaaaaggtggtgctttaaagccgacagatgttgacacattgtgggttcatgtcacttgtgcttggtttcgacctgaagtctcttttgctagtgatgagaagatggagcctgctttgggtattctaagtattccatcaaattcttttgtaaaggtacagtatttgctgctagaaatttcccctgaaaaggaatgctagtcaccaggtgaagtgattttattctttgtatattccatgctatctcaattgtcagagaattattttcaccactttaaaaactagaagaatatctatctgatttgattattttgttcattgagtgtggtataaaggacattatctagactctgaattacttaatatttttatcattttgtgcaaatcctagaaatagcctctttgtttgcaagagtaaggctgtgttcgtctaccctccccaaactccatttggtgggagctttttgcattgggttgccttttgatgtctcttggtccactactcttaacaaatacaatctaaaaatctgcattacttgaattttcagatttgtgttatttgcaagcaaattcatggttcgtgtacacaatgttgcaagtgttctacttatttccatgccatgtgtgcttcaagggctggttatcgaatggagttgcattgtttggagaaaaatggcaagcagacaacaaaaatggtctcttattgtgcttaccacagggctcccaatccagatacagttttgattatgcaaacccctcttggggtcatttcaactaaaagccttctccaaactaagaaaaaaactggttcgaggttaatctcatctagcagaaaaaagcaagatgactctcctgttgataacactgagcatgagccattttctgctgctaggtgccgtatctttcaaagaacaaaccataccaaaaagagagcagcagatgaagccgtttctcatcgagtgaggggtccctatcatcatcctttagatgcaatagagagtttaaatacacacagagtagtacatgaacctcaggcattttcttctttcagagaacgcctataccacttgcagagaaccgaaaatgaacgggtttgctttggtagatcaggcatacatgaatggggcctctttgcacgaagaaatattcaagaaggagacatggttcttgaatatcgtggtgaacaagtgagacgcagcattgcagatttgagggaggcacgctatagattagaagggaaagactgctacctgtttaagattagtgaagaagtggtggtagatgccactgataaagggaatatagctcggctgattaatcattcttgtatgccaaattgctatgcaaggatcatgagtgtcggtgatgaggagagccggattgtactcatcgctaagactaacgtggctgccggtgatgagttaacgtatgactacttgtttgatcctgatgagccagaggaaaacaaagtcccatgcctatgtaaagctccaaactgccggaaattcatgaattaggaaggattatacaaataaatgaacaccagatgactagtattgtttcttctccgcaaggagcactaaccccccatcccctcttctgcagggaagctcacagttacaccaaagctgtattttttatcaaaccaaaagaagagaaaacaaagtagggagaaaaaaaaaaggcatagtttagtgtttttcttttacccttttgatttcctttagacattcatcgaattttaataaaaacctagatttggtagcttttggctcttggcgtctctgtaaatgtatcaccttacattttactcattttcttctacttaatgtcaaccgatttcttcccttcatgtacttttccgatgatctaccaatctaattgtattgaaagatagtaat

SEQ ID NO: 13272 - DNA, 1383 bp, Glycine max
  Clone ID: JC-GMLE01810062G08_FLI
gtacgccaaagatttgttgaacgcttgcgatgccaacaaggatgggagagtggatttccaggagttcaggaagtatatggacgacaaggaacttgagctttatcgcatttttcaggccattgatgttgcgcataatgggtgcattttgcccgaggagctttgggaggcgcttgtgagagcaggaattaagattgatgatgaagaactcgcccgttttgttgagcgtgttgataaggataataatggtgttataacatttgaagaatggagggattttctgctgctttaccctcatgaggcaaccattgagaacatttaccattatttggagcggatatgtgtggttgatataggggaacagactgttattccagcaggtattggtaagcacattcatgcaagcaggtatctgattgcaggaggagtagcaggtgcagcgtcacgcacagcaactgcaccccttgaccgtctaaaggtggtattgcaaatccaaacaacacaatctcatataatgcctgcaattaaagatatttggaaaaagggtggtttgttaggattttttcgaggcaatggcttaaatgttcttaaggtggcccctgagagtgccattagattttatagctatgagatgctgaagagcttcattacgagagccaaaggggatgaggcaaaggctgctaatattggagctatggggcggctgctagctggtggtattgctggcgctgtagctcaaactgcaatatatcccatggatcttgttaaaacaagactacaaacccatgcttgtaaaagtggaagaattcctagtcttggaaccctttcaaaagatatatgggttcaggaaggaccccgggcattttataggggattgattccttctcttcttgggattatcccttatgccggcatagatcttgctgcatatgaaaccttgaaggatatgtccaagcagtatattcttcatgatggagaacctggtcctctagtacaattaggatgtggaactgtatctggaactcttggagcaacatgtgtttacccgctgcaggtggttagaacaagaatgcaggctcaacgctcatataagggaatggctgatgtattcaggaaaacccttgaacatgaaggtttgagggggttctacaaaggaatatttcctaacttactcaaagttgtaccgtcagcaagcatcacctacatggtttatgagtctatgaaaaaaagtttggatttggagtgaagaaatttactgcttggtaattaatcttattgacatggctgaccgttggcacaactatacattggaaatggttttgcaatgtagacattgatgacaagaataaagtctacaaatacaattgattattgtgacaattgtct

SEQ ID NO: 13273 - DNA, 2167 bp, Glycine max
  Clone ID: JC-GMLE01810062H09_FLI
gagctctagtgttaaccatatagcagtgcaaatcatgccatataatgaatttggacctcctctttctaatgttacaaaactcacatttgaaggaagaactgatgtcagtgatttgggtctccagtacatctccaaattatgtgtttcattgcgtcacctgaatattaaaggatgcatttctgtcactgatattggcatatcagatctcatatccacgtgtaaaaaacttaattcaattgtggtttgcgatactttatttgggatctattcagttcaagctctttgctcagctatttctggtagtggcaacttcccctctctacattctagagataagcgtttgaaatctgtggtgtctaattttgaaatgctgcatatgggtggctgcaggggtattagtgagtcatctctactagagcttatgtctcaagcacaagttttgaagagtttatgcctgagatggactgacctggttgaccaggcactgtacaattttgtaggttcttccttggagatgcttgatgtttctgataccaagatttctggagctgcattagctcatattattcatggaaatccaagtttaaagtgtctgagagcaagaggctgtcaaaatttgtttccaggaaacaattgtatagaaaagagaaaatctagctttccctctttgcatgaaaaactgcatgctgagttaggaaaaatgtgtagattggaagaaattgaatttggatggggattttcttccttctctttgagtgctctggaacctttactgatgtcattaaagaccatcaatataggtttaggtggaacgctaggtgaagatgctttgaaacaattacctgcaatctgtcccttgctagaaacaataatccttcattttcaggtgataattatcttccctgtgatttgaggttctatattgctccctaaagaatataaaaaaattatgagttaatcataacatggaaaaccaagggagactttttccttcagttaatttcatggttagacttttccattcaacatctacagtccatgaagttccgttattattgcctccaagtattccaccagatgagtcaaggtttatactttgaattagtctcatcaattatggctaaattgttgtctttctgattcttctcatatcgatgtgtaggagatgcatgtttcttatactatactttgaattagtctcgtcaaggtttattacttgtgctatactctatgtatgcttctgctttcagttcagatgttgtatcacatttctaaaattatattttttgctttttttgtttttgttttttacaggtaatatctgatatgattgtgatgaactttgtcacatccttgaaatacttgcaagtattagctctgtgctattgttttggtgatatatccatgtcaagcttcaaattccctatgcaaaatctaagaaagttgaggcttgaaagaataaccccatggatgacaaatgatgacttggtggttctagctcaaaactgcagaaatttgttagagctttcattgctagggtgtcctcttctcgacccagattctctacagataattacatgtggatggccaggcttggtctctatccatttagaggactgtggagaagtaacggctaatggggcttctgctcttcttgactgcaaagctcttgaagatatcctgctgcgtcataatggccctgggctacccagaaacttcatttgttatgctgcttcagagatgccattgcttcgaaaattgtcactggatatatgcgatgcaagtgaaggtgattttgacattccaaatcagtatgcagacaaatactttttgagtaccttgaagatagctagatgcaaatctcaaagatgtgcttttaatctcccagcccctgccccaggggttcatagaagatctgtgcatgttgaaactctggtgcttgtgtggaacagcagagatctcatcagaacagtggtgaaggaaaggctttagtaaatgtatgtctgagcattcatcatccttctcacatgttgatgagttagttttacaagtgatttggtggcagtaagtaaaacgcttagtgattaagatgatcatttgtttgttaagtagtaaacatctgacaaaacgatgtcaagttgattgagaatccagccgttgcactttg

SEQ ID NO: 13274 - DNA, 1385 bp, Glycine max
  Clone ID: JC-GMLE01810063D09_FLI
aagtgcttgaataattgttcctgcatggcatataccaattcaaatataagtggaacaggtagtggctgtgtcatgtggtttggcgatttattagacatcaaattgtatccagcaccagaaagtgggcagcgtctatatataaggttgcctccttccgaattagattctatcaggcacaaggtgtctaaaataatgtatgcaacctccgttgctgcagctataggagttatacttgctatttattttctctacagaaggaaaatttatgagaaatcaatggccgaatataacaatgaaagttatgtgaatgatctggatctgccattgcttgatttgtcaataatcattgtagccacaaacaaattctcagagggaaacaagattggagaaggtggctttggatctgtatattggggaaaattagccagtgggctagaaattgctgtgaagagactctcaaagaactcggatcaaggaatgagcgagttcgtaaacgaagtaaaactgattgcaagagttcaacacagaaatcttgtaaagcttcttggctgttgcattcagaaaaaagagaaaatgctagtttatgaatacatggttaacggcagccttgactacttcatatttgattctaccaaagggaaattgctagattggccaaagcgtttccacataatttgtggaattgctcggggacttatgtaccttcatcaagattctcgattgaggattgtccatagagatctcaaagcaagtaatgttttactagatgatactttgaatccaaaaatttcagattttggagtggctaaaacttttggagaagagaatattgaaggaaatacaaatagaattgttggaacatatgggtacatggcaccagaatatgctatcgatgggcaattttctataaaatctgacgtcttcagctttggtgttttactgttggagattatatgtgggaagaaaagtagatgttctagtgggaagcaaattgttcaccttgttgatcatgtgtggacattgtggaaaaaagatatggctttacaaatagttgacccaaacatggaggattcatgcattgcgtctgaagtgttacgttgcatccatattgggctcttgtgcgtgcaacaatacccagaggataggcctacaatgacctcagtggttctcttgttggggagtgatgaggtgcaattggatgaacctaaagagccagggcattttgtgaagaaggaatctattgaagcaaattcaagctcatgtagttcaaccaatgcgatgtccataaccttattaactgctcgctgataatcaacgagataggtggatattgttgtaaaggaaattgctgaatggtatgaaggatattttgcacgagaagtacc

SEQ ID NO: 13275 - DNA, 1490 bp, Glycine max
  Clone ID: JC-GMLE01810063F05_FLI
gaacctgtctagggtttctgtccattggaaattgcaaaatctgcatatgtaaacatgttcccttccactaattatacctcctcaggctcttaccctcgtttcccttcatcttcttcttccacttcaccctatccttcttttactctccttcatcctgaaaattcttcttccagcaacaacacctttcttcatgatccacttgctcttacctacataccctctcattaccatgctccaatcccagaaacactagccaattgggcagttgcagattgtgcaatactgaatcaggatctaggtggtgccctttatggcatcaccaagaaaccaatgaagaaagcaactaagaaagacaggcacagcaagattcatacttctcagggtttgagggacagaagggttaggctttccattgagatcgcacgcaagttctttgatcttcaagatatgttagggtttgacaaagccagcaacacccttgactggctcttcacaaagtccaagaaggcaattaaggagcttactcgaagcaagcacagtgttgaaagcttcgagttctcctcatcttccgagggtgaagtagtttctactatccagcaacaagacctacaacaacaacatgggataaatttggaaaatgggaagttgaaagaacctgcagcttattgtgttaaagcaaagatgaaggaatcaagggaaaaagcaagggcaagagcaagggaaaagactagtagcaaggtattgtgcaacacaagtggcgaagggaaggtgcaagagttgaagaaaaagtgccctgcaactgaaaaccctcaaatcctgaaccagttaaggtcaacccttcaacctcctcatcctcaaaatgtgggtggagaagtgccaagagatgatgacttcaacgttattgaggaatccattgtcatcagaagaaagttgaaacacactttgatgtcttccaatattcatcatcaaaacgctgtgatccctaaggaagcaagtgtaaacaacagtgactaccactccttccccaatttgtctccaaattgggaagctaataatggtgccaatggacgctccaccttttgtgcaatagccagcatgaatctgtctacagggcttcaaatttttggaaaatcttgggaggagtgcaccaatcctcatccaagctaatatgttagctttcagtattatccgatgattgtctctagtgttttgctaagaaacatcatggtcatggaggcatctttctgtgtttttctacctgtaactttttctgtcctatatttcctttctacaatgtactgattttttgttgttgctctatatcagccaagaagggcatgtgacagttggcaaaaaaggatgcttcgtgtataatttctgaccaatattttaagtgtggctgatattataagggtcaaatatatttatcaggaaccgtcctttcttttgctagctgatttcaatttttatataattagtttttgatcaat

SEQ ID NO: 13276 - DNA, 1524 bp, Glycine max
  Clone ID: jC-gmle01810063f07_FLI
attgcagtgatcccaaaggggagaggaatggagttgggaaggaggatgaacaggaggtgagaaagaaggtactgcagaagcttgatgcttgctttggtgggtctctgttgaaagatgctaatcatgtgagattggacagggtttcggagttgctcatgttttacttatcctcgatgtgctatatatttggttttgattcgctgtgtggccctggcagttcgttcaagtccggtaaatttatttgggcttctgatgctgctggttgtttgaaccaattagaatctagatcgtttctggggaaattggctggtcttcacactgttgttttcgttcctctgaagtctggagtggtggagcttggttcgtttgaaatggtgcctgaagagcagggtgttgtggaaatggtcaggacagcatttggggaatccagtcctggacaggcaaaggtgtttccaaagatttttgggcatgagttaagcctgggggatacaaaatctcagtctataactattagtttctccccaaaggtggaagatgatccgggtttcacttcagactcctatgaagttcaagcactaggggtgaaccatgcttatggaaattcttccaatgggactttaggtgacggtaatgaaggaacattgtttcctcaattgaatcaaatgatggctgggaattttaatgctcaagcaagggttccttgtctagatctcggtaatgaagactcatcatcaattcatgcagatgagcggaagcccaaaaaaagaggtaggaaacctgccaatgggagagaggagccgctgaaccatgttgaagctgagagacaaagacgtgagaagcttaatcagaggttttatgccttgagagctgttgtccctaatatatctaaaatggacaaggcatctttgcttggtgatgccattacctttatcactgatctgcagatgaagatcaaggtgttggaagctgagaagaacatgggtaacaataaggaccaaaaattgtcattgccagatatggattttcaggaaagagaggatgacacagttgtgacagtgagatgccccttagatattcaccctgtttcgaatgttgttaaaacgttcagggagcatcaaattgtggctcaagactctaatgtttcaactgcagatgataaaataattcatacattctccataagaactgagggaggggaggctgctgctatacagttgaaagaaaagcttgaagcatccctatccaaaagttgattgtcagatcatatttatgtgtagcatctcaatgatattgtaaaccatgttagaaatactctgtcttgtaggttaagtggctaacataatattgttcttagtgcactttgtttttacagtagtgtactttgttagttgtaatctgttttaaaatatgttcaggtcatcgtaaatgaccttaattatgtacttaagttgattaataattgaatttgatgttgatggatgatataagttgaactatatttaatctatcatcaatctaagtatg

SEQ ID NO: 13277 - DNA, 971 bp, Glycine max
  Clone ID: JC-GMLE01810063H10_FLI
ggatgcttttgttgaaaagcatggagtcaaattggggcttatgtctggctttgtcaaagctgctgtcaatgcactccaacatcagccgattgtcaatgcagtcattgatggtgatgatattatatacagagattatatagatatcagcatagctgttggtactccaaaggtttttatcagccacctttatcttttctcttttactttgtttatgtagagaaatcaatcaatcattatactatacttttgatgaaacttagccatttgcgattgacttatgtcaactattgtcatggctatggagctaatttacaagttatctagtatatagtgtctaatttagcaattttttacatggctatgaaaattatcaacatgcatgttgtatttgaacaaatattgaccctcaattgccattccagggccttgttgtaccggttatccgcaatgctgataccatgaactttgctgatatagaaaagcagattaatacttttgcaaagaaggcaaatgatggatctttatcaattgatgagatggctggaggcactcttacaatatccaatggtggtgtttatggaagccttttgagtacccctattatcaaccctcctcagtctgcaatcttgggtatgcattccatagtgagccgtccaacggttgttggaggaaatattgtcccaagaccaatgatgtacgtggctctaacatatgaccacagaattattgatggaagagaggccgtgttctttctgcgacgcatcaaagatattgtggaggatcctcgcaggcttctgcttgacatatgaagtgaacctctaattttaaatggagtaaattaaacctcaaaattcaaataccataatgggtaccctttggtttggattttgaattgcggctgtccgtaatttataatctgtaatgagcaaactctttaggatcatatcccaatttccgttcgatattaattc

SEQ ID NO: 13278 - DNA, 3132 bp, Glycine max
  Clone ID: JC-GMLE01810064B05_FLI
cagctttgtctcatcattcagagaagcagtctacaaggttaaatgcagaagtgagtcttcagatggacattcgggttctgcttttcaaggaaatgaagcccaaacagataattttatcgaaatgtaccttagaccaccttcagctagtgaagaagcaaggataaatgattggatcaaagtgcggcagtctggaattagatattatttatcacttggtgaccagaggattgttgacaagaatttcatcatcaggcctaaagctgaatttgaggttggtcgaatgacattgggtggattattggctcttgggtacattgttgttgttagttacaagcgtgcctccacaactgtcaataatggcaaggtttcaatgtcttttgaaactattgatgttcttggtgagacgttcatggtgatgagaggaactaatagaaagactgtcagaacagaagcattaaggatgggtattaatggaccttggattactaaatcatatctggaaatgattcttcagagaaaaggtgtacctcgtcttagtacaccaccacttgtgtctaatacaactgtggctggtagtcaagaaactgtgatcgctgcaccaaagccaattcgtgttacccctaaccttgttactgggatagatgatttacctcagccgtggactcgatccccgacaaatctaaaatggaacctgttgcggctgaatggcatttcatatcttcagattcttcccagcctgacaactcagtcctagacccttcatctttcagggatagtattaggcttgcttcaatgcctgattcatttgacttggataggggattgcttttggcagttcaagcaatacaagtaaggagcagaaacttgcattgttggagaataaaggtgtaccagtcatagttggaatcggaggtccaagtgggtctgggaagactagtttggctcataaaatggcaaacataattggttgtgaagtagtttcactggaaagctattataaacaagtaaaggattttaaatatgatgacttcagcgcacttgatttatccttgctatcaaagaatattgatgacataagaaatggtcaaagaacaaaagtacctatatttgacttggaaagtggtgctcggagtggcttcaaggaacttgaagtttctgaagattgtggagtgattatatttgaaggcgtctatgccctgcatcctgatattcgaatatcacttgacttgtggattgctgttgtaagaatgagtctccatcttcgaaggccattttctgtttcatctatttttttatttattattgttggggctaggaactagcccctcactttgattttcttatttgaaacaggttggaggtgttcattcacatttgatttcacgagttcaaagggataagagtagagtgggatgttttatttcccaaaatgagatcatgatgacggtgtttcctatgttccagcagcttattgaaccccatcttgttcatgcacattattgtttcactttggataatgttgcttttggagaattgatgcatctatgacacatcatcatttaatgttgactatttggaagcatagaaattacttggttttcaataaccagattttcaacctcgaaaaagtcatggatgaagctttattccatacttggtcatggttaaaatgtatggagaaagacttccatattcatttcaaccattggtctactaacttgaaggaagaactttcttagcgggggttttttgaccttgttgtgcttatatagttgggtttggcagatcactgcctatgtaactacttgttcttttcttcagtacacctagtactgaattatttataatactattctgatttttgctgtgcaaaaaaaatgttgacttgcagcttaaaattcgaaatgactttgaccctgtgctttctcctgagagttcattatttgtattaaagagtaacaaaaaagtagcatatcaagatattgttgcaattctcgattcagcaaaattttgcagttcagtgcagaaatttattgatatttatataaggcttcctgggatcccttctaatgggcagttgagtgatagtgattgtattcgagtcagaatatgtgaaggcagatttgcattgctgatacgagagcctatcaaagaagggaacttcatcattcagcctaaagtggattttgatattagcattagtacggttgctggtcttctcaatcttgggtaccaagcagttgcttatattgaagcgtctgcattcatctatcaggatggaaagattctaattgaggttgatcatctacaagatgtccctggcccatacattcagataaagggtgctaataaagatgcagtagcagcagcaggttcaatgcttaaattggatggttcatatactactaagagttatcttgaaataattttggaaagactaccggctatagaaagaacttctggtgggattcattctcagcaatcagcaaggctgctagagattgttgaatttattcaatctcagggatgtagctctgcttcagattcctcatcaagtagggtagtctctccaattgaaggagttattgaggaaatgcaatcaaagattagaaggcttgaaaggtggctagcgataaacacggttctatggacatttctgatgtctgcccttgttggttattcgctgtatcaaaggaagcgccaataatgatctttggaaattttcaggatcatgttttgccgttctggttaagttacttcgtataccgatcccaattttttaaatggcaagtccaatcataaactaacaacagcaactaatccctcgagtgtaggttccattatacattgtggttcatcatttcaaaggttaattgttgattaattcacacgtacataatttggtgaccaaaacgagtttcagacatgcagccaccgcccacttctccgctatggaatttgtaaataatgaaagtattgactcaacacacctatagacgttaatgaccacaagtccacaagcttgtagcctgttccaaggttcaatgtttgctaaaaaagtattgagaggaggaatctgggctgtactgtagaacatgaattgtcattggtcaagattacaatttttctttt

SEQ ID NO: 13279 - DNA, 1489 bp, Glycine max
  Clone ID: jC-gmle01810064c12_FLI
gggaagccaaagcgaaaccctaaccctaacggagagatggcggagcacttggcatcgatattcgggacggagaaggacagggtgaactgtccgttctacttcaagatcggcgcgtgcaggcacggcgaccggtgctcccggcttcacacgaagcccacaattagcccaacgttggttctgtcgaacatgtaccagaggcccgacatgaacatgaacatcatcaccaaccccgatcagccccagccccaatctctcgaccccgataaggtccaggatcacttcgacgacttctacgaagatctctttgaggagcttagcaagtacggccccattcagagcttgaatatttgcgacaacctcgccgatcatatggtctttctctccgcttccttcacgcaattttaatttttcttaaatttaattgttttaattgtttattttgcttctttcgttgtttgcgcaggttggaaatgtgtacgttcagtttagggaggaagaccatgcagccaacgccctcatgaatctgactgggaggttttattcaggtcgacccatcattgttgatttctctcctgttacggattttcgagaagctacttgtaggcagtatgaggaaaatgtatgcaatcgaggtggctattgcaacttcatgcacctaaagaagattagcagggatttgagaaggaaattatttggaagaaataggcgatggaatggccgcagtggaagcagaagcaagagtcctccaaggaatcgtaaccatggggagcatttacattctggtcgtggttctggtagaagagattttgacaggtcccatggccaccatggtaggaggcctagaagccgtagtcctcgatatagagggaaacgaagtagaagtcctgtgggtagggataggagtcctccgatcagagaaaatagtgcagaaaggagagctaaaattgagcaatggaacagggagaaggaacaaggggaaactagtaacaagaacaatacaaaaagcaatgatgattatcaagaacagagtgttgcacaaaatggcagtgaatctggtaatcatcagatatagcaacaacaacgttgaggtttggcccaaaatctgctatcaagagtggcaagtaatctggtttgtgactttgtcgtttgcgctgagttagatggattcagttgccattgtttttattctatttggaattgtcaatttagtgatagaaccttgtaacatccatagcatcaatgttttaattttctgcttcaattgtaatgttctgcaagggaggaagaaaaatggaaaaagcggcgagtttaacttgttgcgaggatgaagcgatacatttgataaagttcacctatgaatgtttcatattttgttgtcgagcatttattgtatgtcaccaatgttgaagggtatttagatggaaaacagatgaaatgatgtatgaatttcgactatgtgaatagctaaaggtttttttttttgttaagt

SEQ ID NO: 13280 - DNA, 1749 bp, Glycine max
  Clone ID: JC-GMLE01810064D05_FLI
gcattacatcacgtggctctcacagtaatcttcaagcagagcgatccgacacgatgggctcagcagcgaaatatgagcttccattcaagctgaacaatccggacctcctacacaatgaatcgttcgtccacggtaaatgggtgaagtcgaagtccggcaaaactttcgaagttgcagatcccggaactggcaagacatggatagattgtccaacaaacgacgcttcagacgttgacgaagcagtcaaaagctcgcatgaatgctttctggaatacaagaagatcagtccgagacagcgtgcgcagatgctgtacaagtgggacgctttgatcaaagagaacagggaagacatcgccaccattcttgtgtacgagactggtaagccgagggctgaagcttatggcgagatcgactattccacaggcttcacttggtggttcgcaggagaagcagagcgcattcaggggtctgttttcacccctgcactgccgaaccgtcggatcttcaccatcaagcagccgctgggcgttgctgctgcgctcgtaccgtggaactttcctattgctatgatcctgcggaaagctggcgcggctcttgctgctggttgtaccatgatcgtaaagcctagtccagagacgccaatcaccgtcctagcactggcgtatcttgcggacaaagctggatttcccaagggtgcgctgaatgtcctgacgacagatctcgacaagacacccgagctaagcgaagcgctatgtcggcacccgctcgtaaacaaggtaacgttcacaggatctaccagagtcggaaagctggtggcgaagatctgttcggacaatctgaagaaagtcacgcttgagctaggtggaaactgtccagtcttgatctttgacgacgcaaacattgagcaggcaatgtctcaggtattcgcgctcaagttccgccacgcgggccaagcttgcatcacagcaaaccgcatctacgtgcaatctggtattttcgacaagttcctggagcgctggaacgccgaagctcaaaagatcgtcgttggtcatggttctgacgagaagactacaatgggcccagtcacaacaccgcgagccgtcgacaaagctctatcgctcgtagaagacgccaggaagaagggcgcaaagatccataccggcggcaacaaggttgagaagaacggtgggtatttcttcgagcctacggtcattacgggagtgacaccagatatggacatcgccaaagaggaagtgttctcgccaatcagtaccttcatcaagttcgagacggaagatgaagtcgtcaaggcagcaaacgacaccagcatgggtcttgcatcctatctcttcaccaagaacgtcgatcggatgtggaggctgtttgagaatttggaagctggcatgattggactgaacactggtaagtctgtaccgaaagcaagatactccttggtggtgactaatgggtgaaccaggaaactcttcggcggctgaatcgccgtttggtggtatcaagcaaagtggttatgggaaggagtctggcaaggacgtggcggtgaacgagtacatgatcacaaagaccggaacgtttaccttggaagatcagtcgtgagatcaaacgcggtgaatctgcggcgtttgtatctgtcgattatgcgtgagaatacggtaccagacattccaccattggagagacaaacgatcagtcaaatagatctgtgcatggcggagtgtaccgtttcttctc

SEQ ID NO: 13281 - DNA, 1816 bp, Glycine max
  Clone ID: JC-GMLE01810064E03_FLI
gtttttccacaatttgttggcttcttccacaacacatgtgcatatatacctatataagtttttgaaactctatcttcaaagttgcgtaatctggagctccttgacataagtttcaactatttgactaatgacatcctgccaaccctcgggggatttacatctttgaaagagctgtatttggttggaattcatttggactcagatcttcatttccaagagaacgatggatttacgtggccaaccggtttacaagcccttgatctggtgggaaacagattaaataacaagtttcttccatcattaaatgggttagaaagtctcaaacatctttatttaggcttcaatcagttagaaggatcgctgaatataggcggattatcaggtttgactagcttggagattcttgatctaagttataataatattagtgattttgtggtccatcaaggcttaaaaagtctacgcagattggatgctctttatttagatgggaatatgatagatggaagcaagttaagaaagtcgttgcgagctttttcatctgttaggatgctttcaatgagagaaaatgaatttaaaggaacaattgttgttggagattttctggatttaagtaacctagaagatttgacaatggacctcagtaataacatggagaatgagtttctcaaaagtattgagaaattgacatctttaaaagttctgtctctttatgattgtaatataaatggcacccttcctcctgcggattggtctaagttaaagaagttggagttgttagatctatccggcaacaaatttgagggaccacttccttcgtcttttgttaacatgacgtctctcttggaattggaaatttctgataatcacttcattggaaatttcggttctaacattgcaagccttacatcacttgaatattttggttttacagaaaaccaatttgaagttcctgtctctttcacaccatttgccaatctttcaaagatcaagttcatctatggtgaaggaaacaaaatcttattggactcacaaaatagtttgccaacttggattccaaaatttcagttacaagtgcttagtgtgtcttcaacaactaaaactaaatctcttccgctccccaattttcttctataccaaaacaatttaaccatactagatttcagtagttggaagttggaaagagactttcctaattggttgttggaaaacaacacaaaaatgatggaagttctgtttagaaattgctctttaactggtactttccagctacccatgcgtccccttcctaacataaggcaaattgatgtttctgacaatatcatagttggccaaatccctatcaacaatattagttcaatttatccaaatttgcaatctcttaacttgtctagaaacaacatccaaggttcaatcccttacgagttaggccaaatgaactcattatattcattggatctttctgacaatcaattgtctggagaaatgccagaggacatatttggagttggtcaccaactcaacttcttgaaactatcaaacaataagcttgagggacctattttgaatatccctaatggtttggagaccttgttattgaaccataatagatttactggtagactcccaagcaacatttttaatgcatccatcatttcattggatgtaagcaataatcatttggtgggaaagattccaagccttataaaaaacttgtcaggattgaacgaactttgtttgtctaataaccattttgaaggatccattccattagaacttggagaacttgaatatctaacttctttagatctctccc

SEQ ID NO: 13282 - DNA, 3550 bp, Glycine max
  Clone ID: JC-GMLE01810064F06_FLI
gttgattcgtcagggagacagattgaaatggggctcttgggtcccgtatccagtgatatcgtggcacagtcgcagggaacctcgaatgaacatgttggattattgagagctgtgcctggtgaacctatgtctcagggattgccccttttgagcatgcacagtgagcgggtagaagtacaagcaagtaatccaggaatgcatcaaattctttccgctaacaaacagtccatgcaaatgggtatgcttctgaaaagctcagggccacagcagcagacaacaactcccaagcgcaaggcaccaatggaattatcgtccagtatctcctttaacaagcgggttgcagcaatgggaaatagaccttggttgcagcaagtacctaatgcatcaaataaaggttctctgcagatgcaatccccatcaaatgcctctaggacacaacatttggcagcttctagcaagagaaaaacacagttggataacactcccagtaaatctgggacacctcgggccatgagttctaaaagtcaaaatacgcagatgaagcagtcctccaaggttcaaactgaatcatctgatagtgttaggtccaagatgagagagtctttagctgctgctctggccttggtttctcagcaaggtaaacctcagcccccaaacaataatacaccgaatgatgctgccaatactcgggttaaattagagaacagctctcaatgtgctggatcagcacctgcatccatcgatgcttcactggagcaaaggcaggatatttctcaatcagttaattcctcttttgctgtggctgattcagttggccatgcggcaggagagcacatgcaaagtacaacatatgaagattttccagaaaaatacaaggacttcgaagcaggatccacaaacgcatcggacaatgaaaacatactgagttctatgcatgtcttgaactgtgataagcaagatttccagtcaagttatactttgactactgatgatgttcctttcagtgacggtttctttatgaaagatgatcttctgcagggaaatggtctttcgtgggtattatctgatatggtggatgtcggaaatcaaagggaaagtcaacctaatatagagcagagatcagaacctgaggaaacgggtggaggttgtagggaggaggtccctttgcctgaacttttggcatcaagaatagaggcagaactcttcaagctgtttcaaggtgtgaataagaagtacaaagaaaaagggaggtctctcttattcaatttaaaagatcgcaataatcctgaacttagagaaagggtcatgtttggtaaaattcctccagaacaattatgttctatgacagctgaagaacttgcttcaaaggagctctctcaatggcggatagccaaggctgaggagcttgctcaaatggtggttttacctgattcagatggtgattttagacgtttggtcaagaagacacataaaggtgaatttcaagtggaagttgaacacgaagacaatgtccctgtggaggaggtttcaggtggtacaacctctgttgctcgaagccaaactataaaaaaggatgtggaagatgcttctccttccaaacctgatgtgaaaactgatgccgagaaaggcaatttgcagaaggatgatacattttccatcaccatttcttccaacgacggggctgatcccatgcaagggcttattactgatgatgcattaaaggactctgactttcttgaaccaattgtttctcttgatgatttcatgtattctcttacatatgcgcctccatttgaaaatttaccagtagaatctgggaaagtggtacctacctcagacaaggatgattccggggttggaacaaaatcaaaacctgctgatttaacaccaaatgagcaagcggatatcactggtgataataagtctgagaagtttcaaagcacacatgtaaattcagattctttaaaggagaaaaaggttaatgctgaatctggggccatttcttctgatgtgggatacagtgggagtcaagctgacatgaagtcaactgatggtcgtaccaaggaaaggtcaactgatgatgtgaagtctgcttccagcgatgctgagttgagaggcaatctctttcgtgcggaagagagatatgataatgacaataggtactcgaaggatgcaatccccactaagggtgaatgcctctgggagggaatgcttcaaccaaatatctctagcactcattcagtcataagcatctttaagagtggtgagaaaactgctgctaaagactggcctgggtttctcgagatcaagggaagggttcgacttgatgcatttgagaaatttctgcaagaccttcgacagtccagaagtcgtgcaatcatggtttcgcatttcgtttccaaagagtcggatgatcaatcaactctacgtgaggtggctgactcgtacattttggacgagagagtaggatttgctgagcctgtccctggagttgaactttacttttgcccacctcataagaaaacagttgaaatgctcagcaacatacttccaaaggaacaaattgagccagttaattctattgataatggcctaattggtattattgtatggagaaaaactaatttaacttcgtctatatcacccaccactgcatcacatcacaaacatagctctaaaagacaatacttcagtaggagacagcaagatataaatgtgaatgccaattctacccataaagcagtgccctctatgggcgttaagacaactgagaatgatgatgatgatgtgcctcccggatttgggccaccagcggcccgagtggaggatgacctgccagagtttaatttttccggcagttcaaatccgtcacatttgggccaaaaatcaatgggaccaccaaatatggtcccattacactcggctaacccagccccaccacgccctgcagaacaaatgagggaacttgtgcacaaatatgggcaaaacaaaccaaatgtaccttcggtaaactggcaggataaatttgggggaacaattcaaccctggaatgatgatgatgatgacatacctgaatggcagccccaaaactcccagaatcagtttcctccccaacagacaatgcacaactttcatcttaggcctcacattttgaatcaatcatttccgggttcacagcaacagccaataatgacaccacaatatcttcaacccccaatgaatgtgacccatggtcaaagaaattttgaccctcagtgggttccttctccccagggtagcaacctacagccaggaggtggaccaccctatgcgcaaggcactacctggcctcaagatgcgtctagaagtagaggatattagtttcctctttttatttttattttcatgtctttcatatactgtagtatgtaagcttattgtaaggtgtcgagctattttttttttctgtagcatcaatacctcgtagaacaaacaaatgaccatttttctcttgttttagtttgacagcagtaggtgctcagttgaataaatacgaggacaacaattttgc

SEQ ID NO: 13283 - DNA, 1947 bp, Glycine max
  Clone ID: jC-gmle01810064h08_FLI
cgtttattcgtttccctgcttctgtgagaattttgctgacgatcatacgctttctctttctttggctttcggtttcttggtgctgtttgagtgtttgtgcattgtacattattatctctacatgttctgatgttattttccttgcaggttgtgaattatttgcaaatctgattcaactacagtgtctattttgactcccaagattgcaagtggcagttatgggtcataggcacttacataacacatcttcattgttcgatggtgagcctgaccagaactggaatcatttgcatactgatcaacaatatgtgcaccttggtaggactaacacttcagagaatagttcatttatttatcctgctgaaaatatgtccatagatagcatatctttcccctctcattggaattcttcctcaaggtcaaatggatatgcatcctctagtcacaacattgttgtacctcctcaccagtcagatgcatcaggcacttctaatgatcattttgtgcattcgtctagtgctggaccattctttacagtgtcggaaaattatttacaccaaccttcttcctccaattatgacagacaaacatttcatgttgatgctggttttattgatcttacaatgggaagtggacaagggcatcacaagcgtaagagccctggaattccttcagtctacgagggaggcagtactagtagatactttaatgctgggagttcaactgatcttcctatatcttcagaattgtggcaggagaagccaaatattgattctcaatatatgccctgggtatcattttactatgacacccacattcagaggtactggcctttcaattaagggtgagggttctttgcggaatgtgaggagccgttctacacttgatttggattccaatctgtctaggacccatttatcaagtaatcattcacacaattcctaccctactgtcccaccagttgaccattctagcatggcggatctttctggtcagacttctggtacattaacaagggattggagccaaatgaacatgtctccagctaatggaagggtgttattatcagatacaagttcttttggtcttgaaacaagtcacttccttgttggaagtggtgctactgctagcaatgcttctgtagatgttgggggcttccatcatgaatttggtgcaagcagaaatcctactgctcctcaaagttttcataatactcatactcagaccgctaggggaattcgaagcaactattctcagagatccacaccaacttttagggcttctcaagcttgcgcttgggacatgtgacatctgatgatggattgcctatggtagctgaaagttactcttctagacatccaaggccattgagcaccattggctggaggaatggtgatagaaatgggaggtcaagaatttctagtgaaagatatcgatcattgactgaggagagtggtctccatgatcgattttcctctgagggtttcatggttgttgagcgtgcatcagtgtatggttccaggaatatgcttgatcagcaccgagacatgaggatggatgtagataacatgagttatgaggaactacttgcacttggtgagaggattggctatgtgaacacaggagtctctgaggatttgctttccaaatgtttgacggaaacaatatattgttcatctgagcaaagtgaagacgaaggaaactgcgtaatatgtctggaagagtacaagaatatggacgatgttggaacacttcaaacttgtggacatgactaccatgtgagctgcattaaaaagtggctatctatgaagaaattatgtcctatctgcaaagtatctgctttgcctgaggatacgaaggataaataacttctgtaatataaattaatcccattttgtgtatatatttggacatccctaaaaaatgaggaaacgaacctgtttttgg

SEQ ID NO: 13284 - DNA, 1317 bp, Glycine max
  Clone ID: jC-gmle01810064h11_FLI
tgtacatcaagaacatgtgctatatgccttgaagactattgtgttggtgagaagctcaggattctgccctgctgtcacaagtttcatgctgcctgtgtggattcgtggcttacttcatggagaaccttttgtccagtttgcaagcgtgatgctagaaccggcttaactgatccaccaccttcagagtccacacccttgctctcatcaaccccagcatctatggcatcctctgtcttatcttctgcaagatcatcactagcttcatcttcagcaatacaaattgcccggacagcatctatggcatcctctgccttaccttctgcgagatcatctctagcttcatcttcagcaatacaaattgcccggacagcatctatggcatcctctgccttacattctgcgagatcatcactagcttcatcttcagcaatacaaatttcccgggcagcttcacagaccccatctgtttcccgtaaccactccatagccagtacaccttatgttcagccatctcttaggtcctcctaccatcaatccccctccctaagcatcagccgaagctccgtagatcttaggaatgcatcccaaagatctctagcttctcacttgaattcaccatgttccatgggatacccatctttgtcatctcttaactcaaggtacatgtctccacacattccaagtccaagcaatgcttcagtaagctatatgggttcatccagtcatcaacaacatcctctccgttatagtgagtcggctgcaagcttctccccatttgcatcgacacactcccttccagaatgttaaattgttcaattgattatatcatatgattgagacgtccacgcagttgaactagtaattgccaagtcttgaactaaaaggtggccatgtgatgaccggtggtctagttgaatagtcctatgtgatgcttggggcattccctacctctgtcatttgacttccgtcttggcacctggtgtacattgtagcttctctctggtgttagtttcgtttacatgtgctggttgaggttcttacatttataggttggagagcttgcatacagtaacttgtgcgtattgtttgtactttgaatgttgacgttttcatggccttgatgtccaagtatagtcaactgctaacaagagaaatgttgggctgtattgacactagacacattgaagtaagaagagttctttatgctctgtctagtggatttgtccaactgaatcatgagagatcatgtgatgtatcactctagtgttatctatacttgatcatctaattgcaactctgagtatcaataatacttgt

SEQ ID NO: 13285 - DNA, 2008 bp, Glycine max
  Clone ID: JC-GMLE01810065E09_FLI
ctcttttttctctcacccccaatcccaaacccaaaccctagctagcttcaccatgcggttccaatcgctctaaccctatctccttttctccaccaacgatcttcgatccgcatcgccgttcattcgaatcgtctcagattctccgctgcttccaccaccaccacaaggaggaggagttcctcgcgattcccgcttgaagcttttccgtcgccgccgacgatcgaagagattcgctccgattcccaacgcgccgtcgtcgaggttttcaccgaaggaacaaatcctgttgttcctcttcttcgattcgattggattgcactgttttgccctaactgttgccgcgacttcttcggatttctggtttgagagggcttttctgcgcttgattcgaattcgtcggattctcatcctcgatcgtttgataacgatcctattgctctgatttcgaaagtctctggaaggaatatcaattttctcaggattcggattgcgctctggtttttgcgaggaagtgaagaagattcggcatcaggttgctcgtgaagaattctggaagtgaaatctcgccgtcgtggtggttcgatttgttcgatcttaactttcgtaatctgcaagttgagggagaaaaaaaatcagaaaaagtaaagagaagagaaagaaaaagagatttgatatattgtactgtgtgattttttttttttttagttttaataacaggggcccttttttgatattatttcagaggccctttggttattatcatcatcatcgtcctttgttattattggttctaagattaaaaaaatctttttctatagatagaaagagaaatataccatggcggtgtattataaatttaagagtgcaagagattatgattcaattcccatggacggtcctttcatctctgttggtactttgaaagaaaaaatatttgaatccaagcatttagggaggggtactgatttcgaccttgtggtcaccaacgcccagaccaatgaagaatatcttgatgaagaaatgttgattcctaaaaatacctcagtgttaattcgtcgggttccaggacggccacgtttaccaattgttactgaaatagaacaaaaggtggaaaataaggtggtggaatctgaacctgaaaacagaagcttaccagctgaagatccatctgccatgaaatatcctgaagattcagactgggatgaatttggcaatgatttgtattcaattcctgatcaagtgcctgttcaatcaagcaacttaattccagaggctcctcctcccaacaaagctgatgaagacagtaagattaaagcctttgttgatactccagccttggattggcaacgtcaaggttcagattttggcactggtagaggctttggaaggggtacagggggacggatgggtggtggacgtggttttggtgattctctgtctattctaatatctacatgttttcagttaattgctgtttttaatactaatatgttgatcacaactgatgctgaggtctggcagggatggagcgaaaaacacctccacaaggctatgtatgccacagatgcaaggtgcctggacattttattcagcactgtcctacaaatggtgacccgaattatgacatgagaaaagtcaagcaacctactggtattccaagatccatgctgatggtaaatccacaaggttcctatgctttacctaatggttcagtagctgtcttgaagccaaatgaggctgcttttgagaaagaaatagaagggatgccatcaacacgttctgttggggaactaccacccgagctccgctgtcccttatgtaatgatgttatgaaagatgctgtactgacaagcaagtgttgctttaaaagcttttgtgacagatgtatgtttttcattcatctgttgtatttagggttttcagaatttgaatattatgcatttatgctaatgtttctctggtttgtagttcttcctcatcatgcaagtacagaacagtttagatgttt

SEQ ID NO: 13286 - DNA, 3463 bp, Glycine max
  Clone ID: JC-GMLE01810066F10_FLI
gtaacaacgaacaccagataacaccaccgaaacacctcacggcctggtgcctatatcgacaacacccacattatgtggcggccaacagcagcagtggcgatcgcgtcactgctcacattaccctcagcactcgcagagatcagcctaagctcccagaagtctttcgttcgcactgagaacctctttgcgtccgacccctacctgtccatctacggcgacaggcccgacgattgccctccttgtttcaactgtaaccttgacgacttcacgtgtcttcagtttgccaactgtaccaaaagcagcggcaagtgctcctgtcctcctggatttggtggagaggactgcagtcagccactctgtggatctctccccgaaggaaaggacaggcttccaaggcaagggaaagagtgcgaatgtcatgaaggatgggagggaataaattgcaatgtttgcaagacggacaacgcatgcaatgccatgatgccgaatggagaagatggtgtctgctatcgcgagggactggtcgtgaaggagaactaccagatgtgcgacatcacgaaccgcaagattatggatcagctcaaggaaaagaaggcacaggcgacattcagttgtaatgctgagagaggcgagtgtaatttccagttctgggttgaccagagggagagcttctactgcggcctggagaactgcgaatggagcgctgaggcgacagaatcgaagaacacgacgagctacaagtgcaaggatatcaagtgcgcctgtattccggatcgcttcctctgtggagaggatggcagtgttgacattggcgacttcctggaccaggagatcaagggcccggctagcttcagctcagtgagcaccgccagcggctcgcattcggctttctctgagcctgctatgaacggcttgatccagaatatcttcggcgacgaatcgattactctcaactgtggcagtggagaatgtctgtacaagactgaggtccctggatacgagcgcccggtcaagaagatcaacacacccttgatcgcaggcgtcatcgctggatgtggattgttcgtcgttgctgtcattttgattgttttcttcctggcgcgccgcaactcaagacgttatggacctattcaacttggcgaggaggaagaagatgatgctgctaaactgcttgcggaccacaagccagcatctctcgccttcgagaacgtctcttaccacctcaagggcaggcagatcttgtctgacatttccggtgcggttcaccctggtgagctcatggcaatcatgggcgcctcaggagctggcaagacgactttcctcgatctgcttgctcgtaagaacaagcgtggtactggcctcggcgatttctgggtcaacggcgagaagatcaccgacgacgacttccgcagcgctatcggatttgtcgaccaggacgatacaatgctacccacgctcactgtacacgagactattatggattctgctttgcttcgactcccgaaggacatgagctgggctgtcaaggcacaaaaggtcgaagacgttgagaaacagctgggcatctatcacatccgtcaccaacttattggctctgaagaaggctctggacgtggcatttctggcggcgagaagcgcagagtgggcatcgcatgtgaacttgtcaccagcccttccattctcttcttgtacgaaccgacttccggtcttgatgcatacaacgccttcaacgtcatcgaatgtctggtcactctcgtcaagtcctacaaccgtactgtcgtcttcaccattcaccagcctcgctccaacattgttgctctgttcgaccagctcgtcttgcttgctcaaggtcgcactgtctacagcggacctttctcaaaatgccagaactactttgacagcatcggctactcttgtcctcctggtttcaacatcgctgactacttggttgatctgaccatgcacgccagccgacctgacaatccaattcccgaagacagccacacctacggcgaggatctcgatggcagagccacagtcgccagctcgaccatggcagtcaaaagtatacctagcatcatcagcaatcccagcattgaggaaggtagaccaaagaacaagcgcaagtcaagtattcgtcaacaacaggagaggcagctcttcagtcggaagagcaccgaccgtgctcccgctcccgccagtttaaggagtgatggtgacagtattctggacaaagacaacaagtgggtcaagatggcaaggcagaacgcacagggatcgtccatcaatgaagatggtcacgatctacccccggatgctggcaacaacaccaacctcgatgtcctcgtctcatcttacgaggcgtccgacgtcaaggccgaactgcattccgacatcgagtctgcaatctcagacgcctctgaatctaacggcaaccctcttcacgcacccaatggcaactcctctggcaaagttcgtggctaccgcaagcctatgctgcccacgcaattcctcatcctctcccgccgcacctggcgcaacctctaccgcaacccacaactaatgctgacacattacgccattgccatcctgctcgccgtcttcctcggcttcctcttctacggcctgaccgacgaccttaagggcttccagaaccgtcttggtttcttcttcttcctgctcgccctcttcggcttctccactctcacgtccctcaccaccttcgcgccagagcgcctgcttttcgtccgcgaacgtgcaaagggatactacacacctcttgcctactacttggccaaagtcgtcttcgacatcgttcccctgcgcatcctgccacccgccatcatgggctgtatcgtgtacccgatgacaggcctagtaccaaccgcccccgagttcggcaaattcatgctcctcctcgtgctcttcaacctagcggcggcgatgatctgcctgttcctcgggatcgtcgtccgcaaccagggcgtagccaacttgctcggcgtgctcgtcatgctcttctccctgctctttggcggcttcctgctcaaccacgagaccatccctaagggtctgctgtggttgcaatcgctctccatcttccacttcggcttcgaaggcctgatcgtcaatgaagtgcgctacctgtctctcgtcgacaagaagtacggcctcaacatcgaagtgcccggcagtgcgatcctgagcagtttcggttttgatgtgttggcgctgtggcgtgatgttgcggggttgggagttgtgtcgggtgcgtttttcgtgcttggatttgcggcgttgcatttcttgcttgtggagaggagatgagtggggaagataattgtgttgtttgagatgaggggaagctattgacttgtgggtgttgaagagtgatgtaggatgttcatgtgtaaatgtaggtttcttggaatagatgtgagagaatatatatgaagtttttctg

SEQ ID NO: 13287 - DNA, 1214 bp, Glycine max
  Clone ID: JC-GMLE01810066H12_FLI
gtaggctatactaaggtgaaaaaggagagatggcagctgcaacatctagtgctgtgttaaacgggtttggatctcacttcttgtgtggaggaaagaggagccatgcccttcttgctgctagcattggagggaaagttggtgcttctgttagtcctaaaagagttattgtggcagttgctgctgcaccaaagaagtcatggatccccgctgtaaaaggtggtgggagtttcatagacccagaatggcttgatggctcgtaagttcaaccatctatctattcaatttatctcttgtttctcctttctttcttatattctttgttggaaattcaagtatgagtaattagtctcactcacattagtcaggaaatggctcaatgatagtgtattttaaactgtaacttgtttcttatatataggaccagaagtagtatgtcttaaggttttggataaagaaatagagtttgattttcttgataatcatagtcattacattagccagttaagcctccaagagtgttaagagtttgatggattcattttttgttgaatgttgcaattgtaggctaccaggtgactatggttttgacccactaggactaggaaaggacccggcattcctgaaatggtatagagaagctgaactcattcatgggaggtgggcaatggctgcagttgtaggcatcttcattgggcaggcatggagtggagttccatggtttgaggctggagcagatcctaatgcaattgctcctttctcatttggctctctcttaggtacccagttgctcctaatggggtgggttgagagcaagagatgggtggacttcttcaacccagattctcagtcagtggagtgggccactccatggtcaaaaactgctgagaactttggcaactctactggtgaacaaggctaccctggaggaaaattctttgaccctttgggatttgctggagctatcaaggatggcgtttacattccggatgccgacaagctagagagactgaaattggctgagattaagcatgctaggattgctatgttggctatgctgattttctactttgaggctggccagggcaagacaccccttggtgctcttggcttgtaagcaaaataatgtacactagggagacaacttgaatcattgtcctgtacagccagatttctcccttgagaagtttcaaattttatgctctaatcttggatgc

SEQ ID NO: 13288 - DNA, 1555 bp, Glycine max
  Clone ID: JC-GMLE01810067B04_FLI
cggcattaacatccgctacctcggtcgcatcgccaagagaactcttgccacacctgtcgtcatggatctgtgcgtcagggagatggttgctcgcgccgccaagtacatctttgccggccacctccgaagcacagagaccttccatatctccaactccatcgcgcatttcctcaactgcttcatcggctcctctgcgaacggtggcgccgctgccatccaggcaccgcaacctctgcgacccaagctcaagaagaacggcaagtccaaggtgaaggagcccgttccttctgccgctcctttcactctcacgaggacagctctctggaacgagatcgtcgcgctggtcaaggagaaatttgcgtatgatttggcatttgattatgaggtttcacgtcccaccgttttccttcgctccttctgcttgaaggtcggcattcaagtcgccgcgcgagactacgatttcaccaaggtagacccgttcgtaccggccgatattttggatctgttccccgtcgtcaagcatattaacccgaggagtatggacggacaagatctgcaggaagctggcagatcattgactcttcaaggaagattgcatatggcacaggagctcctttccgaggctttggccatcgttcagcaggtccacggcccactgcaccctgattctgccacgtgtgagagtaatctggccatggtgctctacaactccaacgatctgcagatggcgatctctcatcaggctcgtgctgtcgtcatcaacgagagggtgcttggactcgaccaccaggacaccgctcatgcatatggtaacctcggtttgttctgccaccaggctaacaaaacgaaagaagctctcgccttcatgtcgcgcgcgatgtatttggcgaacctcgtcgccggcgaaactcacgccgagcacggcgctacatacaccaacatcggtctgatgctctccgaactcaacaagcccgatttggccatcggatacctccaagcggcgctcaaatcaaacgaagctattttcggcgacagcccggtgacggctggaacattgcatcacctcgccatggccaacagtaaatcattgaacttcaaggaggcaatgcaacagcagaagaggaattacgccatgctgagcgcaaccgtgggcgagaacgacaccaggacgaaggaatcccgtttgtggctgaaccgattcaccgcgtcggccgtcgcgaagcagaaggagctgaatcaaatcaacgcgatgctcccgaagaccgcgccgagacgacctgagcctgcgcctgcggccaccaccacccgtcttcttcccacgcaggcaactcccagcagcatgggcaacttgccgctctctgaggtccttcgatacatcaactccgacagtcgacgggaaaagcgaggaatcgtcaaactgtccacgtcggccggcaaaaaggacaagaagcgagaggaggccatcgaccaggaagagcccaccgtcgcctccacttcggcagcgccgaaagacaagagcggcaagaagaagaagaagaagtccaagaaggtcgcc

SEQ ID NO: 13289 - DNA, 1561 bp, Glycine max
  Clone ID: JC-GMLE01810067C04_FLI
cagaactgagagaagcaagtgaaacactcaatcacctaggctaaaatcgtctcgtcttcattccttttttttccggtttagagaattgaaaagatttcattgataattgagcaaacacaatgagtgctccacctcatcatgatgatgacgacgacaacgaagaagttttccttgatgagtctgacatcatccatgaagttgccatggataatgaagatcttcctgacgctgatgatgattctgaactcctcgaagaggatgaggatggtgattttgtgcacaaattcactgctcataccggggagttgtactcagttgcctgcagcccaacagatgcagacttggtggctactgcaggcggtgatgacagaggatttctctggaagattggccaaggggattgggcttttgagcttcaaggtcacgaagaatctgtatccagtttagcttttagctatgatggacagtgtttggcatcaggaagcttagatggaattattaaagtctgggatgtatctggaaatttggaaggtaaaaaatttgaaggacctggagggggcattgagtggcttaggtggcatccaagaggacacatactcttagctggttctgaggatttcagcatttggatgtggaatactgataatgctgccttacttaatacatttattggtcatggtgatagtgtaacctgtggtgattttactcccgatgggaaaataatatgtactggttctgatgatgcaaccttgagaatatggaatccaaaaactggagaaagcactcatgttgtgcggggccatccatatcataccgagggattaacatgcttgacaataaattcaacttcaactcttgctctttctggttctaaggatggatcggtccatattgtgaatatcaccacaggaagagttgttgataataatgcccttgcttctcattcagattccattgagtgtgttgggtttgcaccaagtggttcctgggctgcagttggaggcatggataaaaaacttatcatctgggatatagagcatttattaccccgaggcacttgtgaacatgaggatggagtgacatgtttggcatggcttggtgcgtcttatgtggcttctggttgtgtggatggtaaggtgagattgtgggacagccggtctggtgaatgcgtaaaaacattgaaggggcactctgatgccattcagtctctttctgtgtcttctaatcgcaattaccttgtctcggcctcggttgatggaacagcttgtgcttttgaggttgaaaattttcggtgaacaatccctgttgtattattgcataggatgaggttgtcattcatccaagcaaatccctctgtgtttatgtccttggaggaggggatgttacctacagaaatcatattacatgagcttttcctggacccagacaatcatattgaacaaaaggctggatatttttttcgaagattattttttatctttaacattattggttttgaattataatgttcatacttagagaattgtgtattcaatgaaggtgggaatttttcctaacagat

SEQ ID NO: 13290 - DNA, 2393 bp, Glycine max
  Clone ID: JC-GMLE01810067C07_FLI
tttctagttgatagattggtgtaaagggagacatgggaaggcttttcttgatcaatcttgaaggagacttctatagctgcaaacactgccgaacacattttgctcttgaggatgatgtcatttccagggtttttaatctttttctccctgttttttttccttccatgaaacattattttttatttcttggtactcgattttacaattttttaaaggatagttgggggttttgctagataactagttgatatatatgtaaggcttttatgtgatgttccttgctggttgatcatgatgagagggatgtggtgattcaccccaaagggagggtggcaatagaagaacataggatatgatcatctcaagtgggggataaaaaatattagataagatgtacgtgccaattaatatattttctaaacagtatctgtctcaaacattttcaatgccaacactcagaatggcaagcactgctagtaggaacattcttattttgatgttctacttataaccatcagtagtacttatacatttgtgtttcttatatatatgtccatgtcatgttacattttttctgtgttggtcgccccctcccttttttttgcggggggggggggcggggttggtggtgttgtgttgggtcaatacgttatactctgctgttgtgtgattctttggctgtggaaggattgtgtttgagtgacatcacgtgtctgtgcttttggtttttgattgtgttgggtcgatacattatactcttctgttgtgtgattctttggctgtggaaggatatgctatttggactaattataaatgtgtttggagagtgataaagtgtcagttgtttgagttcttttttgggtgaaaccgtattagttcatacttgtaatggcatgccgattgtgttattttcattcagatcaaatgctgagctacaagttttcttgcatagatgaatttcttgattcgataatgatatagttttattctttttgaggaaggttgtaatttgtgcagtcatgtaaatagatagtatagtgttattcttaattgccatactgggcatggcaaggcaataaataaatgaatcagaaaccacaatgtacagatttgaggatgaagtgtttggaaagacttttttcaaataaaccaaatatcttgaaagacttctaaatattgaccctttgatcaaatttactaatacgactttttcaattatatttgaatgtccctgctcccagtcctaggtgacttggtaaaatctttttgtcatttaacatccctatctgaacttgtttaaactttttgataaaatgtcttcacataaacttctagatcattaaaattattctcttccctgataatggtacctgattgatgccttctcttatatgtttgccctggcaaactcagtatgttaaatgaaagagaggttttgggaactattagaatagttggtgttccgcttccaccttccctttgttgccacttgcaaatgtgtttcttaatccttaactatacagttcatcatgcaaactaaatgtatgagtaaaatttgtaacttgcacacaatctaaccctgcttttctcttagtctttcatttgcaggcatgggatggctcatctttttgataaagttgtaaatgtcacttttggcgagaaagaagaacggatgatgctctccggattgaaaactgtcgttgacatattctgcgttgcatgtgggtccattcttggatggagatatgaggttgttcatgagcagaatcagaagtacaaagaaggaaagtttatccttgaaatgtttaaggtgttgggacctgctgacaacctcttcttggcagttcaagaagctcttgcagctggaagtgatgctgatgattgacttactcattccatgttgtagctgaaggtcattttttatgctgtgatgacgagagcgaacgctgggatttcctgtgtcttacgataagggaaaggaagatgtccagtctagtatgggctatcaaagggaacaaatgaggtcatgtttatcaccgaagcatatcaaactcttcacgactggggtccataccctgctgatcaggtcctcaaggaacttcaagacagtcttggatttatgatctatgacaacttttgtaacatttgattctaatggccagattgggttccaactgatatgtaaaccaccattgaaattactaattcttatcaggggggtatgtttcatagtgagcatggtctcatgagctttgaacatccatcaaataagatgaaagcaatgcctagaattgacagtgagggatttatatgcgttgctaacttttgcgaagtaaaaaactggatttgttgcgtcattcaatttcttctccaaagataagacaatcctttat

SEQ ID NO: 13291 - DNA, 974 bp, Glycine max
  Clone ID: JC-GMLE01810067F10_FLI
gtgctgcatttgcgaattgaacctcaaaatcagtctctaatatttttctcactgtcttgtctctccagagaactgtatagagagagatggcagctgcaacatctggtgctgtgttaaatgggttgggatcttccttcttgagtggaggaaacaggagccaaacccttctggccactgctattggaggcaaagttggtgctgctgctgttactgttagtcctagaagactcattgtggtagctgctgctgcaccaaagaagtcatggctccctggtgtcagaggtggtggcaacctcgtcgacccagaatggcttgatggatcgctaccaggtgactatggctttgacccactaggccttgggaaggacccagcattcctcaaatggtacagagaagctgagctgattcatgggagatgggcaatggctgcagttctaggaatctttgtgggccaggcatggagtggagttccatggtttgaagctggagctgacccaaatgcaattgctcctttctcctttggtactcttctgggaacccagttgattctcatggggtgggttgaaagcaagagatgggtggacttcttcaacccagactcacagtcagtggaatgggccactccatggtcaagaacatctgagaactttgccaatgccactggtgagcaaggctacccaggaggcaaattctttgaccctttgagcttggccggcactatcaaggatggagtttacattccggataccgagaagctcgaaagattgaaattggctgagataaagcatgccaggattgctatgttggccatgctgattttctactttgaggctggtcaagggaagaccccccttggtgctctcggcttgtaaactaaacatttcatgtagataattgaattgagaggctagacagttgcaaatcaacctttgtcccgtttgtgttacttcatgacaaattcaaattctatgctc

SEQ ID NO: 13292 - DNA, 1190 bp, Glycine max
  Clone ID: JC-GMLE01810067G10_FLI
tgatgttcctgttgggagataccgcagtttgatttatggacagaacttaagtgatgtggtgattacaggtgataatggaattattgatgggcagggttctgtttggtgggacctaatcagtactcattccttaaattatagccgaccacatattatagaacttgttggttctgataatatcataatctcaaatttgacatttttaaactctcctgcttggagcatccatcccgtatattgcaggtacaagtggttcatgtttgtgtcactgacttcttaaatggaactgttctgttttataagtatcttctttacacaatgtatgcagtaacattcaaatccagaagataacagttcaggcaccaaccaagttcccttacacaagcggtatagttccagattcttctgagcatgtttgcattgacaactgcaatattagcactggtcatgatgcaattgtgctgaagagtggttgggatgaatatggagttgcctatggcaaaccaacctcaaacgtccacatcaggggtgtttatctacaatcgtcatctggtgctggcctagcgtttggaagtgagatgtctggaggcatatctgatataattgcagagcagctccatattaccaactcaacttttggcattgaactgaagacaactaggggtagaggtggctacatgaaaaacattttcatttctgacgcaaaattggaaaatatttacttgggtatcagcatgacgggaagttctggctcccatccagatgacaagtatgatcctaatgcagttccggatgttggtaatgttacttttgagaatgtgattggtgcaaatattgctattgctgggaatttttcaggaatagttgattcgcctttcactcctatctgtctttcaaacgtgactttttctaccagttccgagtcatctccttcatggttttgttctaacgtaatgggaatctccaaggaggtgtttcctgagccatgtcctgatctgcagaacacgtattcaaacttttcctcttgcttttcttccctacatccgtcatctagttttgtctcaagcgcatgagatagccatctctaaggatctagtcattcctttgattcaacctgtacatgagacacaaaattcatattccatcaggaacttcattacaattttccaataaaaggaaattcttgatgt

SEQ ID NO: 13293 - DNA, 1529 bp, Glycine max
  Clone ID: JC-GMLE01810068D05_FLI
gtggctgcatctccgttcaccactgatcgcttacgagctcgaaaaggttaatgaaggagcacgtcattgcgcttctactactcttccactttcacagataaccctattgcataatcgcgctccttcctctctagggtttcttcaacttcatggcttcccctactcatttcgacgatgacttcgatttcggaggcggatttggcggaaggcattcaggtaataagaggtcgtctcccgattacgacgacgaggattatgacaacgatccttttgcaccgaagaaggctataacaaaagctgaagaagcttctggtgtaacaacaggaatgatcttgtcacttcgtgagagtctccagaactgtaaggatacacttgcaacatgccaaaatgaacttgaggctgcaaaatcagagattcagagttggcattctacacttaaaaatcagccatccatacttgccgggatcactccagagcccaagatgttgattaattatctgcaggccttgaaatcctctgaagagtctttaagagagcagcttgaaaaggcaaagaaaaaggaagctgcattcattgtaacatttgcaaaacgagaacaagagatagcagagttgaagtctgcggtgcgagatctgaaagtgcaactcaagccaccatcaatgcagcatggttaggtgctatttttgtgtttgcggcatctttgtttgtatcatctcacatgtttgttgaaagttaatcccgctgtgcaacttccccatcaagttggttgtatcttgtattctatttttgttcttttggttctccaaatgataatgccttgatatcctttggaatataattttcaggctaggaggttgttactagatccagctgttcatgaagagttcacgcgtttaaagaacttagttgaggaaaaggataaaaaagtaaaggagttgcaagataacattgctgctgtaagttttactccccaaagcaagatggggaagatgctgatggctaaatgtagaaccctgcaagaggaaaatgaagagattggaaatcaagcgtctgaggggaagatgcatgaattagggatgaaacttgcattgcagaagtcccaaaattcacaacttagaaatcaatttgaagggttgcagaagcacatggaaggactgacaaatgatgtggaaagatccaatgaaatggttcttatgttacaagaaaaattagaagagaaggatcggcagatacagagactaaaacatgagattaaacagaagaacttggaggatcaaagactaaaacatgagcttcaacagaaaaacttggaggatcaaagactaaaacatgaacttcaacagaagaacttggaggatggaaatgacaataatgccggggaggctgctaactaatttgatatatatatatatatatatatatatatatatatatatatatttactgctgtacattatattaattttttttgcgaaaactgtggatatttatgaggaatgattatgcttctgctttgaatggaattatgg

SEQ ID NO: 13294 - DNA, 1506 bp, Glycine max
  Clone ID: JC-GMLE01810070B07_FLI
caagaagattctagtagtggagaaactaaaaggccattaaaaaatttagacaatgaaattgctcagataacaaagttgaagtcaacaccccatcaacaattagtccaagttggaactggaaggccagaattgccagtttctcctgtgaagatgctggcaggtcgagagtctaattactcggacggggaaggttttcttcagccgatcgttgtcatcttttgagcagatatttgcctgtaaatggtccctggcttattgaccaaatgtctagtagggcttatgtctcccagttttcagctgatggctctctttttattgctgggttccagggaagtcacataagaatatacaacgtggacagaggttggaaagttcagaagaacattctagctaaaaatttgagatggacaatcactgatacatctctttcacctgatcaacgctatctagtttatgccagtatgtcacctattgtacacattgtaaatgccggatctgctgaaacggagtccctagcaaatgttacagagatacatgatggtttggatttttcatcaaatgatgatggaggatactcctttggaattttctgtgtgaaattctcaaaagatgggaaagaattagttgcaggaagtagtggtgattctatatatgtatacgatcttgaagcaaataagctctcacttcgaattttagctcacacggtctgggatcggcgttgcttgattgctaaaggcaagccagcaggggttttaatgggacaccttgagggcattacatttattgatactcgaggagatggacgctatttcatttcaaatggtaaagatcaaaccattaaactttgggacatacgcaaaatgtcatccaatgttaccagcaatcctgggtataggagttacgaatgggattacaggtggatggattatccaccccaagcaaaagacttgactcacccttgtgatcagtcagtggctacttatagaggccattcggtcttacgcactctcatccgctgctatttctccccagcgtttagcacgggccagaagtacatctatactggatcacacaacgcatgtgtttatatatatgatttggtaagtggagctcaagtcgcaacgctgaagcaccataaatcacctgtaagagattgtagctggcaccccttccacactacacttgttagctcttcttgggatggagatgttgtgaaatgggaatttgctgggagtggtgatacaccaggctcttcaactaagaagagggtatggacaagacatttttatgaacattacctatgatatgtcagtcaaaaaatcagttatgaaaatgatcttgggagatccataccctgttgttaatgaagttgtataggatgttttgacataataaggcatgacatgaactgccacaaaatcttggtacataaataaccatgtaaattgagattggaattgattcattagtacgctgtgcctataataaattattttatattgtacc

SEQ ID NO: 13295 - DNA, 1786 bp, Glycine max
  Clone ID: JC-GMLE01810071E08_FLI
gcgaatcacaatagcagattcctcttacgctccttcatccccttcttccatcgccgaatgaactcacctcttcttccttcagcaacgtcatgtcctcggttaacttcggggacagcttttgatgaaaaattcacgcagttaccgagcaatattgttcgcggggatcatcgtcaagttttgtcttttttcaatccttcaagaaatttcgcggaaaccaaacaatggggtgttggaattcggcacaaatgctttggttctatggctgggtcggttcaaaggaaccccagattctcaaagttgaatgatgatgatgttcgatacttagagggtatattgggttccaaaaatgttgttcaagatgaggacaagcttgtcacttcaaacactgattggatgcataaatacaaaggctctagtaagctcctgttacaacctaggaccgctgatcaggtttctcagattcttaaatattgtaactccagaaacttggctgttgttccccaaggtggaaatactggtcttgtaggaggaagtgtgcctgtctttgatgaagtgattgttagtcttagttctatgaataagatcatatctttcgacaagacttaggtgcaaaagggagttgtcagattggtggaaatgtttcaactaatgctggtggtttgcgtcttgttcgctatggatcgcttcatggaagtgtacttggtgttgaagctgttctggcaaatggtactgtacttgacatgcttaagacattgcgcaaagataatactggctatgatttgaaacatctatttataggaagtgaaggttccttgggaattgttactaaggtttcaatacttaccccaccaaagttatcttcagtgaatgtggcttttcttgcttgtaaagactatagcagctgccagaaattgctacaggaggcaaaagggaaacttggggagattttatctgcatttgaatttctggatgtccagtctatgaatttggttttaaatcacatggaaggtgcacgaaatccattgccgtcattgcataacttttatgttttgattgagacaacaggcagtgatgaatcttctgacaagcaaaagcttgaagcatttctacttggctccatggagaatgaattgatatccgatggtgttcttgcacaagacataaaccaagcatcatctttttggcttctacgtgagggtataccagaggcattgatgagagcaggagctgtttacaagtatgatttatcaatacctcttgaacacatgtacaatcttgttgaagaaatgcgctctagactaggtaacacagctaatgtaataggatatggtcaccttggagatggtaatttgcatttaaacatttctacttctcattacgatgacaagattttgtcacatattgaaccttatgtatatgaatggacatctaagcaccgaggtagcattagcgcggagcatggcctgggactaatgaaagccaacgaaattttctacagcaaatcacatgaaactgtacaagtgatggcttcaatcaagaatttgctggaccccaatcacatactcaacccatataaagttcttcctcagtctctcatttcataatctcttgtcgaaaacttgatgttgtattcatatctttgtcacttccttgaagtgagacaaacttctttacttgatccagtaagtacacaggaattctctccacatgacagtgccctcactcatctaaaaagtgtattgctacattatgaataataaatatagatatttgactaaagtgtaat

SEQ ID NO: 13296 - DNA, 907 bp, Glycine max
  Clone ID: JC-GMLE01810071H07_FLI
gctgctaccatcatcaccacatgcaagctctcactgcttttgagtcttctctcagtttcacttttgctgggtgtgaggtctgatacccttcagaatgtaggcgcaattccccccacatgcaagcgcatagagtgtcccagctatgatgtcattcacgtaggcaacggctacgaaatccgtcgctataattcacccgtttggatttcaaacagccccattcaggacatttctctcgttgaagccacaagaaccggcttcaggaggttatttgactatattcaaggtaagaataactacaagcagaagattgagatgacagcacctgtgatcagtgaagtattacccagtgatggacccttctgtgagtcctcatttgttgtgagcttctatgtgccaaaagagaaccaagcaaacccgcctcctgcgaagggccttcaagttcaaagatggaagaccgtgtttgtggcagttagacagttcggtggatttgtcaaagattctagtgttggggaggaagctgctgccttgaaggctagcattgctggaaccaagtgggctgatgcagttgagaaaagccagaagagagctggccatgcttctgtttacacggttgcgcagtacaatgccccttttgaatatgacaatagggtcaatgagatatggttcttgtttgatattgaaaatgaactgcaaaccgtgtgacaaaataagctttcaacatgaatgcaatatgcatagtgcagactgaggtgtaaggacatcttgaatggatgaataaagtgttttgcttttagctaaaacactgctttctgattgacttgcttttagattcatcatagctatatagttcagaggcaattttactcttgaaaacttttcattatgaattgatatgggttttgaagtg

SEQ ID NO: 13297 - DNA, 1077 bp, Glycine max
  Clone ID: JC-GMLE01810075B06_FLI
cttaattttctcacataatgaatatttgttacagatactaaactagaaaaggttttgagttggtctgatcgtcacaaaatcataggaggaattgctcgaggaattttatatttacatgaacattctagacttaaagttatacatcgtgatcttaaacctagcaatgtattgttggacgaaaatatgaatccaaaaatttcagattttggtcttgctagaattgttgaaatagatcaacaggaaggaagtacaaatagaattattggaacatagtaagttttcaatactcattcctatgattttcatcccttgtaagatatatttaagcttatttgtcactttttcggttttcccataattttgcagtggctatatgtctccagagtatgctatgtttggacaattttcagacaaatcagatgtttatagctttggagttatgattctcgagattattagtggaaaaaagaatataggctcctacgaaccacatcgtgttgctgatggtcttctaaattttgtgagtgcaataatcttggaattttttattacttatgcttaatgtacaataaaatcaatataaaagtaggaaaatataatgatttggccaaatttacaaattgttacaggtttggagacattggaaggatgaaacaccattgaacacattggaccccaaattaagagataattattctaacattgaagtcatcaaatgcattcgaattggtttattatgtgttcaagaaaatccggatgctagacctacaatgttgacaattgtctcatatctcagtagtcactcaatagagttgccatctccacaagagccaacatttttcttataccatagaatggatccaactgttgcacatgaatcaagttcgaggcaatctaccaataattccataccatcatctataaatgaaatgtctataagtaaattttatcctcgatagtttattttttaatatcattatttaatcatgttttaatatattataaaatattattggacacttaattatgatgtagaggtcaaattatgaagtatataaatgtgttttgagttttctc

SEQ ID NO: 13298 - DNA, 1420 bp, Glycine max
  Clone ID: JC-GMLE01810075C05_FLI
agcgaaagacgcaccgagaggactggacgggcgagaagtcggtcaaggccaggtttccgatcaaggaggagctcgtcaatgactacctcagcggcaagatcacaatggacgcgacgttcaatgagctccgaaagaagggcaagaagagcgacaaagagatagatagcatgatcaggcttgcaaaggaggtccaggcgagcattctcaaccagaagctggagccggttgtgcgcactttctacaatcggacggctttccagcttccaggcgatgctcgtgtccgaatttcattcgacaccaacctgacgctggttagggaggacaattgggataacggcaagcggtccggcagcaactggcggcggatggacattgggattgactggccgttcgagcagttgccgaaggaggatctcgagcttttcccgtacggtgtgctcgaggttaagctgcagacgcagatggggcaggagccgcccgagtgggtgcgtgagctcgtctcgtcgcacctcgtcgaggcggtgcccaagttttcgaaatttatccacggctgcgcgacgcttctgcccaaccgcgtcgacctcgtccccttctggctgccccagatggaaacggacatccgcaagcccgtctcgaccaagaaggctgcgctcattgaacggcctacagcgagcaactcgcacaccccaacgacgacgagcgacacagatccgcatgctgccggatacacagagccgctctcggaggatgaggacgaaggcgccgaggcggcggatgatgacgacagcgatgacgatcgacgcggcaagggtgacccgttcagtaaggtcaccaatgacgaagcgggcgtggcgggtctgccagcagaggtgcaggcacaggtggaagacgcgcgtgcattcagggagaagaaccgcctctcgcagcagcatctgagcccaaacagcagcactgcacgcaacggcaaggccgccattctacccctgaacgaggacagtgctgcatcaaacaacgcctccacgtccgaggctcgcacgagcggcgcacgcgcaacagccgaccttgcaaagctcacgccgcgcaacctcaagaaaatgctcgcggcaaagtacgaggccgaaggccagccaaatggggagtcggcctcgacgaccgacggtgctgtctctgctggagccaatggccagacaggccccggacagagcggaatcagctcatccggcgagcccaacagcacagagtacgtcaactcgttcacgtacaatggcaagcgcattgcagtccctatccgcgtcgagcccaaagtcaactttgccctcgagcgcaccttgctggcctgggtcgagttctcggttctcatctctgccatcggagtcggtctcctgaacttcaccagcaagcacgatcacgtcggctttgc

SEQ ID NO: 13299 - DNA, 1067 bp, Glycine max
  Clone ID: JC-GMLE01810075H04_FLI
ggagtttccgaacaagactggcactccgttaagcagttggccgaaacatacccttccgtcattccttgcttcggtctccatccttggtttgttaaggaacggagtcccaattggtttcaaacgttgaaggaatattttgattccacaccctctgctgcagttggagagattggtgtggacaaaggatcacacggaaagaagattgatttttctgagcagattgaagtattgaggcagcagcttgaacttgcaaaagagttaaacaaaccagcatctgttcattgtgttcgtgcttttggtgatcttcttgagctaatgaagtttttggggccttttcctgccggtgtcattcttcattcttacctaggttctgcagagatggttcatgaattttccaagcttggtgcttatttttccttctcaggatttcttatgtcactaaaagcaagtaaagcaaagaaaatgctgaagatggtccctcctgataggattttgttggagacagatgcacctgatgcactaccaatgtcaaacatagattctctttattttgttgaaggagatacttctctcaccgaagagcttcttgcccaaacaacaacttcatcaacttctggttcttccctcggtaattcatcccatgtcttggcagatgcttcgatgttgccaaaggaaacactcaatcatcccgcaaacattcataatgtacttgattatgttgcatctatgctagaaattacgaaagaagagcttgctgaattaagttaccagaatgcagtccggttattatcctatgaaggttcgaaagtacttcaaaagtagacaaaacaattgcttcttgaaagagctagcttggcaaagtttactttgggaagttccaaatagaatttcgtctaagtacgagcagatagattacaggaagagttcgctaacatgtatgatatatgtggtagttattgtatccctgccaaagtttattgcattccatatgctcaatcctcattggatatagtaatttttcttgtcttatctacttttaaacattcaatgcaacaaccttttgatgt

SEQ ID NO: 13300 - DNA, 1628 bp, Glycine max
  Clone ID: JC-GMLE01810075H06_FLI
caggactgcaaattgaaattacaagctataatgtcattccacaaatgtggggggaatgtgggagattccgttttgattcctctccctaaatgggtacttgaaattggagaatcggaccctgatatcttttacaccaaccgcaaaggtattaggaacaaggaatgtttatccctcggcgtggacaaccaacctttgtttcatggacgaactgccattgagttgtacaccgactacatgcaaagcttcagagataatatggaagattttcttgaatccgagctcatgatagacattgaagtaggacttggtccagcaggagaacttagatatccctcttatacaaaaaatctagggtgggaatttcctggtattggagaatttcagtgctacgacaaatatcttaaagctgatttcaaaggagctgcattaagggcagaccatcctgaatgggagctacctgataatgctggggaatcaaatgatgtacctgaatctacagaatttttcaaatcaggaggaacttatcaaacagagaaagggaaattttttctaacctggtattccaacaagttgctgacccatggtgatgaaatcctagatgaagccaacaatgtattcctaggttgcaaagtgaagttagcagctaaagttgctggaatccactggtggtataaagcagaaagccatgctgctgagcttacttctggctattacaacttacatcatagagatggatacagacctgtagcaaggatgctctcccggcacaatgctattttaaattttacatgtcttgagatgagaaatcatgagcaaccagctaaagcccaaagtggagcgcaagaacttgttcaacaagtgcttagttgtggttggatggagaaccttgaagttgcaggggaaaatgcacttgcaagatatgaccgtgaagcttataatcaaatccttttaaatgctagaccaaatggtgttaaccaatttggtcctccaacactaaaaatgtatggtgtcacataccttcgtttgtcagataagttaatgcagcaaacaaactttaatatattcaaagcctttgtgagaaagatgcatgctaatctggaatattgtccagacccagagaagtactatcatttcacagtacctatggagcggtcgaagcccaagattccactagaagttcttcttgaagcaaccaaaccagtggagccttatccatggtataaggaaacagacatgagccttgatgttactggttttcttgattatatagttgctattattgtacgtatattcaagctaaaattaaactaaaaacgacaatgaaaaagaaggaaggaattaaggaacaatagaaaagtaaaggatatatatatgaaaggagaagcaaaatgtgaaaaagggagttacaattggttctgctccaagcctgctacactgccatgccaatcacaaagtggagatgagaaaatagcttaaaatagtttgcttccttgcagcacccacattttctccttatatagaaactctttatatcactacacgattaattttacatgttctttattatctacaagcttttcaaagtgtaccaaatatcagtgaaaaactaataataattattttttatt

SEQ ID NO: 13301 - DNA, 1364 bp, Glycine max
  Clone ID: JC-GMLE01810078H04_FLI
aaaaatgccagtgaagatgaaatcaagaaggcctatagaaaggctgctatgaagaaccatccagataagggaggagatcctgaaaagttcaaggagttaggtcaagcatatgaagttttaagtgatcctgagaagaaagacctgtatgaccagtatggtgaagatgcccttaaagaaggaatggggggaggaggctcgtttcataatccatttgatatatttgaatcattttttggtggagcaagctttggtggtggtggtagttcccgaggtagaagacagaagcatggtgaagatgtggtgcattctttaaaggtttccttggaggacgtctataacggcacaacaaagaaactatctctttctagaaacgtattctgctcaaaatgtaaagggaaaggttcaaaaagtggaacagctggtaggtgttttggatgccaaggcactggtatgaaaattacaagaaggcagattggactaggcatgattcaacaaatgcaacatgtctgtcctgactgcagaggatctggtgaggtcattaacgagagagataaatgtcctcagtgcaaaggaaacaaaatttcccaggaaaagaaggtgctggaagtgcatgttgagaagggtatgcagcagggtcagaagattgtttttgaaggacaagctgatgaagctcctgacacaatcacaggagatattgtttttgtattgcaagtaaaggatcacccaaggttcagaagggaacaagatgacctctttattgatcaaaatctcagcttaactgaggcactctgtggctttcagtttgccgtcaaacatcttgatggtaggcaactattgatcaaatcaaatcctggggaagtcatcaagccaggtcaatataaagcattaaatgatgagggaatgccacaacacaataggccattcatgaagggtcgcctttacatccaatttaatgttgatttccccgactcagggtttctttcccctgaccaatgccagttattggaaaaggtgttgcctcagaagagcagcaagcacgtctcagatatggagctggatgattgtgaggagaccactttgcatgatgtcaactttaaggaggagatgagacgaaagcagcaacagcaacaccgcgaggcatacgacgaagatgatgatgagccatctggtcaccgagtgcaatgtgctcaacagtagtgcaatttatggtagtagaggttctataatttctgcttggtttatcttttgtttggataatgcagttataactgcgtgataaatttacctttaggttttggctggtaatgttatttagtttacagttcttggcagatttcaagtatatgaaaattgaatgctttggt

SEQ ID NO: 13302 - DNA, 2019 bp, Glycine max
  Clone ID: JC-GMLE01810080F07_FLI
gcgactcgatcgccgtgggagcgttcggcgctgccaaccacaacgttctcgtctcgtgctccgccggaaactcaggacctggtccttccaccgctgttaacatagcaccgtggattttaaccgtcggagcttccaccgtcgacagagagtttccggcagacgtaattctcggagacggaagagtcttcggtggcgtgtctttgtattacggtgaaagcttacctgattttaagcttccattagtttatgctaaggattgtggaagcaggtactgttacatagggtctctagaatcttccaaagtgcaaggaaaaattgttgtttgtgatagaggagggaatgccagagttgaaaaaggtagtgcagtaaaacttgctggtgggttgggaatgattatggccaacactgaagccaacggtgaagagcttcttgcagatgcgcatcttttagcagctactatggtgggtcaaaccgcaggagataagattaaggagtatataaagctgagtcagtacccaacagcaacgattgagtttagaggaactgtgattggtggttctccttctgctcctcaaattgcttccttttctagccgtggaccgaaccatcttacatcgcagattctgaaacctgatgttattgctcctggtgttaacattttagcagggtggactgggcgtgtgggtcccacggatttggacattgatcctaggagggtcgagtttaacataatttcggggacttctatgtcgtgccctcatgcgagtggcattgctgcattgcttaggaaggcttatccagagtggtcacctgcggcgattaagtctgcattgatgaccactgcttataatgtggataattctggtgggaacattaaggatcttggaagtgggaaggagtcaaatccgtttattcatggtgctggacatgttgatcctaatagggcacttaaccctggtttggtttatgatttggactctaatgactatttggcgttcttgtgttctgttgggtatgatgctaatcagattgcggttttcactagagagcctgctgttgaaagtgtttgtgaagggaaagtggggaggactgggaagttggctagtcccggtgacttgaattacccttctttcgcggtgaagttgggtggggaaggtgatttggttaagtatagacgggttgttacgaatgtgggaagcgaggttgatgttgtttacactgttaaggtgaatgctccacctggtgttggtgttggtgtttctcccagcacgcttgtgttcagtggcgaaaacaagacgcaggcgtttgaggtcacatttagtagagctaagttggatggttctgagagttttggatccattgaatggactgatggaagtcatgttgtgaggagtccaattgctgttacattgagtggtgcatattcatcatccatttgaatgaattgctgtggagacacgtctttctcaggctatggatcattggatttagtctctttgtaatttttatcatgtttgcttattgtacaaacgacagaataacgacttcgaagtagttgatgaagggcttctgataatttggggaaatcagatgtgatttttaagatagttggatcagattattgtggtttcattacacgtctcatttgattgatattaggttatgtcatgctaagcgagatgtatatggcagcactgcagctagatggatttgccgaaatatactagggacatttgaatcttgcaagccttttctggcttatctctaactgatgtcaattggggtcggatggagcggtgaaccctcatcatcaatttgaattgcactcgggtgttgctgtggaaacacatcattcattcacaggtgatggatttagtcaagtctctttgtaattttctgtaatcgtattgccttattgtaaaaactataaaatacgttttaggtgtgctctttcttgcaagtgtactcaggaacaactttgaagcagttgacgaaggggttctaataaattattgaact

SEQ ID NO: 13303 - DNA, 639 bp, Glycine max
  Clone ID: JC-GMLE01810082H09_FLI
ggttgacgagcccgctatccgagagggacttcccctccgaaaggccgactgggacaactacctcgagtgggccgttgcctctttcaggctttctaccgccgtcgccgagtccaagacccagatccactcccacttctgctactctgacttcaacgacatcttcgcccacatcaaggccctcgacaccgacgtcatctcgatcgaggcctccaaggccgacatgaagttgatccagaccttcaagaacgagggatacaactctggtatcggacccggtctttacgacattcactctccccgagttccctccgaggaggagatgaaggagaaggtcaagaccatgttggagatcctcgacgccaacaacttcttcatcaaccccgactgtggtctcaagacccgaggttggaccgagaccgagcaatcgctcaacaacctggtcggtaccgccaagtgggcccgtgccacttacgcttaaacacctcatattacatccggaatgcgttcaacggcattgccaacaccaaaacgacctcttatgacgaaccgcgacgattgccgctctgtcggcgggctctgagcccacttgtatcatgttttagttagaactttcgggtcgcatacaatcgttcaacaacg

SEQ ID NO: 13304 - DNA, 1910 bp, Glycine max
  Clone ID: JC-GMLE01810083A07_FLI
aaagaaggctgtactccagagaaacttatgatgtaaaggatatatgtactctgtatatttactatttttatattttttttttcgtattagaagaattccgagcagaattgtttgttctttttcattcttggccattcattagctgattgaggatagaagcttgagggtgccagagagagtttcttggatcagattccaagtcataagtcagtttcgcaaatgacccgtttgaagccagaattccaagcaacacgcaagccatgcaggatcgccaataattctgctgtcatattggtagtgataccgccacaactactaaaacccgtaagccatttaccattagagtcccgtagaatcccaccaatgccagacattctcggatttccctaggagctaccatcaacattaaccttaacaaaatctgctacaggtggtgtccaagcaaccagacggtgagaaggagtattgttgacctttgttgaaccttgaagaagtgctagagtataccaagcagaccacacctgatcttcaaacacttcaacgttccctgctttccaaatgaaccaacaaacacaagcaaaatgaacaccgtgtcacttgagctgagttacgaaccatgtatctccattcattgcaaagaaatcagtatcagcatacatatttatgtgactccaaatttctctcgcctcactgcaatctctaagcaaatgaataatactctcgtcttctagcccacacctgcaacaaaagggatcaaaagagatatgacgcttagtacggaaaaagttagtagggaggctgttttgcagaatcagccaagtgaagtgtttaatattttcaggtgtttgaagcttccagacccagttccagtcccctggaaaattactatgattggcaggctcatgaatccactactcataggcagatttggcagtgaaaattcctgattttaattgcccccatatgattatatcatagctattatcatccataaccaagctcgtcattttattcttgacttcgtcaggaataatagaataaaacttcccccaactccattggccgttaaccaaaacatctcggatgagaagctgcgtatcactaatatgcacgtagtccatgcaatcacaaattggaccatcacccagccaattatcgtagaacacagaaatttcgtcattgcctacacgatacttaaagggacgatctaggaaactagcagccttcacaatcgacgaccatgtgggtgaacaaccaatcttcaaaaaatgaaaaaaaaaaatgaccacatatggaacaatctcagaagaggcttcatcaaattcaaactcagttttcgtttcacaggccaaagagcgcattgaagacggtctaggcacaacaagaccatggagtgaaatgctccaaacttgtcatctcaaacttccatcttccttcttcggtgcaatccaaagaatcaacacaaatgccaaacattttcgagcaaactacgtgattatcatactgcttgtgcttttccttagcttactaggacaccccatttctttgatcatattagttgttatgatgattgcatggctgtacttatatttcctacgagatacccctttggtgattttgaggtttgagatggatgagcgattggtggttatctctttgttgttgatcaccattggtttgcttgtacttacaaatgtaacctacaatgtgatagttggtatgtgtgttgccttagtggttgtgttggtccatgctatcatgagggaaacggaggatctgtttaccatggatgaagatgtaggggttgtaaaaggttttagagatgttgtcaaagtccctcttagacaacctggttcctcttcttttactttgccttagaagcaaatttaattagaacaattaagatgttt

SEQ ID NO: 13305 - DNA, 1496 bp, Glycine max
  Clone ID: JC-GMLE01810083D09_FLI
atgggtctggacctggggtttcagctcccagttcatccttctttgggagcagcttgaagaaggttattggctcaagggtccccaacacaaagatttcctctggaagcttcaagattgttgctgtagaagagaagaaagagattgaagagacccagcagaccgacaaggacagatggaagggtcttgcctatgatatctcagacgaccaacaggacatcacaagaggaaagggtttggttgactcccttttccaagctccacaggatgctggaactcactatgctgtcatgagctcctacgagtaccttagcactggacttcgccagtacttggacaacaacatggatggattttacattgctccagcttttatggacaaacttgttgttcacattaccaagaacttcatgaccctgcccaacatcaaggttcctctcattcttggtatctggggaggcaagggacaaggaaaatctttccaatgtgagcttgtctttgccaagatgggaatcaaccccatcatgatgagtgctggagagttggaaagtggaaatgcaggagagccagcaaaactgatcaggcagagataccgtgaagccgcagacttgatcaagaagggaaagatgtgtgctctcttcatcaacgatcttgatgcaggagctggtcgtcttggtggaaccacccaatacactgtcaacaaccagatggtgaatgccaccctcatgaacattgctgataaccccaccaatgtgcagcttcctggtatgtataacaaggaagagaatccccgtgtgcccatcatcgtcaccggtaacgatttctccacactctatgcgcctctcatccgtgatgggcgtatggagaagttctactgggcaccaacaagggatgaccgcattggtgtctgcactggaatttttcgcaccgattcaattcctgaacaggacgttgtcaagattgttgacaccttccctggccaatccattgatttctttggtgcactgagggccagagtatatgatgacgaagtgaggaagtggatttctggtgttggtgttgacggcattgggaagaagcttgtgaactcaaaagatggacctccaacctttgagcagcccaagatgactctggagaagctcttgacgtatggtaacatgcttgtccaagaacaagagaatgtcaagagagtccaattggctgacaagtacttgaacgaggctgcacttggaaatgctaacgaggatgctattaacaggggaactttcttccaatcttgaattggaggcaaagcaaacttggcaagtaaatatttctgttcctgaaggttgtgctgatccaagtgctagaagttgtgatgggacttgcgtgtaacattcttagaattctcaatgtcttaggtgcaaagagaagatgccaagtttgagatgattttactatatttttcatattggactgtcttcctctataattttgagttaaagtgtccacttaaattg

SEQ ID NO: 13306 - DNA, 1438 bp, Glycine max
  Clone ID: JC-GMLE01810083D10_FLI
atccgattggaaggcccatagcaagatttgtgggactagagagtacaaatgtgactgtggcacacttttctccaggaaggacagcttcataacgcatagagctttttgtgacgctttggctgaagaaagtgcgagggtaacaacagttccagcagctttaagcaacttgagaaacgatcatcatcatcatttgaccaatgctcaagcttcgaggatccctcagattaatttttcagggttccactcatcagatcaattattcggtggtggatcatcagaagcattattggcgaatcatcatcatcatcaacaacaaaagctaaggctaccactatggctggatcatcaccaagtcaataataatcctcaagtacttcaccaccacactcttaacaacttctcaacaaaaccaaatggtttcactactaattcaggttcaggaccaaactctgtgactgatttagttcaaacaatggacatgtttgggtcacagacagagtttgtgaattaccgttacccagaagcatcatttggaggtggcaatgccaacgtgtctgtgctaccgccacatgaactgaagcaagaacaagaagaaaacaaagaacacttgtcgcatagcggagcctcttataataacttgtacttgagtagtagtgatattcagaacccaccacctcatcatcatcactacatgtcagccaccacactgttgcacaaagcggttcaaatgggatcttcaaggttgatgaacgacaacgtatttggctccatcttgggcaccaccaccaccaacagcaacaacaacaacgttgttgttgaggttcagaagctgaacgagttggtgagtgtggaagctgctgggtgcaccaacaacaaccttggaggtgggtatttattaaacgactcaaacaatagtaactcgtttgtggttgtgaatggcaccaacaagggtggtggtttggagcacatggtgatgccggtggatgaagagacacaacaagcatcaattatgggaaagcaattacactcatcactaagctcaaataacaagaatcaacaacttggtttaacaagagatttcttgggtgttggagatcataataatagtattgactctataagaagaccttttcttcaacaagaccttgttgaatttaatgcaatggggtcagcctcagcctcagcatcagtcatgaacctgcagagccagtacggtggacactactgctagtgttagctatagtttcagtttcaacttaatttcaaactttccaatttattgaaactgtatcttagagctaaagaaactagtgaagttgtgtcatagttatatatatatagctagccagctagtagtagccgctactctcttataaaccgaacagtatattataccgagttagaccgattgagaaattaattaagcaagttattgagt

SEQ ID NO: 13307 - DNA, 658 bp, Glycine max
  Clone ID: jC-gmle01810085a01_FLI
gggcgtcagaaaaagaccgtggggccggttcgctgccgaaatcagagaccctttgaagaaagccagggtttggctcggaacctttgacaccgccgaggaggcggcgcgtgcctacgacacggcggcgagaaccctccggggaccaaaggcgaagaccaatttccctctttctccgccgttctaccatcccgatccattttccgatcaccggcacttcgccaacaccggcgaagatttccacgatcaccggcgaccaacatccagtggcatgagcagcaccgtagagtccttcagcggcccccgtgctgccgtgccggcgacagcgccggtggccaccggccggagatatccccggacgccacccgttatccccgaggactgccgcagcgactgcgattcgtcgtcctccgtcgttgacgacggcgaaggcgacaacgtggcgtcgtcgttcccgcgagaaccgttgccgtttgatctaaacgcgttgccgttagacgatgctgacgtggcaaccgatgatctgttctgcaccgttctttgcctctgatgagaaaaaatgaaaaaacggaacgaaatgatgtatttggttcgttgacggaattattattatttttttctttcttactctttatcatctacttgaatttttttttatctt

SEQ ID NO: 13308 - DNA, 860 bp, Glycine max
  Clone ID: JC-GMLE01810085A10_FLI
gtgggccgtatcctaagggagtacggggaagaaagtaattggcgaactctgcaaaagaaaattgtcaatgcccgattacatggtggattgcattcgactagtgacttgctcgatcttattcggcgcgtggctcctccaatgagaggtggacggcaaggttggataaagacggcaacccgggtgtttcaagctctgagaatcgctgttaatgatgaactgaagacacttgaggattctctctattattgttttgattgccttgcacctgggggtaggcttgctgtcatatcttttcatagtctagaggacagaattgtgaaacagacatttcttaacataatcaaagggagcaaagatgtggaagaaagggagagcctcaacagtgatttgaggaagactagtgatgaaatcaaagaaaaagaagcatggataaagcaagtaatatatggatcaaatggaacaattctcactaaaagaccaatcacgccatcaggagaagaagaaaaattaaaccggcgaagtagaagtgcaaagctcagggttattcagaagcactgaagatgataaaacatggcaaattgtagtttagtgtagagtttttagaaatacctggattcataatcttgtcggtaacttggttaatctttattaaaaaaataaaaagttgctatgttcacaagtcctctttaaaagagaaaggtcaaaagggacttgtgcatacggttgcaaattacctgatgtctattttaactagaaatttctagcaaattactgtctaaagatttggattttagtaattcatctgcttaggctttaaacattcagcagtttatatgtagttgaagtcctaatttaattgt

SEQ ID NO: 13309 - DNA, 782 bp, Glycine max
  Clone ID: JC-GMLE01810085D12_FLI
caccagcaacaccacactccaagtctcggccacgatcccgaatttagctctccccacctagtcatccttcttcctcaacaccgcaaatatggatcaagcaaagttggcgcgcatgcaagcgtcagtgcgcattggcggcaagggtactccccgcaggaaggtcaagaaggtccacagggccgctggtaccgacgacaagaagctccagaccgcgttgaagaagctcaacgtccagcccatccaggccattgaggaggtcaacatgttcaagagcgacggaaacgtcatccacttctcggcacctaaggtccacgcctcagtacctgccaacaccttcgccatctacggacacggtgaggacaaggagctaacagagctcgtccccggcatcctcaaccagctcggcccagattcgctcgcatcgctacgcaaacttgccgagtcctaccagagcatgcagaaggagaagggtgaggacggcgagaagaaggacgacgacgacgaggacgatgatgacatccccgaacttgtcgctggtgagaacttcgagtccaaggctgaggtcgagtaagaagttacacaaaaagtagcttgacaacgactggaaagagccagggaggagtcatgtgcaatgacagcctaccgcatgtatattgatatggaggacttcatggatgcaacgaccgtgacggtcagcagtcgcggtgggtcttgcattcagataccggactggcgttatgtctcggaacagatatgaatgaaaatcttctagcacgctcccc

SEQ ID NO: 13310 - DNA, 2616 bp, Glycine max
  Clone ID: jC-gmle01810085e03_FLI
cacataccaaaccacgttggttctctcattttcaactttcaattcctgttccattttttacacaaaggaaaggaaaagagaagagcgaagagaagacgtagtggattttggtccgtgtatgcaacgaaggagccacgctcgaacacgatgcccctaaccaatcatcttaacataaaaacattttaacattaaaactcttttccatttctcactctcttctcttctcttacactctctcccaatccaatcaatggcttcttctctttccccttctccctcttccctcgaccaaacccttcgcgacgtcgacgactacgttctggaaaatgggtcagaaggtttgtcaagggacacacttcattatgtgtacgagcttgtgaagaatgggaatgtggcatttcgagagaacagaatggaagaggcaatcaacttttactcaagagccaataacatcaaatcaggtgatccaatcatcctcagcaatcgaagtgcagcttatattaggattagccaatatttcatgcacagaacaccatcatcttcagaacgtaggccattgagtgggcttgaacccacaacacttgctgaactgggtttgaaggatgctgagaagcttgttgaactccaaagtaattcagcaaaatcatatcttttaaaggccaatgcttttctactgttcaggagaattctcccaccctgggtctgtacctacttgatggggaactcttgagtgaaggacaggtgtggcgatggacatgactaatattatggtgattcagaagaataataagggacagtgactaattgttttagttataacttatggcctgtgattctagggaatactttgaaatagaaggcacctttaccagtgtgtggttaattctttcagaaacctaccagacaaaaagtaattaaaattatttgagtttttcttctaataaactaaataaacagtgcaattgtgattctaaacaagcctcattacattttatatatttaattaatgtgcttttgttatgttctgggtcttctatggttaatatggctattttatgcagatttccctaccttcttgacaactttaatttagagtcattattattgtgcttcattgagtttgaactttgaaggtgtggaagttgtacttgcatagtatttaatgcttgtgtaaagcccgatgtcataagtaacttctattgtgtatgtgctataggattttgagtttctataatataggaaattatgtcaacttgtatgtttttgcccctggtcaattgcacatccttttctcgagtctttacatatgcctctctgccctacttctttgttatgatggtgctcatgttgaatgtaacttgatatgatattgtattaaattcacagttagagaaatatgaaaaagcccgggatgttattctttcaggccttcaagttgatccttttaggtagtaattctcttcgggcttctcttcaaaatttggaaagtgtttcatctagttcaagagggatgagtacacatggacatccagaacgtaatgatgattttgattgcactctctgcctgaagttactgtatgaacctgtcacaaccccgtgtggacattctttttgctgttcgtgtctatttcagtcaatggatcgtggaaacaaatgcccattgtgcaggactgttctgtttattagtcctagaacatgttccatcagtgtgacattgaagaacatcatacaaaagaatttcccagaggaatatgctgaaaggaagcaagagcacgacagtttaatcaaagctggtgtagatttactccctctttttgtcatggatgttgtcataccatgtcaaaggtttccactcaatatatttgaacctcggtatagactcatggtaagaagaataatggaaggcaatcatcggatgggaatggctatacttgattcaacaggttccttagctgagtttgcctgtgaagtggaaatcacagagtgtgaaccacttccagatggtcgtttttatatagagattgaaagtcgcaggagatttcgtatcatccattcctgggatcaagatgggtatcgtgttgcagaggttgaatggatacaagatattatgccaccagaagggacaagtgaaagagatactttacagcaacagacatataatgcagtcgaagatgctagatcatggatagcaagagctaaagaagcagcaagacatgatcaaagaaaacttgagagactcgccagtgttgaagtaatgatgccctcaccaaaagaccctgagcgctttagtttttgggctttgattgcagctggctactctttccaatcggaggcctgcggaaagattggatctcctacgcataagagacactgccgagaggattagacggggcctgatatttctccgccaggaggaacaagggtgcagaattcagtaagacaagctgaggagggctgccactattattgcaattgaatatttgtttattgcaaattcatttagaagtctttcaacattcttcggcctcataaacaaccgttgatgaggtcatttttgctgtaacatagggttgaacagtttttctaatatatataatcatctacaacacatttttt

SEQ ID NO: 13311 - DNA, 2242 bp, Glycine max
  Clone ID: jC-gmle01810085f01_FLI
caaaaaccaaaaccaaaaccaaaccaaaactttatccatccatcccaaaaagtttgctttggttaatgcccctaacaaatttccatttttattttccctgtttgtgactagagagttgggttcccatgccggttgatttggacaacgcttccacagcttcaggggaagccgccagcgtctcttcctccggccaccaaacaaaacccgccgtcccaaagaaaaaacgaaacctcccgggcatgccagatcccgaggcagaggtgattgctctatcgccgacggcgctcttggcaacaaaccgtttcgtgtgcgagatatgcaacaagggattccagagggaccagaatctgcagcttcaccggcggggccacaacctgccgtggaagctgcggcagaggtcaagcaaggaggtgcgaaagagagtgtacgtgtgccccgagcccacgtgcgtgcaccacgaccctgccagagctttaggggacttgacggggatcaagaagcacttctgcaggaagcacggcgagaagaagtggaaatgcgacaagtgctccaagaagtacgctgttcagtccgattggaaggcgcactccaaagtctgcggcaccagagagtataagtgcgactgtggaaccgttttctccaggagggatagcttcatcactcatagggcgttttgcgatgtgttggcggaggagaacgtgagatctcacgctgttgtgaaagataattcggagaatgattccaaggttttaaccttaaccggtgattcgccaccgctacagcctgtctctgcaacggtggctactactactacgcagacaaatagtgctatgtcctgtggtttgcagacgcagaacctagagttgccagaaaccaatcccccgcaagtcattgaggaggagccacaaggtgctactgctgtaagtgggagctgtggcagcaacagcacctgctcaacaagcaatggcggtgctactagtaatagcaatagtagtagtagtgtgtttgcgggtttatttgcttcttcaacagcatctgggagcctacatctcaaacaccagcattcagtgacttaattagagccatggggcctccggaacaccctgcagatcttatctcagctccttcatcatccgaggccatatctctttgcctctccaccaccagtgcctcaccaatcttcgcaacaggaggccaacagtatgtgtcgtcgccaccgcagcctgccatgtcagccactgcattgctgcagaaggcagctcaaatgggtgctgctgtcacaaacgcctcccttcttcgtgggtttggtattgtgtcatcatcatctttggcttcgacctcatcggggcagcaaaatggcctgcaatggggccagcagcagttagaatccgagagcggctccgttcctgcagcagggctaggacttggtcttccatgtgaagatggtggttctggactaaaggaattgatgatgggaacaccctcaatgtttggtcctaaacacaccactcttgattttctaggattggggatggctgctggtggcactgctggtggaggcttatctgcacttatcacatctattggtggtggtttggatgtaactgcagcctttggcaatggagatttttctggcaaagatattggaggtagctcttgatatagcagtaataatatattttggtagtaagaaagaaagaacaagagctgcacttatcagggcaaaaagttatataagacagtgtagaattaaaaatgttgtctttgtgtagaatctttagttgcaatgcaccaacatgcacaaatgagggcctttttaggattgtgttgctccctttaatgcgagggagagaaactgtatttagtgttagaaaacggaaagttggcacaagttacaatatgcttgctctggatgaagggtagttgttcaattaagggtgttttgccaaagggtttgaactttgatatggttgtcgtaggttatggcgacagtggcacgtttgaagatatactcaacagtgttgattgaatttgaattaagccgttggatcatggatgctttggttcgtagctgttggcataaatcaggaaactttgatgatgttgtagttttcttcaactgtcgatttattgtaacgaggtggatttccacgtacgccccattgttttgtagttaatggttgattgaattcttctagtgagtaagtagtgtttttatgtaaatgtcatgaagaattgttgt

SEQ ID NO: 13312 - DNA, 934 bp, Glycine max
  Clone ID: JC-GMLE01810086D01_FLI
cgcaaccagcaatccaagagtgccgtgtatggtcttgaccaattctcagatttgagtgatgaggagttcagaaccaccatcctcatgaagaacaccttgcccattgacaacagcgcccccgtcccctttgttggctcaccctctgccccagctacctttgactggagatcctctggtgcggtcacagctgtaaaagatcaagagcaatgcggaagttgctgggccttctccgcaactgaagccatcgagtctgcttggatccttgccaagaaggcaactaacaactcagttgacctcgctcctcaacagatcgtcgattgtgacagacaagacggtggatgcaatggtggatggcccagcagcgccatggagtacgttcacagcgctggtggtcaagaggatgagagccactacccatacaccgctaagaacggaaactgcgcgttcaactccgcttacgtcaaagcgaagattaatgcttacaaagtggctgccacccctaaggacgagaactctcttcaagctggcttgctcgctttgggacctctctccatctgtgttgatgcttccagctggaatggataccaaggtggagttttgacctctagagaatgctgcacttcctgccaattagaccattgtgttcaacttgttggatacaactcggccgcgtctactccttactggattgtgagaaactcatggggaaatggttggggatatggtggatacatctaccttgctatgggaggtgatacctgcgctcttactgccaaagcaacttggcccacattataaagataatttagtatttttataattatattaaagttataatatttttataattaaattttaaatgtatcttttacacgtgatgttacgtaacgatttatttgtgtaatttaaaatataatagaattcgattacggct

SEQ ID NO: 13313 - DNA, 1261 bp, Glycine max
  Clone ID: JC-GMLE01810086D06_FLI
ataactcgtagtcacaatggcaaacgacgctctccaggtcaacttggacaacaactcccagttgggtatcacccaacatggctctgactggctctgggcagtcttcgccgtcatgctcttcaccgacttgattgtcattggatggcacttcaccgtccctcgaggacaacgattgttccaccagctcggtgcgattatcttgaccactgccgctatcgcctacttctcgatggcctccggtctcggttacactcccattgccactgagttcgcttacttgggctaccccgttggcactctccgacagatctgggtgagtgcgcttgaaatcgacagtgaacatctttgctgatggcggtagtacgtccgatacatcgactgggtgatcactacccctgctcttttgctagagttgtgccttgcctccggtcttcctttgtccgacattgtcactctgatcttcttcgacttggtcatgattatcactggtctcgttggcggtctggtcaagtcatcttacaagtggggatactacactttcggttgtgtcgccctgttctacatttggtgggtccttgccggccctgcccgggtctctgctggtgctctcggcaaggacttccaaaagtccttcaccatgtcggccctcatcctctcgttcctctggctcttgtaccccatcgcttggggtctcgccgacgatggatcggtcatctaccccgattctgaaatgatcttctacggtgtattggatatcctcgccaagcccgtcttcctcatcatccacctcatctcccttaggaactgtgaccttaccagattgcaactccagtccggcaagtacaccacttcggccgccgctatcaccacccacgacatggagaagaaccctcgtactacccaaaacaccggaatgatcgccaacgaccccgtcgcccctgccggccacgacaacatggctgctcacggaaagaagggcttcttccagaggaaaggcaagtacgacgctcaacccgttaatgccgaccatcccgccgatgccaacaccaccatgcccaggacttcagaggcgaccatggcttcgcgataagccctgccggagttcaatctgatcgttgcgtaacatcatccaacgatcatcctatcacacgcgatactttttcacaccaagacaacaacggatgatattcctcttctataattgatctacctccagcgtagtatgtagccatattacatagttcatgcaaatcattataat

SEQ ID NO: 13314 - DNA, 1186 bp, Glycine max
  Clone ID: JC-GMLE01810086G12_FLI
gggcaatgctcgcactctcgaagatgctccaatgcgtgagaggcatgagcagtggatggctatacatggaaaagtctacacgcactcttatgagaaagagcagaaataccagacattcaaagaaaacgtgcaacgtatagaagcctttaaccatgcgggaaacaaaccttacaagctaggcatcaaccattttgctgatctcacaaacgaggaattcaaagccataaatagattcaagggtcatgtgtgctccaaaataacacggacacccacatttaggtatgaaaatatgacagcagtgccagctacattggattggagacaggaaggagctgtcacacccatcaaggaccaaggccaatgtggatgttgctgggcattttctgctgtggcagcaacagaaggaatcaccaagctgagtactggcaaattgatttctttatcagaacaagagcttgttgattgtgacacaaagggtgtggaccaaggttgtgaagggggtcttatggacgatgccttcaaattcatcttgcaaaacaaaggactcgccgcagaagccatttacccttatgagggtgttgatggaacatgcaatgcaaaagcagaaggtaaccatgcaactagcattaaggggtacgaggatgtccctgctaacagtgagagtgcactgctcaaagccgttgctaaccaaccagtttctgtggctattgaagctagcggttttgagtttcaattttattcaggtggtgtgttcactggatcatgtggcactaacttggatcatggtgtcactgctgtggggtatggagtaagtgatgatggaactaagtattggttggttaagaattcatggggagtaaagtggggtgataaaggatacattaggatgcaaagagatgttgctgctaaagaaggcttgtgtggcatagcaatgttggcttcttaccccaatgcataattgctatactttgttactactatatatttcatgtgcaattaagtacaaaccatcagaagtgtgttattgctgatatttataggtttgaagaaattacaagtggtagattcaaaccttgtaaattacaagaagtgatagattcaaaaccttgtatcacaattgttgaaaaatatcatgtataattatacttgtttattatatctatctatatcaaggaaattaaatatt

SEQ ID NO: 13315 - DNA, 1748 bp, Glycine max
  Clone ID: JC-GMLE01810087B05_FLI
gcgccggtgctgagctcttcgccgccggtggtcggcgcggcattcgcatcaatggctgggtgatcgagactcggaggcactccatactcaactcttccacactccaagagtcaaactctcttcctactcactgctaagctttctcaggaactagttctcaaacacaaacccaattattttttttatcagcttcaccgttcatttcactgtaaactgcatcaatgttcttcaactttaaggaatctgcagtcaaaacaattaaactctcctttaaatatcattttttgcacatccagagatacagttatgtgaatgtgtatatgaagtggaaaaaggattcatactatgactcaattgagcacatccactactccgttcagctcaagcctatcattgccctcaaaaactgcattgtccgggatcccaatggctgcattcctatctctgcagtgtcaaagaggggattagagttagatgttcccatgaaggttgcaaggtttatgaggcagtatccatccatctttgaggagtttacgggtcctgaatacaatcttccttggttcaggttgacaccggaagttgccgagattgacagggatgagaagagagtatatgaagaatgtagggaggacttaaggtccaggttgaggaagatgatattgatgaccagagagcatgttctacctttaaagataattcaagggatgcagtggtatttggggttgcctagtgatttgctgcagcacccggaacaaattcttgatgaatctttcaggtttgtagagatggaagatggattgaaggggttggctcttgaaagtggagaaaagatttattctgtaatggagagaaatgcaatgaaaagtggtttttactctgggggtccaatggaagccattgaatttccattttttccatcaaagggtttaaggttgaggaggaagattgagaactggctaaatgaatttcagaagcttccatatatttcaccttacgatgatttttcaaacttggatccaaactctgacatagcagataaaagacttgtgggagttcttcacgaactgctttccctttttgtcgagcattcagccgagaggaagaagttgttttgcctcaagaagtattttgggttgccacagaaagttcatagagcgttcgagcggcatccccatatgttttatctatctttcaggaacaaaacttgtacagtcattctaaaggaagcttacagcaataaatctgctattgagaagcatcctctgttgagggtcaggaagaaatacatcaagttgatgaagaaatcagaagtgattttaaggaacaggagggtgaataatcgattttctaatagtaatgcaaaattggatatcgattcaaatgatatagatgaaaagggacatgagatggcaagttgctctttggaacaggttgcgtgaaaatttataccagaccacttaaggtaaacatgaaatttttaccaacagagaaagaaacaagtagctgataataagcataagttgaaaatggtagcaccagcacatctagtgatatcgtagccttgaggtataacatcatatttattttttggcgagtcataacatgttttcaagccttttctaacttgattacttttgtcctgctaccatgttgtagatatggtctctttattgcccttgaaattgtgtaattccgatatgcctcatagttgaagttgattgattttgttgtgtgacattctttatttt

SEQ ID NO: 13316 - DNA, 2531 bp, Glycine max
  Clone ID: JC-GMLE01810087C02_FLI
gtcgcccctcgcccgaatccacacgtcacgatggtcgctgttgatagtgcaaccctgggttttccccgcatgggtcccaatcgcgagcttaaatttgctcttgaaagattttggcgcaaccagattagcgaagatgagcttttccaggtggcacatgccgtggaagaagccaattggcgcaaacaaatcgacgcgggagtgagtcgtgtgggagtgggtctcttttcgctctacgaccacgtgctggactggacttattacctgggcctcgcccctgagcggtttgccaaggtacccatgggtctgtcgcaatatttcgcgatggctcgtggcgtcgatggcatccccgcccttgacatgaccaagtggtttgactcgaactaccactatgaagtacccgagcttagtgccaagtccacgcctaaggctaatttcagctcatatttgagcaacatgaagcgtgctctggctatagttggcaccaataaggtagttcctattatactcggccctcttacatacttggctctgagcaagtatgacggtgctactcttgatgatcttctagtcaagatcctacctatctatactgtactgctgaatgagcttgctgctcttggtgtgacggaggttcaagtccacgagccttcacttgttggtactagtgctgatcaacttgcaaagcatctggcaacggtgtacggctccaaggatcaaaaaggtgccattcagcacgaaaaaattgctctcaacctgaccacgtactttgaagagatcaatcatgatgtttaccaatggtttgccacgtcgcccgtgtccgccatctcacttgattttacacgcggcgacaatctatcagttctacagaaatttggcttcccagccgggaaacgtcttggtgctggccttgtcgatggtcgcagtgtgtggaagtttaaccctgacacgatcctctcgcaggtcactgagatcaagaaggtgcttgctgtctcggacaatacttcgcttactatccagacaagctcttcgctacagcacgtgccgtatacaacggatcctgaaaagactttgaacgctggagagactgacggtttgttggatgtccttagttttgcgtacgaaaagcttgcggagcttgaggttgtcaagaagattgctgaatttggcgaggaggctgcgaaggctgagatcgacgctgccaaaaaagcttggtcggtgtattacgagaagaatcctgccaagaccgctgtgcagtcgcgtctcgctgctgtgacagaggctgacttcaagcgcccttccccgtttgctgagcgtcgacccttgcagctcaagggcctgcccgtactgcctacgaccaccatcgggtcttttccgcaaacccctcagatccgtgctttgcgccgcaagctcaaggccggtgatatcacgctggatcactaccgtggcaagatcgatgaacagattgcctacaacattggtatccaggaggcccttggtctcgacatcttggtccacggtgagcctgagcgtaccgacatggtcgagtactttgctgagaagctgaacggttttgcttttacgcaatctggctgggtgcagagctacggttcacgttgcgttcgtcctccgatcatcttcgctgacctggagcgccctgttgacatgacagtgcgtgagttcgtcgttgcgcagtcgttcactaccaagccagtgaagggtatgctcacgggtcctgtgactatcttgaactggtcgtttccccgcaaagacatcagccgcaaggagcaggcttttcagcttgctctgtgcctgcgcgatgaagttgctgaccttgaagctgccaaatgcactgtcatccaggtggacgaacctgctcttcgtgagggcatgccgctgaaatcttccaaaaaggacgaatacctgaactgggctgtggatgcattccgtctgtcgactggtgttgccaaaaacgagacctcaattcacacgcacatgtgctattgcgagttcgcggactgtatgcacgccatcgacgctatcgatgccgacgtgaactcgatcgagaacgctcgttcggatgacgagactattcgtgagttcaagtctatcggctacaagcgcgaccttggccccggcacgtacgatattcactcgcctgtggtgccgcccaaggaggagattgtcaagaagctcaagagtttcttaaacctcctgcctgccgagcaagtcgtggtcaacccggactgcggtcttaagacgcgcaagtggcctgagaccattgctgctctccgcaacatggtggatgctaccctcgaagtccgtgctacgttgtaagcttgatggtcgccattttccgtgagaagacgggaagctcactagattttatcgacgaattttgcgccaagttgctacagtagcttcgctcacttgacatgtcgtagaggcatggccaaggtgccgagaccttagtagcaggatgtctcgccaccttggataatctgaataataaaggtgtggttttccgtgttgtt

SEQ ID NO: 13317 - DNA, 1640 bp, Glycine max
  Clone ID: JC-GMLE01810087C12_FLI
ctcgactatactacggagatggaaacgttgaggccatgttcgccacgcttgatcctttacacgatatgctggagcgcggtccggaaactctgcgagaaatagctttccaacagtcctttggcagagatctgcaagacgcccgcgagtcatgtcgacgcttccagcagtatggcgaactgaacgacctgaatcaagcttgggatctgtactatcagatattcaagcggatagcgcggatattaccgtccttctccatcctcgagctgcagcaagtttcgccgaagctgcttgctgcaagagacctagaactggctgtcccaggcacctatcactctggcaagcccatcatccgaatcagcaagtttgcagagtctctagacgtgctcacatcgaaacaacggccgcggaagctcaaagtagcaggcagcgacggcaaagaccatgccttcttgctcaaaggacacgaagatctacgacaagatgaaagagtcatgcagttgtttggtcttgttaataccttgctgagcaaggatcctgaaacgttcaagcgccatcttatgactataccgtatcctatcattcccttggcgccaaattctggtctgctcggctgggtagacaatacagatacgctccacgtgctggttaagaattatcgagattctcgcaaaatcctgctcaacatagagcacaggatcatgctgcaaatggcgccagattacgatcatatgatgctcatacagaagatggaagtcttcgaatatgcgctagataatacgactgggcaagatttgtaccgtgtgctatggctaaagagtaggaattcggaagcatggcttgatcgtcgaacgcagtatacgagaactttggcagtaatgagtatggtcgggcacatcttaggtctgggagatcgtcatccgtccaatttgctgctcgagcgtatcagtggctctgtagtgcacgtcgatttcggtgattgcttcgaagttgcgatggtccgcgacaaatatcccgaacgagtgcccttccgtctaacaagaatgctgattcaagcgatggaagtcagcggaatagagggcacgttccgtataacatgcgagaatagcatgagggtattgcgagatcacaaggagtctattatggctgtactggaggctttcgtacatgatcctcttatcaattggcgtcttatcaatactggtagaagaggtggagcgggggccaatgagcgtggtacatcgaagcgagtgggcgtggatgaaagtaatcctctggatgacgagacgaatgaggccctcaatcaacgggctctgcaagtcgtagatcgagtacagcaaaaattgacaggaagggacttcaagcctacacaagttctggatgtcagcgaacaagtgcagaagctcattcttcagtcaacgtcggtggagaatctgtgtcagacttttattggatggtgtgctttctggtgacgaacttggtcgtgtcaaatccaaaatcgtgcttgcttgagtaatgtccaaaaacttccaatttccaattataaattgtctgttgttacatcatgcagcacccaaacttgttattagaagccgaagtgtataagtcataaatgccgagaaagctctcggtccttccttcgc

SEQ ID NO: 13318 - DNA, 899 bp, Glycine max
  Clone ID: JC-GMLE01810087E09_FLI
gcaagatgcattaaatgatgcattaaaagaagaaattcagcatttgaaagcactgactggacaagttatgccaaatggaggaccggtaaattttgcttcatttggtggggggcaacaattctatcccaacaatcaggctatgcacactcttttagctgcacaaaagtttcaacaactccaaattcattcccaaaagcagcatcaacttcagcagcaacagcaatttcagcaacaacagcaatttcagcagctgcaacagctgcaactgcagcagcaacaacaactgcaactgcagcagcagcaacaacagcagcagcagcaacaacagcagcagcagcagcagcagcagcagcagcagcaactgcaactgcagcagcagcagcagcaacaggaacagtaatatcaacaaatgggggacatgaatagggaggggacacacctcatcaaatgtacttcagcggcagaggattttagagactacaaattgctttctcttcatcactttacccttgtgtttagagtttgtttaggtcacagtcattatatttcttattcatgaaacggtacagatagtcctagttagagattgagaattatgcattggatcttggctatgtaaaattctttggcacctttggttatgaatatgcggggcggatttatgtttgttaagtcttacaattgcttttgcctatggctatgcctgcataagtggtctgtttagattaaaaatcacgttgtctcgcaatttccaccggaattgccatatgtactcctaaactaggataccaacgaaacacctggggtgtttagtagagggggtttccttttaagtttctcttaggttgttaatgttaaatttctatatttgctatgacaattttaaaaattattctcag

SEQ ID NO: 13319 - DNA, 2913 bp, Glycine max
  Clone ID: JC-GMLE01810090D02_FLI
gcgcgtaagagtaggagtaggagcacgtaagacagagcagagaagattgtttcaaatttcaatgcaaagggcgttgcaatcgatcaacgatctacagttgcgggacccaccaaactaccaactacagctccagtggcagcgccgcactcgtcttgtctcaaacaaatgcaacaagcggttattcttatagttattgaggaggagtagtacttataagaggaagcagatttgattctgattctaatttatttgattctttattatttataaattgaaaagaaagtcacgctggcggtgaagaacgtttctgcggcggccgaggaggaggaacacatgacgctgatttccgatgttgagaaccttgcggatgccgaaatccccgacaccgcacatcaaattagcaccgattcatggtttcaagtggggttcgtgctgacgacgggaatcaacagcgcgtatgtgcttggatattctgggaccatcatggttcccctgggttgggcagggggtgtggttggtttgattctcgccactgcaatatcgctctacgcgaatgctcttattgctaggctccatgaatatggaggaacaaggcatattcgatacagagatcttgctggatttatctatggtagaaaagcttattccctcacatgggctctgcagtatgtcaatcttttcatgataaatgccggctacatcattttggctggttcggctttaaaggctgcttatgttctatttagggaagacgatgggatgaagcttccgtattgtattgccatagctggatttgtgtgtgcaatgtttgccatatgtattccacatctatcggctcttggaatttggctgggattttcaacagtcttcagcctagtatatattgttatagcatttgtactgtcaattaacgatggtaatcgctcattctgtgatgtgtctgttacttctcaaatctcaattcaatatgcttcttcaaatcaattggccttgttgatccactttttctcctgtaaagttaacaatttccatctacatgtcatctgacatgtaaacattgtcatttgaaattcatcctatgaatatattcttgtgttagaagaaagtaatgtgcaagactgatgctaggttttctgtttcccagtgcccctgtaaaaaagagtttcttttgttcccgttcatgttattagcaattacaattaactgtgttatctgaaatagagataaataactagtgttcttgcatacatcttaaattcctgtttaaatctcttgatttagttcgttgagtttcttcattctgtcatccctaatctcattatctttgcttttttcttctttgcactccctttttgtgcttatcagtgattataacgttcctcatttgtgattttgttctgctgctggtatactgtgggcagccaattgttttattgctaaaggatataaactagaccttaaagtgcccttcttttatttagtatttcagctgatgcctagtattatgatttagttggtgagatttttttttaggaaattgcatccctcattgttgatttatctttttatattcaccacttgctgtgtctcaatgcaagtcagaaggtattatttttctgtctagattacaggtacctccacatacttggtattcatgctcgagctggaaacatctacagcatggtggggttaactctctttagtagggattttttttttcctacccaagattcaaacccactaccttcattaaggggaaacaagtatataccttttgaaccaaccaattggtgtaaaaaagaattctctttgagaactagcaaaaggatataatttattcttaaacaatatacagacttgctctttcatttatatactagagtatagttcgaacatcaaatcatattacagaacattcactataaatgatgattcgcatcttttttcccccatttctcttctaacttgttttcaagctttcagttaggctaaagcattctcctgacttttcttcatgggtgactatactataattgagaatcacaatgttttacttcagaacaattgcttttctctatgcttagtttgttcagtttttatatttttattaggtttaacttgatgaactcggagtgaatttgcttaataacctccccccttgcatcaataggtataaaatcaccacctggtgattatagtattccggggacatcaacaagtaaaatattcacaacaattggggcgtctgctaatcttgtgtttgcatataatacaggaatgcttcctgagatacaggcaacaatcaggcaaccagtagtcaagaatatgatgaaagccctgtattttcagtttactgttggagttctgccattatatctggtaacctttgcaggatactgggcttatggatcttcaacagcaacctatttgatgagtgatgtgaatggtccagtttgggctaaggccatggccaatattgcagcctttcttcaatcagtcattgcattgcatatatttgcaagtccaatgtatgagtatttggataccaaatatgggatcaaagggagtgccctggctttcaagaacttgtcatttcgagtcttggtaagaggtggctacctgactgtaaacacatttgtatcagctctgttgccatttcttggagatttcatgagcctcactggagctatcagcacatttcccctcacatttatccttgcaaaccatatgtacctagtgacaaatgagaacaaactaacatccacccaaaagctctggcattggatcaatatttgtttctttgccctcatgtctgctgcggcggctattgcagccctgcgacttattgatttagactccaaaacgtaccatgtttttgcggatttatgattaaatgcattatattctttcagt

SEQ ID NO: 13320 - DNA, 1176 bp, Glycine max
  Clone ID: JC-GMLE01810091H04_FLI
caaattctgtagaaatgaagggattgctagacaacttactgttaggaacactcctcaacaaaatggagttgctaaacaaatgaacagaacacttctggaaagaacaagatgcctattgtctaatgctggtctcaacagaagcttttggggaaaagctatcaatacaacttgttttctaatcaatagaacaccctctactgctataggactgaaaactcctattgaaatctggaatggcaaaacagtaaactactcaaatctaagagtatttggctgcaatacctattatcatgtcaatgaaggaaagctggcacctaaatcaagaaaagggtatgttcatgggttatggtgatggggtgaaaggttacaggatctggtcaccctctgaaaggaaagttcttctcagcagagatgtaatttttgatgaatcacatctgctccatccaaaaattgaggttccaattgttggaacacagagctgccactctcctctagaaaaagatgtagaatctacaaccaaagactccgaaaaaggggttcatatagatacatctcctgttcctcaagaaggtgagcaatcagaagattccaatgcaaatgaggctcatcagaatgctgaacccgagcctgcacagctcaatcctggaattagtcaaagacctaagagggtcagtaagcctcttgagagatatggctttgaagacatggctgcctatgcattacatgcagctgaagaaatagattcaaatgaaccggccacctacaaaaaagctatcaatcatcctgaagctgaaaattggttttagctatgaaagaggaaatggaatctctatataagaatcaaacctgaaaacttgttgaaccacctaaaggaagacatgtggtaggctgcaagtggatattcaagaggaaacctagtctttcagaaaaggaagagataagatacaaggctaggttagttgctaagggattcagccagaaagaaggaatagatttcaacgaaatcttttcacctgtgatcagacatacatccatcagggttttgcttgctatagtggcaaaccaagatttggaacttgaacaacttgatgtcaaaactacttttctccatggaagattggaagaaaatattcgaatgaaacagacctaagagcttatgatatatgtttacatact

SEQ ID NO: 13321 - DNA, 758 bp, Glycine max
  Clone ID: jC-gmst02400001g05_FLI
tggatgcagaagaaggcttgcacctgtcagaggctctgatcaagagagaaagaaaggagtcccatggactgaagaggaacacagacgttttctgatgggacttttgaagtatggtaaaggagattggagaaatatctctcgcaattttgtggtcacaaagactccaacccaagttgctagccatgcacaaaagtactacataaggcaaaaggtttctggaggcaaagataaaaggagacctagcatccatgatataaccactgttaatcttacagaaacttctgcatcagacaagaacaagcctcctgtgattgcaccacagcagaagctgaatagcatgtcaaaagtacagctggactggactagtagccactacaatgatggatcactcatggttttcaacccaaatagtgatgacttgtttgtgtcatcttcatctgatgtcacttccatggccctgaaaatgcaagggcaagatctctatgaatgtgccttacgtgaggcttatgccaaggtaaaagttccaggtttcagcatggctcctagagacttcaataatgaagctgtttttggtattcatgcactgtaattccaaccctgatgatgttaaagaaaaaattatagatcattgttctgtaggattaatgtagatgacctgaagctagcaagctacttcgttcatcattagtgaacatcctaaaagaaaactagactaatgtttcaatccttaaaaactgaatttggaatggacttctttt

SEQ ID NO: 13322 - DNA, 828 bp, Glycine max
  Clone ID: JC-GMST02400003E07_FLI
attggcaactacttcaaagaacaatgaagtagttgatggaaaaaagggggttggtgcactgttcgtcaaggtcagtatggatggtgccccctatttaaggaaagtagacttgaagaattactctacatatccagaattatcttctgctctagaaaagatgttcagctgttttactataagtaagaaagaattagtttaatgtggaaaaattttacctttcaattatttatgcatggacagtctgtctggatccagttactgcttgttttggtatgatttcaggtaaatgtggatctcatggaattctgggcagggagatgctgaatgaaaccaagctgaaggaccttcttcatggatcagaatatgttcttacatatgaggacaaagatggcgattggatgcttgtgggtgatgttccctgggagatgtttattgaaacatgcaagaggctgaggatcatgaagagttctgatgccattggtctagctcccagggctgttgaaaaaagtaagagcaggacctaggcagtacctgtgttcctctctatccatctaactgtctgcgggactaaaagcttctgggctatcagggacgaacaaatcagaacatggttgtcttggaagcaagaaatgaaggcattttggactggatagaatctcatactatgctgccttaatcctttttttttattatgtctgttttatgttgtcgtggagtttatgttttagtaagcttcttttcaagatgatgttaaaacttaacaaaactccaagaacttgactatgggagtaccgatattttatgtatgcgagattgagaagagttaac

SEQ ID NO: 13323 - DNA, 1492 bp, Glycine max
  Clone ID: JC-GMST02400004F11_FLI
gtggtctcatggattctcctcctctatatcctacttagtcaacagctgaggagcagggcatatccatggcagaaccaccaaagggggatgaggaggacggcggagctgctttcgttctccaatccaaaggtgaatggtggcatgcggggtttcacttaacgaccgcaattgttggacccacgatactaaccctgccatacgcgttcaggggattggggtggggacttggatttatgtgcttgacggtgatggggatcgtcaccttctactcttacttcctcatgtccaaagtgctcgatcactgcgaaaaatccggtcgccggcatattcgtttccgggaactagccgctgacgtcttagggtccggttggatgttctattttgtaatctttattcaaacggcaatcaacactggcgttggcgtaggggcaatcttgcttgcgggggaatgccttcagatcatgtactccaatatctcacctcatggacccctcaaattgtaccactttatagcaatggtgacagtgataatgatagttttatctcagcttccttcttttcattctctgcgacacatcaacttgtgttcactacttttcgccctgggctacaccatcctggtggttggtgcctgtattcatgcaggtacatcagaaaatgcccctccaagggactattccttagaacctaagaagtctgcaagggccttcagtgccttcacttccatgtccatacttgcagcaatatttgggaatggcatattgcccgagatacaagcaactctagcaccccctgccactgggaagatggtaaaaggcctttttatgtgctattccgttatttttgtaacattctactctgctgcagtttctgggtattgggtatttggaaacaaatccaactcaaacattttgaagagtctgctgccagatagtggacctcctttggctccaacttgggttcttggacttgcaatcatctttgttcttcttcaactctttgccattggtctggtttattctcaagttgcttatgagataatggagaagaaatcagctgatgtgaggcaggggatgttttccaaaagaaatctcattcctcgcataattctccgaacaatttacatgatattctgtggggttttggcagccatgctaccattttttggagacattaacggtgtggttggtgctattggtttcatccctctagatttcattttgcctatgcttctatacaacatggaatacaagcctccaaaatcatccttcacttactggatcaacgtctcaattatggtgatattcacgggtgctggaatgatgggtgcattctcttccataaggaaattggttcttgatgccaaccaatttaagttgtttagtagtgatgttgtggattaacctaatgcatacataaatcatcaatgcagatagataaaagcactgttcccagcattggtgatgtactggagttcatggtgggtttgtgt

SEQ ID NO: 13324 - DNA, 1601 bp, Glycine max
  Clone ID: JC-GMST02400006B11_FLI
ttgcaatgcaatgattggtggtgatattcaatatgcagtgccagctatggagggaagtactacaccatcactctcatcacctcaacactctgatttctcaactgggtatctcgaagatgctttgattgaatcatgtgagcgttcaaaacgtagacgtgtgttgccatgtgctactgatgaacatagcaagagtttcattgatgaccttgagcaggtacaattaactatactatatatactctttgtttgaatatttattttctctttacttcaatttggtgtatatcttctcttcttgttcttggagtgagactgaatgtcatgtcttcactcttcagagtttctggaatttcaaccccttatggaaccaaccagtagagaacttcaacttctactgcatgaaccagatagaaaggttttgtggaatttcaggtatatatatattatatattactaatatatgtacttcttgttacatatgaattcatttacatgatatggtcaatttggttcaaaatgctattattgcaaacaaaacactgatacctttgtaattaatttattgagaaaaggggtcccaaagaaaaataaaagaataatgaaggaaaactagattgataactggtgatgattgtgctgttacttgtaccttctctttttttttaaattgtcatacatgatatatattttagatgagcatataagcacatcaaggagcgaggaagcaaacattcttctagcagacactaaaacaccggaagagacaatatcagcctctgaatctttaaattcatcctcatcttcatacaaacaaccggcgacatgcaaaaccacagaccccacagttgccccaacaggtactatattctttctctctcttctaaatatgataatatattgggaaaaacttccataggtgtttttggtatttttttcactccagtaatccgtgtaaaaaaggtttgtattaaaggtcaacacagattattgaggtgaaactccaattttctgatcagagaacaacatagaaaacatcaatcaaaactgtatctaagttttatcctgatatatatttgtttgtatgaatacattattaattaatgcttcttgtattgtatggtgttacaattaatgaacagaaaatgatgatatgaggaacaagaaggtggtaacaagagtggtgtatccatttgcaatggtgaagccaggaggaagagaaggtgatgtgacattgaatgacataaatgagaggatcctaatgcctcccacaagaccagtgaggcatccagttggagactttgcatgtcggccatgcgtgtccgcagagggtccagggctttcagggaaagcagtggtggcccttactagaattcacacacagggaagaggcacaatcactattatcagaaccaaaggctaagcaataacatcgagcagtgttatgtgttatgccccttattgctgtggcttggttagcacctacctagcttttacttgaagcagctttttgggcctgatttgctttgttttcatcagtccttcttccaattgtaaagatggaaagcgatatctatgtatgtgcatacaccttatataatact

SEQ ID NO: 13325 - DNA, 1781 bp, Glycine max
  Clone ID: JC-GMST02400008E01_FLI
gggaaccagcttagcagtgactgcagtgacgtccccatcatcaatgcactggagaagggtgtaagggtgattgaattagatatatggcctaatgaatcaaaggataatgtagatgttcttcatggaaggactttgacttctcctgtggcactcatcaaatgtctgaggtctattaagcagcatgcctttgttgcctcagaatatccagttgtaataaccttagaagaccatctaactcccgaccttcaggccaaagtggctgagatgattactcaaacatttggagacatactatttgctcctacctcagaaagcttgaaggaatttccttctcctgaatcacttaaagggaggattattatatcaaccaaaccacctaaggagtaccttgaggcaaaagaagtacaggaaaaggaggaggaatcacaacaggaaaagcctgcagatgatgaagaagcatgggggaaggaagtccctagtttgagaggtggcactatctctgattacaagaacattgaggatgatgatgttcttgatgatgaggaagatattgatgaagcagaaaagtcacgtcaggatgcagcggacgaatacagacgtttaattgccattcatgctgggaagcctaaaggcggattaacggaatgtctcaaagtggatcctgataaagtgagacgtctaagtttaagtgagctacagcttgaaaaggctgctgaaactcatggaaaagaaattgtcaggttcactcagcggaatatactgagagtgtatccaaaaggtactcgcattacttcgacaaattataacccattgattgggtgggtgcatggagctcagatggttgcatttaacatgcaggggtatggtagatctctttggttgatgcagggaatgttcaaagccaatggcggatgcggttatgttaaaaaaccagatcttctattaaaggttggtccaaataatgaggtctttgatcctagatctcatttgcctgtgaagacaaccctgaaggtgactatatatatgggggaaggatggtttcttgatttcaaacatacacactttgataaattctcacctccggacttctacgcaagagtggggattgctggagtccctaatgatactgttatgaagaaaactgagaaagtagaggataattggtcaccttcatggaatcaagtattcaagttcccacttgctgttccggaacttgctctgctccgcgtagaagttcacgagtatgacatgtctgagaaggatgattttggtggccaaacgtgcttacctgtgtgggaactaagaagtggaatccgagcagttccactgtattcccgcaaaggagataagtatgccaatgtgaagcttctcatgcactttgaattcatttgattttgtgcatccttatgctccatgtttttgtacagtcattgctataagttgtagcaagagtgtgtatgtatgtagctgtgtaatattgtaaatgttgcttatttggagtgatgctttttatttgtgttgtcttttactaaaaatataaatgtgagtgagagtgagactaatgtatttgggggatattgatgctgtctgtcacaaggagtgattttccacggattttgaataatgctgtgaagaaataagatgtgtatactatacacctggttttgttttcttgaggagacatgaaggagctgttatttatgttgtaacttgtaaggattgtccattttatgtatcataaacgagagttctatggtttgaaggctggctagtacttcaat

SEQ ID NO: 13326 - DNA, 1752 bp, Glycine max
  Clone ID: JC-GMST02400009C05_FLI
cttagcactactgctagtagtagtaaaaaaaaacaattagaaagtagtagagtgtttttttttctttttttcgtttgttttacttttaagatgggtgagaagagcaacgttggcggcgacgcgattaacacgacactgcttcacgggaagtacgagctgggccggctgttaggccacggaaccttcgcgaaggtgtaccacgcgcgccacctgaagacgggaaagagcgtggcgatgaaggtggtgggcaaagagaaggtggtgaaggtaggcatgatggagcagatcaagagagagatctcagccatgaacatggtgaagcacccaaacatcgtgcagcttcacgaggtcatggcgagcaagtccaagatctacatcgccatggagctcgtccgcggcggcgagctcttcaacaagatcgccagaggccgtctccgggaggagatggccagactttacttccaacaactcatctctgctgtggacttctgccacagccgcggcgtctaccaccgtgacctcaagccagagaaccttctcctcgacgacgacggcaacctcaaggtcaccgacttcggcctcagcactttctccgagcacctccggcacgacggcctgctgcacactacgtgcggcacgccggcctatgtcgcgcccgaggtgattgggaaaagaggctacgacggcgccaaggccgatatttggtcttgtggcgtaatcctctacgtacttcttgctggttttttacccttccaggatgacaacctggtggccttgtacaagaaaatttaccgcggtgacttcaagtgtccgccgtggttctcctccgaggcgcggaggctcatcaccaagctcctcgaccccaacccgaacacgcgaatcacaatttcaaaaatcatggactcgtcgtggttcaagaaacccgtgccgaagaacttgatgggaaagaaaagagaggaattggatctggaggagaagattaaacagcatgagcaggaggtttctactacgatgaatgcttttcacatcatttcgctctcggaggggttcgatttgtcgccgttgttcgaggaaaagaagagagaagagaaagagttacggtttgcgaccacgcgccccgcgagcagcgtgatttcgagattggaagatttggcgaaggcggtgaagttcgacgtgaagaagagcgagactaaggtgaggttgcagggtcaagaaaaagggcgaaaaggtaaactcgctattgctgcggacttgtacgccgtgacgccgtcgtttttggtggtggaggttaagaaggacaacggtgacaccttggagtataaccagttctgtagcaaggagcttcgtccagctcttaaagatatcgtgtggaggacttctcctgcagagaatcctacactcgcttgaagaacaaccaagactcccatgctaattgtcgttcctttgtagttgtttttgttaattcttgtttcaggactgagatattttagttatttgcttgcttctttgttatgttttggcctctggggtgtgtcgtcttttacccagaaaggggaattgttgaaaaggcgaatgcagtaatgaaccgaaatggacatcgaggagttgttgtcgatgatgattcaggtacatgtgctgcgtgttgttgtgctcgtgggtgatgttgttgctatgttggcgtgattgtgaatatgtttgcaaattgattggtgtggctcatgggtcattcatggctgcgtttaatattgtttt

SEQ ID NO: 13327 - DNA, 942 bp, Glycine max
  Clone ID: JC-GMST02400009G07_FLI
aaaataacagagatgctcagcaagaactttcgtcttcaatggtttcacagacatttggtgtccctgatatggccttcaattcaattgattccacaatagatgatagtaacttcttgaacagtggtccgtgggctccaccaccagcaccgccacctctgccaccagcacagtttcagcggatgaggacatataccaaggtatataaacgcggagctgtgggaaggtccatagacataacacgatattcaggttatgaggagcttaaaaaggatctagctcgtaggtttggcatagagggacagctggaggatcggcaaaggataggttggaaacttgtctatgtagatcatgagagtgatgttcttctagtgggagatgatccttgggaggagtttgtgaactgtgtccgctgtattaaaatactttctcctcaagaagtgcagcagatgagcttggacggagattttggcaatggtggccttcaaaatcaagcctgtagcagctctgacggtggcaatacttaaatgaagttcagtaatacgctaactattcttccgtattgttaacttagattatttctgggagatgcattattgtcctaattccgaaaggcaattattatgccactgcggacttctgtgtccaccatcaggacttgaaaggagaagttttgtctatgttccggacatgcaaatttgaagagccaaatgagggcggagaagtgagctgctgctctggtttaacattgagcggtaattttgaatgtataaagtcttaggcagctagattttgcggaagctttcatgatcttccatccttggaggcaccttattattttttagccaatatgactgtgaagtagagaaacttcaaatgttgtaaggtcaagtgcatactgttgcattgtttgcttgaagcgtaagtactaaaaatgttggagtt

SEQ ID NO: 13328 - DNA, 1155 bp, Glycine max
  Clone ID: jC-gmst02400014h03_FLI
gacaaaatggactcagaaccttacagcagaaggtacctcctgtgaggaaaaataggagaggaccaaggtctcgcagctcgcagtaccggggtgtcaccttctaccgcaggactggtagatgggagtcacatatttgggattgtgggaagcaggtttatttgggtggatttgacactgctcaagctgctgcaagagcatatgatagggctgctataaagtttcgtggagtagatgctgatataaactttagtttgagtgattatgaggaggatttgaagcagatgagaaatttgagtaaggaagagtttgtgctcttacttcgtcgacaaataaatggaatctctaggagaagttcaacatacagaggtgcattagcccttcgcaaagatgctcaaggagaaccacgaatgggaccatttgttggcatgacatgttatcctaagccatccatcaattgtgatgatggaaaagcggaggcaagttttaagccctgttcctataagggagaaataattgtgaattccaacatgacaggcacttgccataatcttgatttgagcctaggaatttctccgtcttctaaaagattgaagaataatgactatagtggagggtattcctttggatgtatgacttgtaagatacccgaggaaagaggaccaatggagaaggtcatggtggacagaataaaaaatgttcctttgcaaaaaatttccaacttggcttggcaactttgcagcaatggcagcattgtcccaaggccattccaaccaaatgcagcatcatcaggattcgtctcttcttctagctgtctcatcacccgcacttccaatcagcacacatattaattatgccaacaatttggcattaattggctcaaccacagtactactactagttgaaaccaccagaaacaaagcatatttaccctgcttttttgaagattagatgagcaagagtacttcataaccacatgtacctatagtataagattctattgatttcatcaagcatgatggtatttaataatattgctaagcattgcttacaatggctacccgatattttctgtattcattatcgtgatgtagaacacaatattgccttgtgtaaaagacccttgttgaagtatgtatatatttgttggttcttgtt

SEQ ID NO: 13329 - DNA, 885 bp, Glycine max
  Clone ID: JC-GMST02400015B12_FLI
gcaaaaatgtcgagttccatgatgacgctctcaaggaggctctattgctctctgcttcgaacccccaatgcatatcgccacttctccaccgatcaccttttcgactcggacgaggccgactcagcacccgacccacccgcacccgacgccgttcaagaagaagaaaagttcgtcatcgatcgccccctcgagaatggcctcgacgttggcatctacagggctattctggtagggaaggcggggcaggctcctttgcagaagaagcttaagagtggcacctccgtcactcttctctccgtcggcaccggagggattcacaacaaccgcaggcctcgcgtcgacgagaaccctaaggactatgccaatcgctctgccattcagtggcatcgtgtctccgtttatcctcagaaattgggagaccttgtcaccaaacacgttgttcccggttcaatgctgtacgtggaggggaacctcgagaccaaatgcttcaccgatccgataaccggcattgcccgccgaattcgagaaattgctgttcgacgaaatggtcgcattgtatttttaggtgaaggcggtgatgctgagctgcagacactgccaaaagacctgagagctgttggctattactaacgttagatgcttgaaatgggaacattgcatttagttcataatggagatttttctattttgtaattatactctgattttttaccgcaaatttggaattatttcgcagacatttgtcatgagggaaactctaggtttgagcgatcttgtagtttctacgtgtaattcataatcagggaatatagagctcaaccttcctgattttgtatgttggtaaacttgtggtagggcaagtatttcaattttctctttggtttt

SEQ ID NO: 13330 - DNA, 1174 bp, Glycine max
  Clone ID: JC-GMST02400015D11_FLI
acccaccatctaatttctgattcacagtcctatcctttgagataagagcacacgtttaacaaaatgctattctctatttctcatcactttaatcacgcactatcagtacaacaactcactcactaagctaaacaatttcatcaagcctgccatggcttcctcgtgtgcttcctctgccattgcagctgttgccatctccacaccaagttcccagaagaatggatcactcttgggaagcacaaaagcttcttttcttagtgggaggaaactgaaggtgaacagttttacagcaccagttggagcacgatccagcactacagtgtgtgcagttgctgagcctgataggcctctgtggttcccaggcagcacccctcctccatggctagatggcagtttgccaggagattttggctttgatcccctaggtcttggatctgatcctgagagcctgagatggaatgtccaagcagagcttgtgcactgcagatgggccatgttgggagctgctggcattttcatcccagaattcctcacaaagattggtatcctgaacaccccttcatggtacactgctggagagttggagtacttcacagacactaccacactcttcgtagttgagctctttttcattggttgggccgagggtagaaggtgggctgatatcatcaagccaggctgtgtcaacactgaccctatctttcccaacaacaagctcacaggaactgatgttgggtacccaggtgggctttggtttgatccacttggctggggaagtggttctcctgagaagatcaaggagttgagaacaaaggagatcaagaatgggaggttggccatgttggctgtgatgggggcatggttccagcacatttacactggcactggtcctattgacaacctctttgctcaccttgcagatcctggtcatgctactatttttgctgctttcactcccaagtgagaagggttggaacaactctatgattgcaagccttggagaaacattgggaaacttgtttaactaagttgtaaggcttaaatgtctttaggggggagtttttatgttggtgaaagcttgtaaaatggtacttctattgtcatgcacagattgattattcaatgtacaaatacctatttaagtttagatgcatttaatgtaaattcaggaagt

SEQ ID NO: 13331 - DNA, 974 bp, Glycine max
  Clone ID: JC-GMST02400015D12_FLI
ttcttattgaaatacaggatactttgaagtcgcctccaccagaaaacgtaaccatgaagagggcctcaacaatatcagtcattgtcacaacatttttctacctctgctgtgggtgttttggatatgcagcctttggtaatgatacaccaggaaaccttttaacagggtttgcactctataaaaaacattggcttgtagactttgccaatgcttgtatagtaattcacctagttggtgcatatcaggtgtatagccagccactttttgccaatgttgagaattggcttcgtttcaagttcccggacagtgaatttgtgaatcgcacatactccttgaaactccctttgctgccagctttcccgctaaattttcttaggctgactttcagaactgcatatgttgcatcaacaactgggattgcaatgatatttccctacttcaatcagattttgggagttttggctggcataatctactatccattatctatatattttccagtggaaatgtacttgagtctgggcaatattgaagcatggacagctaagtgggtcatgcttaggacttttagcattgttggttttctggtgggattgttcactctcgttggatccattgaagggatagtatctgcaaaactaagctgagaagctttcaggcctctcccagaattggaagttgaacttggaattagattgtggttgttacattttttgccctttctttgaaaaccagcattaaacatagtgaagcagacgcctccccaagcataaagaattaagcatagatggaacattgatgaattcaaggttctgttgttctacctgttaagatgtagtagtaaagatgtgtaattgagttgcagaagcttaaaattgcatttgtttcttgaaatgatcttgagaaactagttagtttcatctgtaattcttagctaatcatggaataaaaaagttgagcaggtccggtttttg

SEQ ID NO: 13332 - DNA, 1735 bp, Glycine max
  Clone ID: JC-GMST02400016D01_FLI
taggcgtccacgtggaatgtattttagtgccaaagataaaggagagatgatgtcaatgatctataactggccagctcacgaggtagacatgattgtcttaacagatggaagtcgaattcttggcttaggtgaccttggagttcagggaattggaatccccataggaaaacttgatgtgtatgttgctgctgctggtatcaacccacaaagaatacttccagttatgctggatgttggtaccaacaatcaaaagttacttgaagatcgcctttatttaggacttcgacaaccaaggttggaaggtgaagagtatctatcaattatagatgaattcatggaagctgttcatgctcgatggcccaaggctattgtgcagtttgaggattttcaaatgaagtgggcttttgaaaccctgaaaagatatcagaaaaagttttgcatgtttaatgatgatatacagggcactgcaggtgttgcacttgctggactattgggaactgtaagagcccaaggccggccattgactgattttgtgaaccaaaagatagttgtggttggagctgggagtgcaggacttggggttctaaaaatggccatccaagcagttgcaaagatatctgggtgcagtgaattagctgccaaaagccaattctatttgattgataaagatggtctagttacaacagagaggaacaatctagacccagctgcagctccatttgctaaaaatccaagagacatagaagggcttactgagggtgctagtataattgaagtggttaagaagattaggccacatgtgctccttggtttgtctggcgttggtggtattttcaatgaggaggtgcttaaggcaatgagagaatctgtttcaacaaaacctgctatctttgccatgtctaaccccaccatgaatgctgagtgcactgctattgatgcttttaagcatgctggggaaaatatggtgtttgcaagtggaagccctttcgaaaacgtagatcttggtaatggaattgtgggtcatgtaaatcaagcaaacaacatgtacctcttcccaggaattggtttgggaacccttctgtcaggtgctcaccttataacagatggaatgttgcaggcagctgctgaatgccttgcttcatacatggccgaggaagatatcttaaaaggaattttatatccatccgttgatagcatacgagatgttacggcagaggttggggctgctgtgcttcgagcagcagttgaagaagaactggcagaaggaaatggtgatgtggggcccaaagaactttcccatatgtcgaaagatgagactgtggagtatgtgcgaagcaatatgtggtatcctgtgtattctcctctcgttcatgaaaaatgatattctgactatatgttcaattttttgggggacctgtgaaattcacatctcaaattgctgcagccaagccttttatttttatttttatctatggtgtctaatccaatgttcttaattcatgcttattactagcaacgctgagtatcggatggcaaacaaaaaaaagggaaatatatgtctcctttcattttggccgggaattattgtattagttttgaatctattaaggtcagtctagtgttgacgagtttaagtaatttatatgggatcttaagtttgttgttgtacactaaaaaatagtattgaaatttgactttttaaagttcggcatatattatactggagacatttgat

SEQ ID NO: 13333 - DNA, 1992 bp, Glycine max
  Clone ID: JC-GMST02400016G05_FLI
gtttttccaattcttgcttggggcagaaactacactgctactaagttcaggaaagatcttcttgcaggtctcactattgctagtctttgtattccccagagcattgggtatgccaccttggcacatcttgatcctcaatatggcctttatacaagtgtggtaccaccacttatctatgctgtaatgggaacctcgagggagatagcaattggtccagtggcagtggtttctcttctgttatcctcaatgatggagaaattagtagaccctgctactgatccagtgggttatacaaagctgattttgcttgctactctctttgctggtatctttcagacttccttcggactcctcaggcttggtttccttgtggatttcctatcccatgctgcaatagttggatttgtggcaggagcagccattgtgattgggcttcaacagttaaagggactcttaggaattacccattttacgaccaagaccgacatagtctctgtcatgaaagctgtttgggaagcagttcataatccatggaaccctcgaaattttatcctgggatgctcgttcttggtcttcatcctaacgacgagatgtttgggtaaaaggaagaagaaactattctggttggcatcaatctctcctcttgtatctgttgttgtgtcaactctaattgtgtttatcacaagagctgataaaaatggagttaaaattgtgaaacatgtcaaaggggggttgaatccaagctccatccatcagttagacttcaacaacccctacattggagaagtggccaaaattggactagtggttgctgtcgttgcccttactgaatctattgctgttgggcgatcgtttgcatccatcaaaggataccaacttgatggaaacaaggagatgatgtcaataggtttgacaaacatcataggatctttcacctcctgctacgttgcaactggttcattctcccgtactgctgttaattatgcggctgggtgtgaaactttggtgtcaaacattgtgatggccatcacggtgttgatatcactgcagtttttgacaaagctattgtattacactccaacagctattcttgcttctgtgattctctctgccctaccaggactcattgacctcagtgaagcttacaaaatttggaaggttgataagatagactttcttgcatgcgctggagcattctttggagtactgtttgcttctgtggagattggtctacttgttgcggtggtaatatctttttcaaagatcattctcatttcaattcgaccagggacagaaactctaggaaaacttccgggaactgatttgttctgcgatgtctatcagtatcctatggcagttaaggttcccggggttatgataatacgagtcaagtctgcgttgctttgctttgcaaatgccaatttcgttagagaaaggatcattaaatgggtcactgaggaagaatcagaagatgacaagggaaattcaagaagcaccattcaatttctaattcttgacacctccaatttggtgaacattgacaccgctggaatcactgctctagaggaactgcataaaagtttgtcttcacatggaaaacagttagccattgcgaaccctaggtggcaagtgatacacaagctaaaggtgtccaactttgtcggcaaaatccgaggcagagtctttctgactgttgaagaagctgttggctgcaagagccgctgctaagttggataaccacacctgagtcttatgatgtatctcatgtgggaaaacaaaaaacagtgtctaatatccatttgtctttgtggaaaatcataacactagtgcttgtgaattgttcccttgtatttccactcccaagtacgtacgttatgtacgaaatgggacatcagaataagtcatctcgtaattcatgttagagatgctgtgagtttctcttatgttcatgtatgtgcttaataaaatagcaatttgaagtgacgtgtttgt

SEQ ID NO: 13334 - DNA, 795 bp, Glycine max
  Clone ID: JC-GMST02400016H10_FLI
ctcaagtcagattttggaatccacttatgatttttctgtaactgactccaattctttacttttccttttcaaacattcacctgaagtggcaaaggaattgaatattacttcagagttttcatttgaatctgcatcattgtctaaacacaatgattggatggcaatttttccactttcttttctcttctcaaatagtctcaagttccctgcgaaaaaggatgatattttgaaacagtatgaattctttccgaaattgtctgttcaaaatccatctttaaattccaaaaagggacccagaagagttcacttggagctttatttaggttccttgataaaggaccagtgatgcggtcctcaacatcactggtcctttatcaagttggtcatttgcagataatttgcttccaggaactgaaacctatggtgatggtccacaatcatatatatgtcgtcttagtggacctagcgatgggaattggaccttctggttagaggctaacaactctgaagcattacgagtggacctagcaattttagaccaaaagttggttgatccaataaagagattgaagaatctttttccagattgggttgatgttgttgcatattctagttttatgtctagctatatcttctaattcttaataaacaagtcttgtaaccaagatcaaatttctataggatagctgttaggattttatttcacattaaattcaacttataggtcaagtgtaatacaatcatgacatagtaatcgtgatcatctcccaaaggaataaaggaggaatttcatgt

SEQ ID NO: 13335 - DNA, 517 bp, Glycine max
  Clone ID: JC-GMST02400018B07_FLI
aaacaaccggtgacatgcaaaaccacagaccccactgttgccccaacagaaaatgatgataccaggaacaagaaggtggtaacaagagtggtgtatccatttgcaatggtgaagccaggaggaagagaaggtgatgtaacattgaatgacataaatgagaggatcctaatgcctcccacaaggccagtgaggcatcctgtaggagactttgcatgtcggccatgcgtgtccgcagagggtccaggcctttcagggaaagcagtggtggcccttactagaattcacacacagggaggaagaggcaccatcactattatcagaaccaaaggctaagcaatgttaacattgagacagtgttatgttgttatggcttggctagcacctaactagcttttacttgaagcagctttttgggcctgatttgctttgttttcatcagtccttcttccaattgtaaagatggaaagcgatatctatgtatgtgcatacaccttatataatacttgaaccttatgtt

SEQ ID NO: 13336 - DNA, 842 bp, Glycine max
  Clone ID: JC-GMST02400018G05_FLI
cctatctggagagaaacaaaggactcaaagaagctatgatttcactggtgttgtatcttggtttgctgcaaaatgtgatctcattcttctcctatttgatcctcataaactagacatcagtgatgagtttaaacgtgtaatcgcatgtctacgtggtaacgatgacaagatacgagtggttttgaacaaggcagaccaagttaatactcaacaacttatgagagtttatggagcattgatgtggtcactgggtaaagttctaaatactcctgaagttacacgtgtatacataggctcatttaatgataagcctatggatgaaggcttcgtcagtccattaggacaggatctctttgagaaggaacagaataatctgcttgctgatttgatggatattcccaagaaggcatgcgatcgtcggatcaatgaatttgtcaaacgtgcaagatctgctaaaattcatgcatatataattagtcaccttaagaaggagatgcctgctataatgggtaaagccaaggctcaacaaagacttcttgataatcttgaggaagaatttgcaaaggtccaaagggagtttcatctaccagccggtgattttcccaacgttgaacacttcagagaagttctaagtggttatagcattgacaaatttgagaaactaaagcccaaaatgattcaagcagtagatgacatgcttgggtatgaaataccagagctattgaagaaattcagaaatccttacgattaaaataaaaaatgttgtcatttttttatgtatgtttcaccaagtttgagatcttaatgtttaagttcattattaatggattgtggatggtttc

SEQ ID NO: 13337 - DNA, 670 bp, Glycine max
  Clone ID: JC-GMST02400018H09_FLI
ccaatctgcttgcttgaatttacttggtgtgaagggtgctagcaaggagtcaccaggatcaaactcaagactcttggccaccattgttgctggatctgttttagcaggagagctgtctctgatgtctgccattgcagcagggcagctagtgaacagccacatgaaatacaacagatcaagcaaagatgtaaccaaaatatcatcatcttgaggtcagggacgtggttgcagtcattaattctggactctagaataaaaaaattgagggtaagcggatttagggaaggaaaatggagaaacattagattagattgttggcatccacgtttggctctgcattgctgtctgtttagatcttttattatttggagagaggaaagtagagttatactctagatcttccctgtccccttctggatcatttcttcttttcattgcttcttctgccgagccattcagtgggtgttaacactttttttctcctcaaccaagacatttgacgtgttatattctaattcttttccccctatataatatgcttagcatatctatcattgtagccgaatgggttgatgaatattctcttgtccgctagtgcccgtcaattaagcttgagatcccattgtctcaagtctttatctaattaatgaatgtatttctgtttaagggt

SEQ ID NO: 13338 - DNA, 1679 bp, Glycine max
  Clone ID: JC-GMST02400026E08_FLI
gttttattgtgtggatttggatcctacccttttgcttaaactctattaacttgtcataaatggtttgaaatttgaatgaataatacatattttgatgctcactgccatatactgcatattgatcaggaattgtgatgggggctgaacagcaacacatggattcgcacaagaaaatggtaattgctgttgctgttgccagcacttcacttggtgcagtcattttgtgtgtgttgtgcatctggatttactacaccaaatacccttcaaaatccaaagggaaaaacgttcaaagatcagatgctgagaaagggctagcttcatcaccatttttgagtaaattcagctctataaagctggttggtaagaaagggtgtgttccaataattgactataagcaaatagaaaaagccaccggaaatttcaaggaaattaacatcttgggcaagggaggttttggatgcgtttacaaggctcatttggatgataatttggatgttgcggttaaaaaattgcactgtgaaaatcagtatgctgagcaagaatttgagaacgaggtggatttgttaagtaaaattcaacatccaaatgtgatttctctgctgggttgtagcagtaatgaggatacaaggattattgtctatgagttgatgcataatggatcattggaaactcaattacatggaccttctcatggctcagcattgacttggcatttgaggatcaaaattgctcttgacacagcaaggggattaaaatatctacatgagcactgttaccctccggtgatccatagagatctgaaatcttctaatattcttttagatacaaagttcaatgccaagctttctgattttggtcttgccataaccaatgggtcccagaacaagaacaacctcaagctttcaggaacgttgggttacgttgccccggagtatcttttagatggtaaattgactgataaaagtgatgtatatgcttttggagttgtgcttctggagcttctattgggaaagaagcctgtggaaaaactagcacaagctcaatgccaatctattgtcacattggccatgccacagctcacagacagatctaagcttccaaacattgtggatcctgtaattaagaatacaatggaccccaagcacttataccaggttgctgctgtggctgtgctatgtgtgcaaccagagccaagttaccgtccactgattgcagatgttcttcactcactgatccctcttgtgccagtagagcttggaggaacactcaaagtttcacaactgccaaaacaagtcttacctgctgacccacctgaggattctagtcaatgatcagtttgagacaacataaatgacatgttttgtgatgctctacccaactagtgaggcttgaaattacagaaagatccttaacaactacactgattctgtaataaatgcttgcagcccgggagtgttaagttagaaacagagaaattgagaaaaaagtaggcctaaatggtgtagaagagcattgggatgttaatgataaatgggaggaaattgatttcacttgtgtgaaaatgtgtgtatagagtggtgatattgcggaacattgaaactgttcagagaggatctcattgtctttcattcccacttttggcatatgaaattcagcaaaccagacaacaaataattcgt

SEQ ID NO: 13339 - DNA, 1931 bp, Glycine max
  Clone ID: JC-GMST02400026F07_FLI
gggagatcttcacggcctcaaagtgtgtagaggagcccctcttctcacacacttttttgctgaccatctcttcctattttgcagggctaatgttaattaagttgatatccttcacagtattctcggtgcttttgagaaagcctcaggtctttccatcatcttccagaaatctgaatttttttagcagaaacacaccacccagcatcaagcaacaaatctctggacaactgcaagttacagattgtctgggaacagggaaataccttgggatgccctctatgaatggtaggaagaaaaaatccatcttctcctatctgagggataaaatttggaggaagatccaacagtggttaacacctttcaaaggttggtagagaagtgctcatcaaatcagtatctcaagctattcttgcttactgcatgagtgtttttctcctcccttctacccttcaagatgagatccaaaagatgatgaactcattctggtggggtagtaatagaaactatgggaaaggcataaattggctaagttgggagcgtctaacaatcaggaagaaggatgaatgtatgagatttagacatttatatgcttttaatttgtctatgctaggtaagcaaggattgaagctagcttctgatggacattgggagatgggaaaactgccaaagtttggaaggacccatcgccacgatctactgatggttcattcgtcaccaaccccattattgatggtctggaggacttatcagttgaggctttggtagacccttttcaacaaagtcctggaacaaaattattctaaatgaccttttcacagcagaggatgtcactagaattctttcaatgccaacctatttcagggatgaactagacaagcttacatggatgtttagtagagatggattttacacagtcaaatccgcatactttcatgctacacagagtatggtagacaactcaagtctgcgtgaagaaggacggtagatggatatatggcaactgaagattccacaaagggtgttgataattatggagaatagcacgaaactgtctccctacgcatgacaggcttctaacaaagggtgttgattgcccacccacttgctctttgtgctcacattatattgaaaacgattggcacatttttgttggttgtgagcatgcgaagaaggcttgggaggaggtatcgctctggaacaaaatacaggaagttgctgtaactggggatgacatgaaatcacttatattcacatcattaaaagcattcaccactgttcaaacagatacctttggtttctttggaagcgacgtaacgagaaactttaggaaaatatacagaagcccctcaacatatcattgaactctccttccagtatactcatgattggaagtaactctgttaccgcagaccttcactaccctctgctgctaatagttcaacgccaaaatggtccagaccatcgctagagttcatcaaatgtaatctggatgcctcactctttcgcaattatcttcttcatggacttggggcatgcaacagaaactcacagggaacttttgttgctgatttatcttgctggttcaagggccttcttccacccatggaagctgaagatcgagctctatctcaagttataacttggttactgaacaacaacttcaccaaagtcatcctggaaattgactgtcagcagctagtggacaccatcaacacgagctatttccaaaaaaatgaagttggagatatcctaaagctctgtgtttctaaatgttcaagttttgaaaactgttcaatttagtttgttagtaggcaaaccaatcaagttattcattccttagcaagaacatctagattctatgtttgtcaacatgcttttgatcatagtcattccttagcaattcagtttgttaatataagtctctccttttt

SEQ ID NO: 13340 - DNA, 889 bp, Glycine max
  Clone ID: jC-gmst02400026g10_FLI
ggctcgaggtgcatggaaatatttcgccctcaaaatttagacagtccagttgagaacaccttaaaaggaaaaataagaattaccaccagatgcctgtggcttgacaaggggaagctgttggatgctctccataaagctgctcatgctgctcttgcaagctgccctgtaagctgtccactggctcatatggaaaaaattgtgtctgagatgttgagaaaaatggtgaggaagtacagtggcaaacggcctgaagttattgccattgccatagaaaatcctgcagctgttcttgctaatgagataaacacaaagttgtctggaaaattaaatgtggatgggatgtcggcattgagaaaagtggtggatggacatgagaaagagaatcagagaaccgaaatgcaaataagagatcgtattgatgtaggtggtctactacctacaaaagacaatgctatctcaagtggagctgaggatggcttgtctgatgcggaggatccaaatgattattttaaaccatttgttgaatcctctccagttgagaagtcaattaaaactaacaatggttatgttccacgaaaggagaagtcatccccattgaaggatgactgttctgaagacactgaagaatgcaattctgtaaatacatcagattctgaacccaaatcttcaaaatcagcaaagagaaataaatggaaacatgaagaagttaagaagctgattgatatgcgtggggaactgaatgacagatttcaagttgtgaagggaaggatggccctctgggaagaaatatctcagaatttgttggctaatgggatcagcagaagtcctgggcagtgtaaatctctgtggacttctttgttacagaaatatgagcaggaggtgaagaatg

SEQ ID NO: 13341 - DNA, 1014 bp, Glycine max
  Clone ID: jC-gmst02400026h10_FLI
aaaaatactaattgttatgttgtgaatcttgtgattttgatttattgaaattcaaggggcagagttttggagcttcggctccggctaacggtggcggttcgggtcagccgaagcagagggttagagccaggagaggacaagccacggacccacacagcatcgccgaaaggttacggagggagagaatcgcagagcgaatgaaggccctacaagaactagttcctaatgccaacaagactgacaaggcctccatgctggatgagatcatcgattatgtgaagttcctacagctccaagtcaaggttttaagcatgagcagattgggcggtgcagcagctgtggcaccccttgttgctgagggtggcggtgactgcatccaagccaaacgcagcaactcaaacgacagcctcgccatgacggagcaacaggtggcgaagctgatggaggaagacatgggttccgccatgcagtacttgcagggcaagggtctatgcctgatgcctatttcgctcgccagcgcaatctccaaagccacgtgtcaccccttcatcaacggtgatgggccctcctctccccgaatgtccgcgctcactctggctaacgccgtcgtcaaagacgcggcctccgtttccaagtcctgattatcacgccgttaccgtcaatgaagaacctgaacatagcaagtcacgtggagtctaggaagcgggtggcttcactgcacgacgtcgtatttaccttgacttttgcagacgctaactttcatgcttcaaccaatccaatcacaaatttcggagtttcccattcctctatctcatttctgttttttttttttgtcttttcctttcttttcttttcgcaacgagttttgttatttctttttctttttttacatttatgttactttttctttagcttatcccgttcgacagtccaacatttgccttatcttttggttaagagaaagaaaacaatctaatgttttatcttatttaattggaaaaatatttaaaaaat

SEQ ID NO: 13342 - DNA, 1378 bp, Glycine max
  Clone ID: JC-GMST02400027E02_FLI
ggaattaagtgcttccactctagtactttaccctgcatcacagccaccacaagagcctaaaaatgagaacaatgggggcatagtttttgactcaaaaaatttgcagcaaatgcaaggggaaatgcccaaagagttcctttggccttctagggacttggttgacaccacccaagaggagctaaaggaaccccttgtggacctagcaatctttaagaatggtgacgagaaagctatttccaatgcagcagagcttgtgagaaaagcatgcttgaagcatgggtttttccaagtgataaaccatggtgtggacccagatctcattgatgctgcatatcatgaaattgactccatttttaagctcccattgagcaaaaagatgggtgctaagagaaaacctggtggtgtctcagggtactctggtgctcatgcagatcgttattcgtccaagttgccatggaaagagacgttttctttcctctatgatcaccaaagcttctccaactcccagattgttgactacttcaagtctgtgttaggggaggatcttcaacacacagggagggtatatcaaaagtactgcgaggcaatgaaggatttatctttagtaattatggagctattgggtattagtttgggtgtggatcgtgagcattatcgaagattttttcaagatggtgactcaataatgaggtgcaactattatccaccttgcaacagagcgaacctcaccttaggcactggccctcacactgatccaacctcactaaccattcttcatcaagaccaagttggaggtttagaagtttttgtagataacaaatggctcgctgttcgccctcgatctgaagccttagtcataaacataggtgatactttcatggcattgtcaaatgggagatacaagagttgtctacacagggcattggtgaacacatacagggagagaaggtcccttgtttattttgtgtgtccaagagaagacaaaatagtgaggcccccagacaatttgttatgcagaaatgaggaaaggaagtaccctgatttcacatggtccaatttgtttgaattcacacagaagcactatagggctgatgttgctaccctccaaagcttcattgagtggcagcaatgctctaattccaacccttccaacttctagtttactttatttaccctttggctgcttattattattgcttttgcctgtgcctggctgcctaatgtcaccactactactactccctttggctaatcattattcattttccttttcttttgaaataccctgtacggagtttgagtacagctcatcctgcacttacaaaccacatagtgatatcatgtacggtcgtatttgaatcaagttccattttctgtt

SEQ ID NO: 13343 - DNA, 790 bp, Glycine max
  Clone ID: JC-GMST02400029B12_FLI
aaccgtgtcaaatgacattgtgtgatccatgtagccgacctcacctagtgggataaggctttgttgttcttgtttttgttattgctgtttactgtctaatgcctatggagttgcgagtctctctgacttttattgttccccttgtttatcatctccagtcataccaaatggccaacagagttcaaattcctaccaacaattcagccctcattgctatgattgcagatgaggatactgtagttggatttctgttggctggagtgggaaatgttgacatacgtaggaagacaaattacctcattgtggattcaaaaacaactgtcaaacaaattgaggatgcattcaaagaatttacaacaagggaggatgttgcaattgtgctgattagccaatatgttgcaaatatgataaggtttttggttgatagctataacaagcctgttcctgcaatacttgaaatcccttctaaagaccatccttatgatccagcacatgattcagttctgtcacgagtgaagtatctcttcaataccgaatcagttgcatctgggagacgctgaattcaccgtttacagttgcagctttttgggggtgtttgttgtttttctttgtacattatggttaataatcttttcttgaaattcagagttctatgtagatgtagcttaaataatttgtgctgtcttggggataatttaaaattcctgtcacagaacttcaagacgggcgaatattttatggtgtcatgtcagattcagatgaaaatttagcttgaaatatgcatttatat

SEQ ID NO: 13344 - DNA, 1243 bp, Glycine max
  Clone ID: jC-gmst02400029f07_FLI
accaaccaaccatcaatggcagatgtaaccacctacctccgccaccaccgcgaccccgaccccgaccccgacgacgacgaccaaaccctaattccattcccttattgggatttggactttgatttcgaccccgaattccccacaaacactttctccttcaccgaccgcgaaaaccagatcaatttcgtcatggatctcttccaccagcgcgtggagcagtctcaactcaccgatcccctctccaacgacgccgttttcggcgtcatcgacggaatcgacttaggtttccccgccgccgacgacttcttcatcggacggagattctccgtcggatccgacgaatccgacggaggacactctcactcgcacgcggggattgacgacggtgtcctggggttctgcgcgcattccgacgaagactacaacgaaaacgacgacgttgcgagcatccctctctgctgggacgcgcttcaattggaagacaacaacaacaactacgatgacttcgagtgggaggaagtgatagacgagagagacgttctcagcatgctcgacgacaccgtttccgttaacctcggaatcgaagcagaagcagcagcagcagcagcagaagaagaagaagcagaatcagaagccagcattttggagtggcaagttttattgaactccaacaatttggaaggaccaaattcggagccttatttcggagacaacgaggatttcgtttacaccgcggactacgagatgatgctcgggcaattcaacgacgatgcgtttaatgggaagcctccggcctccgcctccgtcgtgaggaatcttccgtcggtggttgtgaccgaagctgacgtcgtttgcgcggtttgtaaagacgagtttggcgttggggaaggggtgaaggtgttgccgtgttcgcatcgttaccatgaggactgcattgtgccgtggttggggataagaaacacgtgtcccgtttgtcgctatgagttccccactgatgatgctgattatgagcggaggaaggcgcagagatctgttgttatgtgataatcatgatcatggtgttattattagggtcagtttttttttcttactttcagtgatagggtataaaaagtatagatttttttttttgctgctgaagaaaattgtgcttgttgattttccgaaatttgagttttgggatgatgcttctcttcgaattgtacttttgggatacatcacagaaacgattcatttttccatc

SEQ ID NO: 13345 - DNA, 876 bp, Glycine max
  Clone ID: JC-GMST02400029H09_FLI
aaaaagagaagcataaacttttagctatttcacagtgtaatcacttggaaaaatttactatgtggttccttacagatccgaaccaagttggtggcacctggtggagaagctttgggcggtgtaattggtgctttcagatacatgattcgaactgaaggattcttttctctttacaagggtttagtgccatcaattataagtatggcaccttctggggcagttttttatggtgtatatgatatactgaagtcagcttatctgcattcaccagaaggaatgaagagaatccagaatatgcataaacagggtcaggaactgagtgcctttgaccaacttgagttgggaccggtaaggacattgttgaatggggctattgctggtgcttgtgcagaagctgctacatacccatttgaagtggtgagaaggcaacttcaattgcaagtccaggctacaaaattaagttcttttgcaacatttgccaaaatagttgaacagggaggcattccagctctctatgcaggacttattcccagcttattacaggtgcttccttcagcttccataagtttctttgtctatgagttcatgaagattgttctgaaagtggagtaggcaatgaacaaattcccaggtatatactgctaagaagctgcaccatgatttacgggcaagctgctaaaatagttacagaatagtaacattcaattttaattggcaatcatatttgatgtctgcctttgagggtgaaaggataattcaggtctgctatcccgtacaactgatcacagtatcaacagaatttttggattgactctacactcaatatacccaggcttcaagtctgcaaagtgaaaataaatttattttgttactccc

SEQ ID NO: 13346 - DNA, 1634 bp, Glycine max
  Clone ID: jC-gmst02400030c02_FLI
aattattttagtttattgttttagtcttgggtcaattttcactgtctcctgatgatcattttaccatgtggggtgagttaatttgagagtgtcgtgcgctgatttttcttcttaaaggctcaaagggtcttctgggtttgatcgaacaagaaaaaaaaaaaaaagagtcttttgttatcatttcaacgctaccagatgccagaaaacaggcaggttctgaggaatgctgattctggtgacaacattgaagaagcaattcgacatttgaaaatcaatgataattgggatagagatgctgcagctcaatctacccaatatcccgatcgacccggtgaacctgagtgcttatattatttgagaactggaatgtgtggttatggaactaactgtcgataccatcaccctgctcatatttcaattggtactcattatggtgaagaactccctcagagggccgggcaacctgattgtgagtattttcttaagacagggacatgcaagtatggatcaacatgtaaatatcatcatccaaaggacaggcgaggtgctgctcctgtgtcattcaatactttaggccttcccatgcgtcaggaagaaaaatcatgtccctattacatgagaactgggtcttgtaagtttggtgttgcatgcaagtttcatcatccacagcatgcttcccttggagcatacccattggctggatctcctactcctacctcaacaattattcctacatcaggtttaccatatgctggagggtttcctgcatggtcagcagtaccaagaatgtcgtatttatctggacaaggacttcaatcttatgtgcctccttttctgtcttcttcgcaaggtgttatacctgtgcagagctggaacaactacatgggaaatatgaaccctgcaatgccgaacggttttcttggatctaatcttgtttatgactacatgaatctgggcgagtcactctttggtgggcaggcaataaattctgctctcccaaataggcctgatcaaccagaatgcagatactttatgagcactgggacctgcaaatatggatctgattgcaagttccaccacccaaaggaaagaatgtctcaatcattgataaatccactcggccttcctgtgcgacctgggcaagctgtatgctcttattacagaatctacggaatgtgtaagtttggcccaacatgcaaatttgatcatccagttttgactatccctcagaactatggcttgacctcacctgctatgaatgtacttgatactcctctcaccagggggttatcaaatgtacaaccacctgagacatctccttctaaattaagtgacaagaagcttcagcattctgatgcaaaagctgctacagaagattcatccaaacaagatgatactacattgaattccttcccggcttccgcagagcctttacacaactaaactacttgaagtttgattcttttttcttttggatattttgttttcccccacattttcaggagaagtatatcatacataccatctattcccccccttttcacctgcaattctgtggagttggatagtttgttcagagatttttgtgacaaccactagcttgtggggaatggaaggcattttttgtgttgaat

SEQ ID NO: 13347 - DNA, 920 bp, Glycine max
  Clone ID: JC-GMST02400030F01_FLI
agacaacttgaggtaccaagccatgaacattgtagctgcgaggctaggccgagctgaaccgcctttgaggaaggaggtggtggagtacatgttggatgttgattcccatatgtggagcatgagaagaagcaaggctaatttcttccgaatcatgtcccttttctctggtatgatcacaatgggaaagtggttcagtgatgtttgcctttggaagaaccatgttacatcagtcctggttcacattcttttcctcatactgatatggtacccggaattgatcctgccaaccgtgtttctctatatgttcttgattggtctgtggaactataggttccggcctagacacccgcctcacatggatactaaactctcgtgggcagaagccgttcaccccgacgaactcgatgaagagtttgacacgtttccgacttctagatcacaggatgttgtgagaatgaggtatgacaggcttagaactgtggcaggtaggattcagacagttgttggggacatagctacacaaggggagaggtttcagtctctactgagttggagagaccccagagcaaccagcctctttgtagtgtttagcttctgtgctgctgtggttctctatgcaactccattcagagtggtggctctggtgacaggtttatactttttgcggcatccaaagtttaggagtaagatgccttcagtaccaagtaatttcttcaagaggctcccagctagaacagatagtttattgtgatcttgttttttcatagttttagtttgttatacatagttacatacttttctgtttattatcatttccttctttaatatccttgttacttccacactgttgtagtcatttggatagtgtaccaatgaacttatcctttaagtaccatattatcagaattgattattaaatc

SEQ ID NO: 13348 - DNA, 1104 bp, Glycine max
  Clone ID: jC-gmst02400031c09_FLI
gaaatgagatgcaatgcatgctggcgagaagtagaagggcgagccatttccacaacttgtggtcacctattatgcacagatgatgccaataagatactcagcaatgatggagcatgtcctatttgtgatcaagtcctttcaaagagtctcatgaaacccgtggacgtcaatcccaatgatgaatgggtcaatatggccatggcaggggtatctccacagatattgatgaagagtgcatatagaagtgtgatgttctacttggggcaaaaagaactggagatgcagtttaagatgaacaagattgttgctcaatgccggcagaaatgtgagatgatgcaagagaagtttacagaaaaaatagaacaggtacatactgcttaccaaaagatggccaagaagtgccagatgatgcaacaggaaattgagagcttaaccaaggacaatcaagaacttcaggaaaaatttgctgaaaaatccaggcagaagagaaaattggatgaaatgtatgaccagctgaggaatgagtatgactcggtgaagcgatctgccatacagcctgcagacaacttttattccagaaatgagcatgatttgttctcgaacccacctaatataatggatggcagagaaatgggcagaaaagtgggctggtattcactcctgccactccaggaccaagagaggatgtctggccagcaaggcagaatagcaacaactctggtcactttgatctgtccgtcggctcaccagcgaaacaaacagtcattgcaggggatgctggaaacagaagggctggtgctcatcctgtttttggacctggtgctactaataacccatccatgactttgaggaacttaatactgtctccaataaagcggcctcagctctcacgtaaccgcccccaactattcacgttgtaggcacaaaggaggaggctaaccttctataatatcaggaaaaacgaatctaaagtttgcacaaatcagtttgtagtttgcgtgatgtgctaatgatattttagacttccgtttctatttcttacctcaaactcctatagatgaagagctgctaacatgaacaatttatatatcattttagttccct

SEQ ID NO: 13349 - DNA, 1280 bp, Glycine max
  Clone ID: jC-gmst02400032f11_FLI
atctcttcacaaatcaagacaactagcaagaccttaggtgaagataattgcctgggagttaaggtagagggttcgaggctaaggtatgttgatcatcaacagagacaacaacgtgcattacagcttggaatgatccaacacaacgcttggaggccccaaagaggcttgcctgaacgtgctgtctctgtccttcgtgcttggctttttgaacatttcttgcacccctatcctaaggactccgataaggttatgcttgcaaaacaaactgggcttactcggagccaggtatctaactggtttataaatgcccgagttcggctatggaagccaatggtagaagaaatgtacttggaagaggtaaaacaagagccaaacaatagctcccaggataacaacaacacaaaaggatcaaatgaatcaagcaaggagttatggtcagaagctaatgctgctgcacaagaatcaggtgcaatgagatttgatcagattaacattctccaatcaaaggcagaaagcttcaagaacaaccaaaccacttccccaacagagatctccaattccaactcactccaatctggtttccatcttgctgacatgcaaagtccaaacaagccaaaaagcacttctgagatgcatcagaattctccaggtagcattctttcagtggacatggaaatgaagcctcatcatcatggagaaacaaataatatcactagagaaggccagaacaacaacacaacaacaaagtttggcattgaaagccatggtgggggttttggagcatttcccaatatggaagacattggaaggtttcatcatcatgtcacagagcaacttgctcctaggttccatggaaatggtgtttctctcactcttggacttccacacagtactgagaataacctttccctctcaggaacaacccaacatggattcctctcacagaacatgcacttgggaatgagaaacagtgaaaatgatgagttttgtggtgcaatcaacactaccccaccttcttctcactcaggtatcagttatgagagcattgacattcaaaacagaaagaggtttgctgcgcagttgttgcgggatttcgtggcttaaaagaattgataattaactagctagctaggataattaatcaatgaagaacaccccacgaaagaattgaattattttcttctttttctgatgttgcaatatattatatatccacaaaacacaatgcagttcagagtgttacgacacactaacttagcagaagaatagcaacaggaggg

SEQ ID NO: 13350 - DNA, 2107 bp, Glycine max
  Clone ID: jC-gmst02400039a12_FLI
tgttgttgttgttgttgttgttgttgctgctgctgctgcaatgaagggtggtggtgggaagagaaaggcttctacctcggaggctccgaacgatgttgttgttgttgttgctgctgcttctgctccttctgatgatgctgatttgggtgttggagatgtcgggggtgtgaaagttcaaaactttgagggaaacgagggtacccagttgcggaatactgaagaacaggaagaagaaccccaccacgtggagggtgatgaaggaggagaagacgaagaagattatgccgagggagaggaagaatatgaagaagaaaatggtggtgctgttgctgggggacaacaaggttttcctgctcttggtgaaaatttctttgaagttgaagccatacgtcgtaagaggttgcgcaagggtgaggtgcaatacttaatcaaatggaatgggtggcccgagacagccaacacttgggagcctctggaaaatctagagtctgttcctgatgttgttgaagcttttgaggagagcttgaagtccggaaaacatcgtaagcgcaaacgcaagcatgtagtgcatcatactcaacccaagaagcggctggagcgttcgacaactccttacagccttcggcgtttttcaactagtacagctgagaaccatacacagtctgctcctcctcttaatgatcctagccttccagatattcccgccttccctcacactgtgctgttttctgatgatgtgggaaatggtgctgaaggcagcagtcttagaaaagccacacccagtaatgctaacaggtctgcaaatggttcagaacaaaatattaaaaggaatgaggaaaatgattatgatcctgtgcttagtgagcttaaagctatgacttctaatgggaatgatgcagacaggcttgcaatacggattccagaagctaagggttctgggccttctggcagtaatggtcaaatggatgctaaatcaaagggggcttgcatggaaacaagtgaaagtgaccgctgccggggatccaaaaggagaaaatgtggttccgtaaagaggttcaagaaagaactatatgctaatgagcctgctaatgcggaaaatccagttagcatgcctgttggtacagctgagccagaacgaacaagagatgctggtagtggtggcaatactaatcatgccagacctgctagcaatattgtaaacattgtaaagccagtaggctattcagcttcagtagccagtggaatgcaggatgttttagtaacctttgtggcttcaaagtctgatggaacagaagtgatggttgacaacaagtatctaaaagcatttaatccacttcttgtagtaccctataccttcacattattacatttaattattgggtgtattatctttttggtccctcatcttttgaggatttctgtttttagtccttaaatttttttaatctgtttttagtccctcaatttttttcgttctgcttttggtccttgatgtaaattttatcaggaactaaacgaaaatccacaaagatgagggaccaaaaatttcgtaaactccttaattatttcctcaatgcctcattaaaatgttgctatggcctcttttcacctataccctaatatttttcatatgttgcagctgatcaatttctatgagcagcatcttcgctacagccctacattgtgaccaaacagagaatagaaggtgcttttgagtttgtagttaggttcacacgattgtgcttagttagtagttttgttgaagaatgtcttacttttatagatgcagaagatagtaaagggtaagaaatgcattgtttgttagttacacgtaggtatgattttaacaagtggttgtcagtgtggctatatactgactgatgcatgctgatggcataaataactatatatttgaatgcctcaaacacacgaggatagacaatagtttcttaggagttagtcaagaatgaaaaactattttggattattgtaaatttttatggaagttcttggctatttctgagcgatttgtttgcctattataatttgaatactgattggttgattgattgacatgattctaaaggaaaatccacaattaactgtt

SEQ ID NO: 13351 - DNA, 846 bp, Glycine max
  Clone ID: JC-GMST02400039B01_FLI
ctccacagttcaggttgttttgcaggatactggggtcattgctcctgagagccacccggttcatcttcatgggttcaacttctttgttgttggctctggtgtaggaaattatgatcccaaaacggatcaaaataactttaatcttgcggatcctgttgagaggaacacaattggagtgcctactggagggtgggttgctttcagattcagagcagataacccaggagtgtggttcttgcactgccatttcgaggtgcatacaacatgggggttgaagatggcattcttggtggacaatggtaaaggtcctaatgaatcactgctacccccaccaaaagatcttccaaaatgttagacttttcagtcatcgattgaacaacacacagacaagggaaggatacagagaagctaggaaaaacaagagaataaaggggatggtggttatttaataagcaggatgtcccacttgcctttttgagctaatgggagcatttcttcacagtaggttggagtcagcattttggttttctttgaacatacacttttttcttgttaaagcgattcagatcatattcatatgtattgagatcgaccctgcataatttggttatttactgaaataaatctgtcacgtacttcatcgttacatggttgatctttgggtgatttgagaacggtttgcattaccaggatatgatcatgtatcaaaactcaattaaatggtaagcataactgcattaatttttgttagtctaatattaggatagcttgctttatcacatttgaattatttgtaatatactacttttatactatatgtttgttcagttttttttttgtggtgtc

SEQ ID NO: 13352 - DNA, 697 bp, Glycine max
  Clone ID: JC-GMST02400039E04_FLI
cgacgtggaaaaactcaagtccgggttagatttcattggagtaaaccactacaccagtgcctttgccaaagactgcatcttctctgcgtgtgaacaaggacgagggtcttcaaggactgaaggttttactctaagatcgccacaaatgaatggtatcagcattggagaaccgactgcacttgactggttgtatgtccacccacaaggcatggagaagatactgacttacttaaagcacaggtacaacaacataccaatgttcattaccgaaaatggaattgggatgagggagaattccaaccatgccactaaagaaatcatcaatgatgtcgaaagagtggaatacttgcgtggttacttggattccttggcaacagcaataaggaaaggagcagacgtgagagggtactttgtgtggtccttgcttgacaactttgagtggactgatggatactctataaggtttggacttcatcatgtggactatgcaactctcaacagaaccccaagaatgtctgcattttggtacaaaaacttcattgctcttcatgcccctcgtgcaggcacaagacctcagcatactcaagagtgacgaacaatggaatgatatatagtttactttcaaggaagaaaataagcagtcattttctttaatggcatgtttagtttaggaaagaaagtgaaagggaaaaaatag

SEQ ID NO: 13353 - DNA, 1555 bp, Glycine max
  Clone ID: JC-GMST02400042B10_FLI
agcgaatagggaatcaactaattctggtgctgctggtgatggtggagatggttcaagtggtggaggagaaaacagtgcagggaaacaagtggttgaactcagcaccgctcagaggcaagagcttcagatgaagaagtccaagcttgtgaccatgctcgatgaggtagaacaaaggtacagacaatatcaccaccaaatgcaaattgtggtatcgtcatttgagcaggcagcaggttatggggcggcaaaatcttacactgcccttgccctaaagactatctcaaagcaattcaggtgccttaaagatgcaatctctgcacaaatcaaagccacgagcaagacattgggtgaagatgattgtttaggagttaaagtagaagggtcgaggcttaggtttgttgaccaccatctcaggcaacaaagggcacttcagcagctaggaatgattcaacccaatgcatggaggccccaaagaggcttgcctgaacgagctgtttccattcttcgggcttggctttttgagcatttccttcacccttatccaaaggactccgataaagttatgcttgctaaacaaactggacttgctaggagccaggtgtcaaactggtttatcaatgcccgagttcggctttggaagccaatggttgaagaaatgtacttggaagaaatcaaggagcatgaacaaggtaatggctcagaaaacaccaaatcaaaagaatcgagcaaggagttggcttcaacagcaaatgttgcactcgatcatctccaatcaaaacatgaaagcttcaacaaccaaaatacttccccaaccgagatctcaacaagctcttcaatgtctccaatgggagggtcccttcaatcccactctggtttccatcttgcaggatcatctgacatgcaaattaggagtccaaacaaaccaagaagttctgaaatgcaaaactccccaagtagtatcctttcagtggacatggaaatgaagcatagtggtgaccatggaaataatagagatgccaacacaaagtttggtattgaaaggcatcaccaacaaaaagatgggtaccctttgatgactagcaatccaaaccatggtggggggtttggagcattcaccatggaagacattggaagcagatttaatgtcactactgagcaactagcttcaaggttccatggaaacggtgtttctctcacacttggacttccccacaatgagaacctttctatgtcaggaactcaacaacatgggttcctctcacagaatatacacctgggaaggagacttgaaatgggaacaaatggaaatgagttttgtactatcaacactgctccaccttcttctcactcaggaaccacttatgagagcattgatattcaaaacagaaagaggtttgttgctcatcagttattaccagatttcgtggcctaggaagtaagaactgatggctagctagctagctaaaacaatattggataatttatgagagaaatcttagagttctgatgagtgtttctctagacttggctaattaacttcgctagcagcaccaag

SEQ ID NO: 13354 - DNA, 1162 bp, Glycine max
  Clone ID: JC-GMST02400043D01_FLI
ggaaatctgtttccaaggtcatggctgaaaggggttatcatgtttcacctcagcaatgtgaggataaatttaatgaccttaataaaaggtataaaaagcttaatgatatgctagggaggggcacttcttgtcaggttgttgaaaatcctgtgctgttggatgtaatagattttctttctgagaaagaaaaggacgacgttcggaaaatattgagttcaaaacacttgttctatgaagagatgtgttcttatcataatggcaacaggttgcatttaccccatgatcctgcattgcaacgttcactgcagttagctctccgaaatagagatgatcatgatgatgatatgagaaggtcccatcatgatgaagatgatcaagatgtggaaattgatgatcatgatgactttgaagagaattgtgcttctcatggtgatagtagaggaatatatgggccattaggtggatctatgaagaaattgaaacaatgccaaggccaagaagatgctaatacttttggtaactctttaaattgtcaggactacaacaaaagttcatatccccatggacagatgatcccatctgatgtgaatcaaggtttacctgaaggcatgaaagcagcttggttacagaagcaatgggttgaatctcgcacacttcagttagaagaacaaaagctacaaattcaggtcgagatgctggaactagagaaacagagattcaagtggcagaggtttagtaagaaaaaggatcgggagttggagaagctgagtctagaaaatgaaagaatgaagcttgaaaatgaacggatttctttagaactgaagcgaaaggaaatgggcactggctttaaataggtcagcgctcttgcaagctttgtggcaattgcattacatgcatggtgctccatttttcttgtttttgctgtctttggtaagatgtggtttgtttagttgaaactatgggtttttttattggggaactttgcaaatctaactctcactcctgcttgtattgtttaaatttaagagtagtgcataattattaggctctactgaagttttgttgcctatgttcaaagactgggtagctgaaacaccgttaatctttttattttgtaatattaattttctaatattacatattgtctgtcctttcatttttt

SEQ ID NO: 13355 - DNA, 465 bp, Glycine max
  Clone ID: JC-GMST02400044H02_FLI
tgactgttgtgatcaatttggtaatatgggacaagcattcaacatgggtgggtacagtgggtcttctgatttgtatgctaggtgggatcatgtatcagcaatcaactagcaagccgaaggctgcaaaacaggtgagtgcacaggaaaatgaggaggaagaacagaaattacttgagatgcaagtcaattctgagaccaacatcaataataatgaagttaataaaccaagggaggaaagctgaaactattttctataggacacttccatatttcctttcaagtgtatgtttttttattgtatcattttttataactgtcaattcacaattcttaacaatgctatctccttgaatggcaagctcattggcattctggtatgtagggttttatttactttagtggctgtaatgtaaaatctattatttaagtacttgatagataaaatgtcattcaatttggttcttt

SEQ ID NO: 13356 - DNA, 1495 bp, Glycine max
  Clone ID: JC-GMST02400049H07_FLI
cttccgttccttctttctttatcatcaccagtgttccatatttcagagaaaatggctttatcatctccctctctagtgttcaccgtacagaggtgtcaaccggagctggtggctcctgctaaacccactcctcgcgaagttaaacccctctccgacatagatgaccaacagggcttgcgtttccaaattccattcatactattctatggtaatgaaccatcaatggcagggaaagaccctgctaaggtcattagagaggcacttgcgcaaactcttgttttttactacccttttgcgggtaggattagggagggacctggtagaaaattggtggtggattgtactggagagggtgtcatgttcattgaggctgatgcagatgcaacacttgatcaattgggtgacacacttcaacctccattcccatgcttcgaacaactcctttatgatgttccaggctcggagggagttattgactgtcccctaatgctctttcaggtgacacgtttcaagtgtggtggttttgccctagccgttcgcttgaaccacactatgagcgacggagccggcatagcactattcatgaacacattagctgaaatggctcagggagcaactgaaccttccgttccacctgtgtggcgccgggagcttctacaggcaagagatccacctcacatcacatgcaaccatcgtgaatacgagcaaatcccaaacaacatggaagggatcatcccttcatacgagaacaagatggttcttcgatctttcttctttggagcctccgacatagctgccctacgtcgcttggttccccactaccatagaaaatgcaccagtttcgatctcatcacggcatgcttctggcgctgtcgcacaaaagcattggagatagatgcagacgaggatgttcgcatgatggtcatagtcaacgcacgtgctaggtttaatcctccattacctgctggttactacggcaatgcctttgcataccccgcggcagttaccaccgcagggaagctttgtgaaaatccatttgggtatgcagtggagttaataaataaactgaaaggtgaggtgacagaagaatacatgcattctgtggcagatctaatggtgactaatggaagatgcttgtttaccaccgtgagatcttttattgtgtcagatttgagacattttggtttcaaacaaattgattttgggtggggtagggcattatatggtggagtggccaaaggtggggctggaccctttcctgcagtattctatctgatggcacataagaatgcaaaaggagaagaaggcatattattaccaatttggttgcccgccaaagctatggacaagtttgcaaacgagttagatcacatgctaattgggaaccaaaaccaacctacggatccacatccaattttttacgcgtctaccttggaaaatattaagtggacacccaaaaagttgattggcacccagtgagagagatacaagagag

SEQ ID NO: 13357 - DNA, 1211 bp, Glycine max
  Clone ID: JC-GMST02400050C01_FLI
tgagcttgttcgcaatggcagtgttgagtcccatctgcatggtgacgacaagataaagggaatgctagattgggaagcaaggatgaagattgccctaggagctgcaagaggactggcctatcttcacgaggattccaatccccgtgttattcaccgtgacttcaaagctagcaatgtgttactagaagatgactttactcccaaagtttctgattttggcttggcaagagaagcaactgaaggaagtaatcatatttcaacgcgggtgatgggaacttttgggtatgttgccccagaatatgcgatgacaggccatttactcgtcaaaagtgatgtttatagttatggtgttgtgctgcttgaacttctcacaggcagaaagccagtggatatgtctcaacctcagggacaggagaatcttgtaacttgggcgcggccaatgttgacgagtagagaaggtgtagaacagctggtggatccatctttggctggaagttacaactttgatgacatggcaaaggttgctgctatcgcttcaatgtgtgttcactcagaggttacacagagaccttttatgggtgaagttgtgcaggctctcaagttaatatacaacgatacagatgagacttgtggagattattgtagtcagaaggattcctctgctcaggaatctgattttagaggtgaccttgccccttctgatagcagttggtggaatgcgggagggctaacccctcgaataacttacgggcaagcttcttccttcatcactatggaatacagttccggtccacttgaagaaatggagaacagacccttttcaacttcaagcttgattggggatgaaatatctttaccgattaggcatgggaatagatcagggcccttaagaacagtccgaaacaagctgtccttatatagatttacaggaagtcggagtgagcatggaggaccttcttccaagcccaattggaacgatggttactgggtttaagaggtttgggcctttttttttagtgtttttgaaatgtacagtttctaaagggatcagaactaatgattgagtgactgatttagcttaggcatctcaaatttctgcagttttcatgttatggttggagagatacaggacgttgacaaattttgaaatattgattcattatacaaggaggaagtgtaacttaaacagtattgtaaatgccttgaattgt

SEQ ID NO: 13358 - DNA, 1151 bp, Glycine max
  Clone ID: jC-gmst02400050e06_FLI
aacgaggaaaaaaaaaatatggaaaagaaacaagattaagaattggggtttgaagaagccggtggtgtctccttgcttgttctcgatcgatcttgttattgtaaaatataataacttttttatatcgtgatcaagatgcgccgagggagagccaccgccgccgtcgtggatccgacggcggagcaggcgaaggagacgcggttccgcggcgtcaggaagcggccgtgggggcgattcgcggcggagattcgagatccgtggaagaagcagcgcgtgtggctggggacgttcgattccgccgaggatgccgcgcgggcttacgacaaggctgcccgatccttccgcgggcccaaggccaagaccaatttcccctccttccccggcccgacggaccaccactcctcgcagcagattccgccgctctaccaggcccacgggctttccaccaagttcgagcccgcccaggtgaaccggcccaccaccagcggcatgagcagcaccgtggagtccttcagcgggcctagggttcccccctcctcctcctcctctcgcaagccccttgtggttgttaaccctatcatccctctcgacgacgacgacgacgactgccacagcgattgcgactcttcttcctccgtcgtcgacgaccaggactgcgtcctcacctcctccttccggcaaccgcttcccttcgatctaaacctcccgccgcccgatgccgcctacgacgacgacgacgacgacgtccccgccaccgcgctgtgcctctgatgaagaagagcctcttctcggtataatcataattttcttcttgttgttgttgttgttgttgttgactatctctggtttaattaattgaagttgttagattgtgttatggtgttgtagagtaatattataatataggcatggagatggatggatggatggatggaaggttgtgttgttgtaagttatttggatccatagcattggacctcatctggaaaactggttgctgcttctgctttcttcatggatctgcttcttacccttacccttaccccccaattagaacttactctctttttcttacttttctgtacaaaaattatggcaatcagatcatagaataaattacattctaatcaattactctttccctgcttgct

SEQ ID NO: 13359 - DNA, 1637 bp, Glycine max
  Clone ID: JC-GMST02400050H08_FLI
caacaatgtcttgaactcacaatacctcaaggcagcacaggagttgcttgatgaaatagtaaatgtccgaaaggctttgaagcaaactggtttggaaaagcaacagagtttccgtgatattggtttagatggctccaaagattcagatggaaaatctaccagccaatccgtgcagatatcttcaggccccaatggttctgctgcaaactcttcatgtgagctatcacctgcagaacggcagaatttgttggacaagaagacaaagcttttgtcaatgctggatgaggtggataaaagatacagacagtactgccaccaaatgcagattgtggtgtcatcttttgatatggttgctggatgtggagcagctgaaccatacactgcacttgccttgcgcacaatatcgcgccactttcggtgtttgcgcgatgccattagcggccaaattcaagtgactcaaaggaacctcggagaacaagagggaatacctcgtctccgctatgttgatcagcagcttcggcaacaaaaggcccttcagcaacttggtgtaatgagacaagcttggaggcctcagaggggacttcctgaaacctctgtttcagtactccgtgcatggctctttgagcatttccttcatccttatcctaaggattcagagaaaattatgctagcaaggcaaactggcttaacaagaaaccaggtggcaaactggttcattaatgcaagggtgcgtctatggaagccaatggttgaggaaatgtacaaagaagaatttggtgattctgagatgagcagcaatctattatcatcagagaaaacactcaaagctccaagagatgatgttcaagcttctgacaataaaagggaagagtcccaggacaacttaataaacgttgatgatagtgttcagcatcatgggttgaagttagatcatgcctcggaattggacagagggatccaaagcagtgatcatggagaaaatgccatggatcctagaattggaaaattgcaaggtgaccaaaggttcaacatgaacaacagcaataacaatagtccttattatggtgatggctgcataatggcttctactcctgccacatatgatttaccagagttaggtaacattgccgtcgatggccacgtgtcgcttgcattggaattgaggaactgtgaaagtcaaggatttggtgtgtcaaatgatgacatgcataaacgacataagaaaacattggcttcttccccagagactgatttgctagattaccatttcacagacccaggaaagcaacaaaacaagtttggcaatcctcacctattgcacgagtttgttgtgtgaagaagggttggagaaaattctaaagttttcaagggaactaaggaaatgtgtaccaccaaagtagtagatagatagacaaaagcctatgttgttgttgttaacttggttgctcattcttgttgtccacagatcataaaaagcgatgtaaatcatgaaccgtacaaaaaatatacacgtaggtatgtgtagatatattctcttgtaatatcgtggatggatgattggttgtatcatgtgcaggcaatttttgtaaggacaaggaacttatcttgtgcatcatgatgtataagggaatcttgtc

SEQ ID NO: 13360 - DNA, 1999 bp, Glycine max
  Clone ID: jC-gmst02400051b01_FLI
gctaagcgaagatggtgtttgtcagggactcctatccagaatgcaattgatgatctctacagttacttcagatttctaagatatgacccttattctgaccatgcatcattttgtactagaattaagaacccaattagcagaaatccagcaaacgggtatagaaagttgcaagctgtcttgaagacaataatgttacgccgaacgaaaggtacacttcttgacggggaacctattatttccttgccgcctaagtatatagagctgaaaaaagttgatttttcaatggaggaacgtgatttctattccaaactagaggctgattcacgtgcacagtttcaggaatatgctgatgctggaactgtcaagcaaaattatgtcaacattttgctgatgcttctgcgccttagacaagcttgtgatcaccctctgcttgtcaagcgatacaattcaaactctctatggagatcttcggttgagatggcaaagaagcttcctcaggaaaaacaaatctctcttctgaaatgtttagaggtttccttggccctctgtagcatttgtaatgatcctcctgaagatgcagttgtctcagtttgtggccatgttttctgtaaccaatgcatctgtgaacatctttctggtgatgacaatcagtgccctgctgcaaattgcaaaagtcaactgagcacatctatggtattttcaaaagccacactgaacagttgtctttctgaccagggttgtgataattcacccagttgctctggtcctgaagccgaagaagctgaaccttggtccgaaagtaagccatatgattcttcaaaaataaaggctgcacttgaggttttgaagtcattgtgtaagccacagtgctacacatcaaaaagtacttctgagcatagcactttcagggaagataaaaattgccttgggaacccctccattgctaagaatgggaaatccttaaaagattctcctgagagtcaaaatttgtctgatgagaatagaagctctaatgcttcagttactgttgtaggggagaaagctatagtgttttctcagtggacgaggatgctagatttgcttgaagcgtgtctcaagaattcttcaattaattatagaaggcttgatggaacaatgtcagttgttgcaagagataaagctgttaaagattttaacaattgtcccgaggtaactgttataattatgtctttgaaagctgccagtcttggtctcaacttggtagtagcatgccatgttcttatgttagatttatggtggaatcctacaactgaagaccaagcaatagatagagcacatcgaattggccagactcgtcctgtgactgttttgcggttaactgtgagagatacagttgaagatcgtattctagctctgcagcaaaagaagagaatgatggttgcatctgcatttggggaggatggaactggtgatcgtcagactcgcctcactgtggatgatttaaaatatttgttcatgatgtgattagacgtacatatttacagatataatctacattttttggattggtgattttttgacctgggggcagatgtcatcttgagtttctttccggtgactgctgacgaaacagaaacagaacatttctagcaagggattggaagtggtaacaaggttgctattgacttttgacattaagattatatgaagaaatgtttatatgtttagaatgagatgttcattctttgacatggaaattttagtttaatctcacatctttgtaggatgtagagagcagtagcatatatagcaacacacagaagatttttatggattgttcttttcactgtaaataatagaaatttttgctttaccgttttgttcctttttatttctccatttcgtgttcagtttttaagtgcaatgtcaccgcaggtgaaaatcgatatccatgtataccttgagattatctcgaactgaacaattgtgaatgtttttgtaaagctgcattttgtcgaat

SEQ ID NO: 13361 - DNA, 141 bp, Glycine max
  Clone ID: JC-GMST02400051B09_FLI
tgatctttgacttgcaatttttggtgttgagcttagagattgatgaagttctgtattttttgtcattcagtgttgggactgacaattccattaaggacagtttcggagcatgagaagggaaataagatgagatatactatc

SEQ ID NO: 13362 - DNA, 1862 bp, Glycine max
  Clone ID: jC-gmst02400051g07_FLI
attgacgctgacatgaacaatagagggaaggggcgtctgaagtatctcttgcagcagactgagctgtttgctcattttgcaaaaggggatcaatcttcgtctcagaagaagtcaaggggaaggggtcgccatgcatccaatttcaccgaggaagaagaagatgaagaatacctaaaaggagaagaagatggtctagcaaacacacgtctggtgacacaaccatcatgtatccaagggaaaatgagggattaccagctggctggactaaactggctcatacgattgtatgagaatggaataaatggaattctggctgatgaaatggggcttggtaaaacattgcaaactatatccttattaggttatttgcacgagttccgaggaatcaaaggtcctcatatggtggttgctccaaaatctactcttggaaattggatgaatgagattcggcgcttttgtcctgttcttcgtgcaatcaagtttcttggcaaccccgatgaaaggagacatatcagagatgaattgttggttgccgggaagtttgatgtttgtgtcacaagttttgaaatggcaatcaaggagaagtctgctttgcgtcgatttagttggcgctacataattattgatgaagctcatcgaatcaagaatgagaattccttgctgtccaaaacaatgaggctctacagtacaaactaccgtctccttattactggcacgccacttcagaataaccttcatgaactctggtctcttctcaactttcttctgcccgaaatttttagttctgctgaaacttttgatgaatggtttcaaatctctggtgaaaatgatcaacaggaggttgttcaacaattacacaaggtcctccgaccatttctccttcgaaggttgaagtcagatgttgagaaaggattgccaccaaaaaaggaaactattcttaaagtaggcatgtcccaaatgcagaaacagtattatagagccctacttcagaaggatcttgaggttgtaaacgctggtggtgaacggaagcgcctcctgaacatagctatgcaactccgcaaatgttgtaatcatccatatcttttccaaggtgctgaacctggtcctcccttcactacaggagatcatcttattgaaaacgctggtaaaatggttcttttggataagttacttcctaaattgaaagagcgcgattctagggtccttatattttcacagatgactaggctgctagacatactcgaagattatttaatgtttcgtggatatcaatattgtcgcattgatggaaatactggtggggatgatcgagatgcttccattgatgctttcaacaaaccaggaagtgagaaatttgtcttcttgttatcaactcgtgctggaggtcttggtattaatcttgctactgctgatgttgtcattctgtacgatagtgactggaacccacaagttgacttgcaggctcaggatcgtgctcataggattggtcaaaagaaagaagttcaagttttccgattttgtactgagtatacaatagaagagaaagtcattgaaagggcctacaaaaagcttgcacttgatgctctggtgattcagcaagggcgattggctgagcagaagacggtaaataaagatgaattgcttcaaatggttagatttggggctgaaatggttttcagttccaaggatagtacaattacagatgaagatattgatagaattattgctaaaggagaggaggcaactgctgagctagatgccaagatgaagaaatttactgaagatgccatcaaatttaagatggatgacactgccgagttatatgattttgatgatgagaaggatgaaagcagatttgatat

SEQ ID NO: 13363 - DNA, 1210 bp, Glycine max
  Clone ID: jC-gmst02400052h08_FLI
gatcaaggtgaagtgctatgctacatggtgcggctggcgattcagcggttccgttccctcttcagacaccaccactgaggagtttctcaatgagaaccaagttgaccaccccgtgtggctcattgccactgtggggttgcaagaatcgatcatcaactccatcacggtttgcaagtacaagaagaatgaagggttggttgaaggaaccgagtgttcggtgtgtttgaacgagtttcaagaagaggagacattacgactcttgccaaagtgcaaccatgcttttcacgttccttgtattgacacttggttgagatcacacacaaattgccctctttgtcgtgccggtattgtttctaatagtgtcaattctgaagcaccagcacccgtgtcgaattcggagcaagaaaatgcaaatttggggaggaatcaagatacccttttggacaattcacggattaatgaaggtgggttaagcagcaacatggttgctggggaatcaagtgaagcaatagatgaatcaaattctaaggatcgggtaaatgatgaaactcagaacaatggggttctgatgaatattgagattcaaacagagatggggtctgtttcaactacagaatgtgaaagtcatcgtgttgttgatgatcataaacatgatgatgacacaatgttgcacacggataatctagggaagcaagatcaagatggtgattactactactcaaaaacgtgtaaaacagtgcgtcgttcctctattgaagagtgtttgcatttaagcccagtatctatgaaaaggtcattctcctcttgcaatggaaggactctaacttcgagaggttacatgagtctaaactctaaactcaattcatccctactagagttctcattttatgaaagatgaacatattgatgagtaacatgatgatttgatgtccattttactctcagaattttgagggcaccctaggttggagtttgaacattgacaatggtataaacagcaaattgtgaaagagaaaagaggtcaattttaatgaagaataaaatgtaaaattgtaattgaagttttaccaagtgctcgggcattgaaaataactctggtgtatcatgtatgcaattgtatcacacatcacaatgcccagtgttgcactgcagaacaggtttgctcccacaaaagggaataaggtacattaaatgctctattttttgcttc

SEQ ID NO: 13364 - DNA, 907 bp, Glycine max
  Clone ID: JC-GMST02400054H07_FLI
cacacactcatctccacttcccacattttaatattcacacaccaccttattgttccaaagcttcaatatgggggatttcatcttctccttcaagacccaaccacaagaccatgctcaccaccaaagagcaaagcacaacaacaacaacaacaagaggctaaccgaggaccaggtcgcgattctcgagaagtgcttcgcctccaacatgaagctcgagccggagcagaagttccaccttgcaaaccaacttggtgtgcctccaagacaagttgcaatttggtatcaaaacaaaagggcacgctggaagacccagagcctcgaggtggaccatggtgtgcttcaggcaaggctagagaatgtagtggctgaaaagaagcagctagagaaagatgttgaaaggctcaaagctgagctgaagaaggctcaagagatgttgttaatcagcaataatgtcaaaagtggagaccatagtaacaataataataataatgcttcttgtgaattttcaacttcttttgaagaaggagggagttctggggtggtgcttgatgatgccactcatcatcatcatcatgagtgttggcaaagtggtagtgaggttatgcaggttgaggagctctttacttacttcatgggtgcaaattatgggtcaggcttgcatgagaaaagggcataaaatataaccaacttttgctagtgtgtacattttttttgttatgtccttcagcagcagggtccaaaaattaggatttgttaattttcaattttgtgtcaagaaatatattgtataaatccatttccatgagtcacggtgatgagacaatggagactggagagtgccctttacttggaaaaaaaactacaattgatgaatgagcaatttgatgaccctgcattgcattttggt

SEQ ID NO: 13365 - DNA, 285 bp, Glycine max
  Clone ID: JC-GMST02400055G07_FLI
gagagatcgccggagtgagagcttggctaaacggagatccaaactttccagtgctgcaaaaccaactgcctcagcataggttgctttctggtagagatatggcgaagtttaaacttcaccctagtttttggtagtcttgtttgagggtgattatgataaacatttatggtttttcactttaaatacatttgagttcatttaagtattttgcaaatttttgagagttcaatcgaatcgaattgatgtgttgttggcttctataaagttgcataatacttttcattt

SEQ ID NO: 13366 - DNA, 426 bp, Glycine max
  Clone ID: JC-GMST02400056A10_FLI
cagcatttgatcaaggcaatacaaggccacttagggaacaagaatataaaagaaggaaaaagaagaagacgacatagcaaagcctagaaacatgggtcaccattcttgctgcaaccaacagaaggttaaaagaggactttggtctcctgaggaagatgaaaagctcatcagatacattactactcatggatatggctgttggagtgaagttccagaaaaagctgggcttcaaaggtgtggcaagagttgtcgcttgagatggattaattatttaagacccgatattagaagagggaggtttacacctgaggaggagaagttaattataagccttcacggggtcgtaggaaacagatgggctcacattgcaagccacttgccaggtcgaactgacaatgaaataaagaactattggaactcatggat

SEQ ID NO: 13367 - DNA, 1303 bp, Glycine max
  Clone ID: JC-GMST02400057A09_FLI
aataattgtaggaattgtagtaattggaggacttctggttctactcgttgtgtgcatcattaggaagtccaaagcagaaagatcacctcataaaatggacaaatctgttgctaataaatattctaccagtgtatctcctagaccaattggtacaagacatattcctcaggcaatgaagcaagctgcagttggactgccaccataccgtatcttcacatcagaggaaattgaagatgcaactaacaactttgacccatcaaatttaatagaagagggatcacagggacagctatataaaggttggctcagagatggttcagtggtccttgttaattgtgtaaaaataaagcagaaaggtttgccccacagcatcatgcagcaagtagaggtattacacaatttgaggcacaggcatatggtgagtgttctaggacactgtgtcattactgaacaggagcatccacaaacaacaagcacagtcttcattgtgtttgagtacatctcaaatgtgtcattgagggatcaactttcagatgggaggaagagggaaatgctgaaatggccacaaagaatggcaatgagcataggcattgcaagaggagttcaattcttacacacaggagttgctcctggaatatatggcaacaacttaaagattgagaacattctgttggatgatagtctcaatgcaaaagtcagtagatacaacattccattaccatccaagagtgcacataatgaacaaaatgccaccaatcacattagcagcacaaacaatacagaaaaggaagatatctatcagttgggtgttattctacttgaagttattactggaaaacaaattacatcctcgagtgaaatagaggagctgaaggaagagctggagaatggttcaccagaagcaacatcagtaatcagaagtgccattgaccctacactgaggggaacttatgcatatgaatcaatgaagactgcagttcagatcaccataaactgtctctccaaggtttctagccagcgcccttcaatagaggatgttctttggaatttgcagtatgcaatgcaagttcaagagtcctggaccagcagtggaaacctcagcacaaaattgtaaaccacacttgtcaataaaaaaaatgcttgcttatatttccatatgttcattatcataatgaataaaatgttgatgtacatatgtaatttctttcataaggccccaaaacacaatttggttcgcatttttccatatcattattgttattaaggttttataatatttgaattaggttcctatcaaagtatc

SEQ ID NO: 13368 - DNA, 1161 bp, Glycine max
  Clone ID: JC-GMST02400057E02_FLI
cgacgccgtctacggcctcttccagtgccgcggcgacctcaccaacgaccagtgctctcgctgcgtgtcgcgtgcggttacccagcttggcaccctctgcttcgcctcctgtggcggcgcgttgcaggtcgacggctgtttcgtcaagtatgacaatgccaccttcatcggagtcgaggacaagacattggtcaccaagaaatgtgggccgtccgttgggttgacctccgacgcgttgacccggagggacgctgtgctggcgtatttgcagacgtccgatggggtttataagacgttcaggacgagcgggtatggggatttccagggtgtggcgcagtgcaccggggatttgagtcccagcgagtgccaggattgtctttctgatgccatccaacggttgaaaaccgagtgcgggcccactaactgggccgatatttacttggctaagtgctacgcgcgctactccgaaggtgggactcgctcgcgtggtaataataatgatgatagcaatcacaatgatgatgagatcgagaagacactcgctatactaattggactcattgcgggggttgctctaatcatcgttttcctttccttcttgtccaaggtctgcgaaaagcacaaaggtggtaaataaagaatataatatgttcacagtactgagattgaacttttgcttttgcttgtctttcggtagctcttttgctacttagtccctcagtctcaaatgtcctttttgtaatcaatcgatcttattcttatcttttaagtttcctgcatagtcccctttatataaagaacaccagcgaaggtatagatagaaagatgttatggaaaaaaaagttgttccatgaaacaagttacaaaaggccaagggttgcaataaggagaaaagctcaaagattccactctctaatgaccattcgttttcttgtctagtgtccatcgatgtgtagaaatactgaacactttagtgaaaagtgcagcatgcatgctttgtgatagcctttgatggttataattagttagagtttttacttactttttatattaaatcacgatgaacaactttactttcgatctgaaaaagtgagattaagaaaagtttgataaaatttctgtcaaatcggtgtcccagtttgttatcatttgggacttatg

SEQ ID NO: 13369 - DNA, 876 bp, Glycine max
  Clone ID: JC-GMST02400057G10_FLI
gacttagtgaagtgggtgaggaaaggattcgatcaagaaagcccgttatctgaaatggttgatccatcgctgctccaagaagtgcgtgttaagaaagaggtgctggctgtgtttcatgtagcactgtcttgtactgagggagaccccgaggctaggcctaggatgaaaactgtctctgaaaatcttgataagattggaacgtaatgctcgaacatgtgcagtgtgctagctctaggactcagcctgagactgcagtttacacaaaagatgcatttcaatctaacaacgcatttctgtgataacactgagaaggttttatgatgtgcatcaatatggtgctgcaaacctgatccttccatcttggataagcccctttacatttgttttggaactcgagcaatttttggagagctgtaattatcatggtctcacttacattccattctcattttattattttttgttacatatcaggaaattgttagatattttatttttttgttctgatctcttttcctccaaaatgttattgcaataccacaacgccttgcattatcatttaagtttccaaattaattcaggttggtgttgtgcatgtgccattggtacctgtagccgtttggggtttgggaaagggattatttgggttggaatttgttaggagtgaactagtaaaaatgaacgcaaacttgaagaagttgaatagagagagggaaaagggacctcggaaactcagcatggggattatagaaagttttaaagaataagtctgatgtattttatatatataaggatcctataattcctcatctattaaaggaatgacagctgcacaaattacctcagttgtaataaagcctacattacagctaacat

SEQ ID NO: 13370 - DNA, 884 bp, Glycine max
  Clone ID: JC-GMST02400057H07_FLI
gttgagtgcgtctccgttggggaagatggcaaggtcaacttggttggtatcggggattccaatttgaattaccggaggttgtttgatagcgccgggttggtttcatacaccgcagtgaggtgggcgtcgccgatggagttcgccaccggtgggttcggcttcggtcttcagtggtgggaccaacgtaaaccgggaggaccggtttcccagtttaagggtaactgggataagaaattgacatctgggattgtgcactctattgacattcatccctcgcgcaagcacacttgcctggctggtggttccttaggtacggtttttgcctgggatcttaggtggcagcaacaaccaattatactttcaggtgctggagctgccaacactgcggttcagtccatatctgaaagtgaggtttgggaggttcagtatgatcgttgcataaaatcaaacacttcatctacccggatcttaccttccatgatatgctcagaggatggaattctcggtgtgattgagcaaggtgaggaacctattgagctgctggctgaaccttgtgccatcaatagctttgatattgatcgacataatccatctgatgtgatatgtagtttaaaatgggaagcagtagccatattgacaagacaataacattcaggatttttactttttggtggcttgaatttccgaaaggatatagcttgtaactgatagaaggagtggaggttttaacggacaatttgtgtttgatgtactccgcaatgttctattccttttctaaagtcatttgcatgcaaatggattttgggatggtacaatatgtagcatgcgtataattgactttaaagaggcacattggatcaatactactatcatccgtttttcct

SEQ ID NO: 13371 - DNA, 1680 bp, Glycine max
  Clone ID: jC-gmst02400060f04_FLI
attgaatggcaatgtacaaatattttcatatcgtttgatcatatatgattttattttgtgattaagtaaaattcatgtaagatttattatcaaatattaaagaatattgaaaacaatatattaaataacaaaaatcctctttggtacgagttttttttacacaaattacgcttgaaaattttttcttgttgcaaatttgaagaaacagaaaagtaaattaacttagtcccatgcagtgtgtacaggagctcacatttgatagacaaatgccgtagttcactagagcttttctttgccatatggttcgtgatgggcaatgtatgggcctttgactcacgttttgggtccttcccacaagctccaaaactccaagtgctctgcatcatcttgctttcttggaatgcaatatgctactctttccctttcctactgtttttgcttttgtgttgttgtgtgccactaatgagcaccctccttggatacaacatgagcatggggtcctctgctagaggggcatctgaagatcaaatctcacaactcccaagttggagatataaaggggttcacaccaacttggaccttggcaatgactctcaaagcagtgaaagattgatcaatgaagatccagtaagtgaaataactatcatacacaaaattagtaacatttagattttgctattaatatgcatattctctaacacactttaacattggttaaaatttgttgaaaattataaaattatgagtgtgacacattaaataagtatgacatacaaacttttacgatatttaataaattttaactaacaataaaaagagtatgttaaaagaagaaattatttgtagtcggaaaccattatgtctatgatctacaagcaatcctcgtgtgatacatagtcaaatgttttaatttaggggaaaaagttaataaaattatacatattacataaaaattgattggaaatatgaacacataataatctcaagtcatgtaataatttttcactaaaagaaatgtgttactaatatttctcctatgtgtatatatggagcatgtgtaggtgagaacatgttgtcaataaaggaactaatctggggtataaatgatcaagatttgatttatgtttttttctctctcacttttcaccatatatacctcatatatatgtgtgcatgtttgttttcatatataattattttttattgaattgatccgtttgtgttgttgggtgaattaacaggaatgctgcatttgcttggccaaatacaaagacaaagaagaagttaggcaattaccctgttcccatttgttccacctaaaatgtgtggatcaatggttaagaattatatcatgctgccctctttgcaaacaaggattacaaaggtagcaataggacgaggcagaaaatacacaagaacattcccaatcttatatatattcccaattattttgttttttccccttttggttacacgagtgagtttgtacatgtacagaagaggtcaccagtaaccaaaactacattgaatacttgttcttaggagtgaaccaatccccttacttttcaaattagtccactgtttttacaagtttttcctcccctaccctgtcatttaaatattgcaaggtgagcatatagttgtactgaataatgaagtaaatatttatatttgctcctt

SEQ ID NO: 13372 - DNA, 1847 bp, Glycine max
  Clone ID: JC-GMST02400060G08_FLI
cacactgataggtcctataatacaatagcactgatacaatgaagaatataattgcacctgtgcaaagtgctatgccatctccaacttttctgtggaggttcaaggtgacactctttctgatatggggctttacttgctgcaagattggttgggattctgtcatgagaatggatgcaaatctgcgagatctgtttttatatgaagtgtttttgtattacaatcctcttcttcttgtgactatgatggtttggctttggggagtaaatttgtgggtatttctgcaatccactgtaagctatgccaaggtttttgatcttgatcaaaaccaccttactcacaaagagatatggaagtgtagcacttggatgacaatcattgtccctactagcatgactgcttacctctatctctattctcatggggaagtatctttggctgcatctcaaccagtgcttctctacattcttgttgcagtaattttgatctttccctttgatattttctatttgtcttctcgttacttctttttgaggacattatttcggatagctttcccttttcagccaattacatttcccgactttttcttggctgatattttaacctccatggcaaaggtgttttcagatttggaacgttcagtttgcagaatggtaaacagacaggtcgcgacaattgcttggcttgaagctgattcagtttgtggtagtcactcagttgcaataccaatagcccttgttcttccttatatatggcgtttattccaatgtcttcgccagtacagagataccaaagaaaaaaattgtctcttcaatgctttaaaatattcaactgcagtcccagtaatttttctttctgccctcaagtaccatgtcctccatgagaaatggacaactctttatcggccactgtggcttctctcaagtgtcattaattccctatattcgttttactgggatataaccagagattgggatttaagtggcttttcccgcatattcaagttcaacaaatcaaatccaatctccaacctgttatacggtcgacaatgggtatacttttgggtgattggaagcaactttgttctgcgctgctcttggacatacaaattatctgcccatctccgccataactacctgacagtgtttactatcactcttttggagatgtttcgacgcttccagtgggtattttttagagttgaaaatgagtggaataagatcacgcggtctggtgttcaactcacagaaattccaagagaggaggagaaattgctaggttccaacattcacgatgtatagagaatctcaagccaaccaaattttgccaatatcttcgtatcagcaacaggtctaattcaatttttaagctaatattagttctaatcccaaaagcatttttcttcacgtgttcctggccaaccaacatgagggagttttcttgcacatgcatggatggatgtctgagacttagagatagttgattccgttgctgaagctgcctcggctcagtcattcctttcttaagttgtatcttcatgcactatatgctttattctggaatgggaaggggttctgtcagtctcagcagttcaatgaaaatgaggaagcaagcctacaattgcacgcacatgttcacttatacatgaagagctgcaagaactagaacttaagaacaatggtggccataatggatgttgcattcttcttcttttttgtctccctttttgtttgtgattctttagattagcatttgtaacaagagaatggacacaaagggtttgtttgcttgctacacaaagagtcaaatcgggatacacttctaataaaaggaaaaaaggttgaatc

SEQ ID NO: 13373 - DNA, 551 bp, Glycine max
  Clone ID: jC-gmst02400060g12_FLI
cagagagcttggattgcagccaaggcaagttgctatatggtttcagaacaagagggctaggtggaagtcaaagcaacttgagagagactatggcatactccaatccaattacaacagtttggcttcccgttttgaagctcttaagaaggaaaatcaaacattactaattcagctgcagaagctgaatcatctaatgcagaagccaatggagccaggtcagagatgcacacaagttgaagcagcaaacagcatggacagtgaatcagaaaatggaggcaccatgaaatgtgaagctgagggaaagccaagcccatcaatggaaatatcagaacatttacttggtgttctgtctgatgatgacacaagcataaaggtggaagactttggcctagaagatgaacatggccttctgaattttgctaagcatgttgatggttccttgacttcaccagaagattggaatgcttttgaatccaatgatctattaggccaatcaaccactgatgattaccaatggtgggacttctggtcctgaatgaaacagagcaacc

SEQ ID NO: 13374 - DNA, 913 bp, Glycine max
  Clone ID: JC-GMST02400061C10_FLI
aaaatcttagtcttcttagtttcctcactcacacaaatggcaaagctaatccatttcctccttttccttttcatccaaacaatttcagcccaaacaccagcagcaccagcgggccccaccaacatcacccaagttctagagaaagcaggacaattcacaaccttcattaaactcctcaaagcttcacaaatagctgatagaatcaattcacagctgaacaactcaaaccaaggcctaaccgtgtttgcacccactgataatgcattctcaagcctcaaagcaggaacattaaactccataaactcacaagaccaaatgcagctgatacaattccacattctccccactctctacaccatctcacagttccaaaccgcaagtaaccccttgcacacgcaagctggaaacagtgatgatggagagtatcctttaaatgtgaccacctcagggaaccaagtgaatgtaacaactggggtggttgatacaacagtgtccaatactatctacagtgatactcagctctcagtgtatcaggtggataaggtgcttcttcctatgaagcttttcggcgcgacggcaccggctgctgcaccggcggaggctcctgcgccatccaagccggagaaaaatgtccgggcaggggctgctgatgcttcatctgggtcatcgggttcatcggttgatgcttcgaatgcagtgagtttgaatagaaagacagttaaaggttttatcatgaccgtggcaatcattgtttcttgtttgtggatgtaagtcttaaaatggcaacttttgccctgtattttgttcttttttttttttttttcttttcttccgagttaagtttgaattgattgatgatggagatctcgtgtacttttctgtcgctaccaagttaaaattttgggttccaagt

SEQ ID NO: 13375 - DNA, 877 bp, Glycine max
  Clone ID: JC-GMST02400061E01_FLI
attttgtggcagcagcaagcatatttgagcctgaaaagtctcgtgtgagactagcgtgggcacaaaccagtatcttacttgagaccataacatcctatgttagtgatgcagaaatgaggaaagctttcatgaaaaaattcagtgactgtcttaacaggcgagactactccattggctggaggttgaacaggaacagaacaggacatggactcgctgagactttggttgccaccatagatcaaatctcgtgggatatactcgtgtctcacggtcatgaaattggatatgacatgcatcgcaattgggaaaagtggctttcgagttggcatcgggaaggagacaaatgtaaaggacaagccgagcttttggcgcagacaataaacctatgtggcgggcattggatttccgaggatcaagtgtcggatccactgtatcagagtctccttcaactcactaacaatctctgcaataaacttcgttgccaccaaaaggacaaggaacttgagagcagcaacagcggcacgaatgtaaacagcatgatcacccaagaagaagagtcaaaaatgcaagaactcgtgcaattggtgcaccaaaaatctccaactggcattgatttcaatatcaagaatactttcctcacagtggccaagagtttttactatacagctttttgtgattcaaggaccgtcaacttccatattgccaaagttctgtttgatgaagtcgtttaaatcatattgtatttcttgaatagattttagactccaacttatcattgtgaatattttccgcctgcaatgataaaaaaaaatcagttgttgcggctccatgtatatatgaaacattcactagttttattaatggttaatcttccttg

SEQ ID NO: 13376 - DNA, 1831 bp, Glycine max
  Clone ID: JC-GMST02400061G07_FLI
gatgattcctccacgttgaagaagccgcgagttgtttggtctgttgagcttcatcaacagtttatggctgttgtgaatcaacttggaattgataaggctgttcctaaaaagattttggaattgatgaatgttcctgggcttactagagaaaatgttgctagccatcttcagaaataccgtttgtatcttagaaggctgagtggagtttcacagcagcagggtaacttgagcaactccttcatgagctcacaagaagcaacatttgggggaacctcaatcaatggaattgatcttcaaaccctttcagctgctggccagttcccatcacaaagtctagccaagtttcaagctgctggacttggcaggacaactgccaaagcaggtatgcctatgtctctatccgatcaaaagaaccttttcagttttgagaacccaagattaagatttggagaagggtcactacaacatttaagcaacagtaagccaataaacttgcttcatggaattcttaccaacatggagccaaagcaacttgccaatttgcaccaatctacccaaccccttggtagcttgaatatgcgagtcaattctcctgccacgcagaacaaacccttgctgatgcagatgactcagtctcaaccaagaggtcagttgctaagtgaaaatgccagttctcatgtaaccaggtatccgtcatctttggtgcagcctacagtaccaaatggtatttctagtggtgttttgggaaatgcaattgctggaaccagcaacataactactacttataaccctgttcaacaaaactcttcattgttgagttttcccatgaaccaaaccaatgaaatgtctgccagtaatttccatcttagaagcactccaggtataactagtatcccaaataaaggtatgtttcatgaagaaggtacctctggtgttaaaggatctggtggatttgttcaaggttatgacatgtttaatgaccttcaccatcagaagtcccatgattgggacttaacaaacacaggcatgacatatgatgcttctcagcatgcaaatcctttacaaggtaacattgatgtctcaccatcagttttggttcatcagagttttccctctatgcaacagactgtacaaaatagagatactacttcaattggaaaagctatgttctccacaggtgaaggcatgcatcagagtagtctccaaaatattggtcaacaccacaataaccttcttcttgacaattcagtaagggttaaggctgaaagaattcctgatcctagctgtcagattaataacctcttctctgaccaatatggtcaggaggatcttgtcagtgcatttctgaaacagcaagaaggcgttggaacagctgaaaatgagtttgactttgatggatattccttagacaacattccagtttagaacagattctgcccgttctcttcctaattgcagtcgccaatgcaaatagttggcgttccatttgaaccaaatcgcactgcaattagtttgtttggatcttagtttaaatttttcaacaaatagaatttaattgatgtaaaaaattcaggcttcagggagtagtatgttattatgatttagtctggatgcttaaaagatgaataacaacaaactttaaatgcatgtgtgcaaaaggcatatttgcaattttttggctgctttcgtttgccaaggttctagcaagcttatgttgttaaggtgtacatgaagacactggtttagggaaaaactgtagagggcaaggctttgatacacctgcagacttgtaggagcattttaacttaataacacattatgaaatattttt

SEQ ID NO: 13377 - DNA, 2319 bp, Glycine max
  Clone ID: JC-GMST02400062B08_FLI
cctgctaccattttgaagtgaagcgagagtttctgaagggtgccttgaaaagattttctcagttctttatttcacctcttgtaaagatggaggcaatggagcgagaagtacttgcagtagattcagaatttaaccaggttttacaaagtgatgcttgccgccttcaacaacttcagtgccatacttcagctcataatcatcctttaaatagattcttttgggggaataaaaagagcttggttgatgcaatggagaagggtattaatttgcgcgagcaaatattgaaattatacaaggattattaccacggtggattgatgaagcttgttattattggtggagagtctctggatgtgcttgagagttgggttgtggaactgtttggcgctatcaagaaaggtcaggcaaacccagtgttcacagtggaaggtcctatctgggaatctggtaaagtttatcggctagaagctgtcaaagatgttcatatccttgatttatcatggacattgccctgtctacaccaagagtatttaaagaagccagaggattatttagctcatctccttgggcatgagggcagaggaagcttgctctcctttctcaagtccagaggatgggctacatctctatctgcaggagttggggaagaaggaatttatcggtcatctatagcttatgtctttgtcatgtccatacacctcacagactctggtatagaaaagatctttgatatcattggctttgtctatcaataccttaagttgttgcgtgaagatactccaccagaatggatatttaaggaacttcaaaatattggaaacatggatttcagatttgcggaagagcagcctccagatgattatgctgctgagcttgcagaaaatttgcacttttatccaccggagcatgtaatttatggtgactacgtgttcaagacatgggatgaacaattgttaaaacaagttcttggtttcttcgttccggaaaacatgagggtagatgttgtttcaaagtcattccttaagtcagaagatttccaatatgaaccttggtttggttctcgttacgttgaagaagatattgctcaaagtttcagggagttatggagaaatcctccagaaattgatgcctcactgcatcttccttcccaaaatgagtttattcctagtgacttttctatacgtgctagtgacacctgtgttgatgattttgcaaattcaacttctcctagatgtttaattgatgaggcattgataaaattctggtacaaaccggatagcactttcaaagttcctcgtgcaaatacatattttcgaattaccatgaagggtggctatgctgatgtaaagagttgtgtattatccgaattgtttattcaccttcttaaagatgagttgaatgaaatcacatatcaggctagtattgccaagttagaaacttctgtcacttatgttggtgacatgcttgagctgaaggtctatggtttcaatgaaaagcttcctgttctgttatctaaattcttttcagtatctaaatcattcatgccaactgatgatcggtttaaggtaataaaagaagacatgaagagagctttaaagaatgccaacatgaagcctctaagccattcaacatatttgagattacaagttttgtgtgagagtttctatgacgctgatgagaagctgcattatctaaatgatttgtttcttgatgatctgaaggcatttatccctgggcttctctcccagatatacatggagggtctttgccatggaaatctgtcaaaagaagaagcaattggcatagcaaaaatatttaagatgaattttccagttaatccactccctattgaattgaggcatgctgagcgtgttatttgcctcccatccagtgccaatttagttagagatgtcaatgtgaagaataagtcggaaaaaaactcggtggttgagctttattttcaaattgagcaagattttggtctggggtcaatcaaattgaaagctttaattgatctttttgatgaaattgtggaggagccatttttcaatcaactgaggacaaaagagcagcttggttatgttgttgaatgcagcccacgagtaacatatcgtatctctgggttttgtttctgcgttcagtcatctgagtaccacccagtttacttgcaaagtagaattgaaaacttcttaaatggcctggaagaattgttggatgggcttgatggtgattcctttgagaattacaaaagtgggttaatggcaaagctgctggagaaagacccttcactcacatatgaaagcaatagattgtggaacc

SEQ ID NO: 13378 - DNA, 879 bp, Glycine max
  Clone ID: JC-GMST02400062F04_FLI
gaagatatggcttgtagactcaaagggtttaattgttagttcacgaaagaattcacttcaacacttcaagaagccttgggctcatgaacatgagcctgttaacagtctcctagaggcagtcaaggtgatcaagccaacagttttgattggatcatcaggagtgggaagaacatttacaaaggaagtagttgaggctatgacttcaaacaatgataaacctctcattctggctctctccaatcctacctcacagtctgagtgtacagctgaagaggcttaccagtggagtgagggtcgtgcaatttttgctagtgggagtccatttgatcctgttgaatacaagggcaaagtttatgcttctggccaggccaacaatgcttacattttccctggctttggtttgggtttagtaatctcaggagcaattcgagtacatgacgatatgcttctagcagcttcggaatccttggctaaacaagtgagtgaggagaactacaaaaatggcttgatttacccaccattctctaatatcagaagaatttcggctaatatagctgcaaatgttgctgccaaggcatacgaactgggcttggctacccgtcttcctcgtcctcagaatcttgtgaagtgtgctgagagttgcatgtatactcccgtataccgcaactataggtgaatgaggcggcttctggctctaacaaggatgtgtttcgtgtatggtgtcttattgtgcttttatgcacattcacgaataaacaattttatgcttcaaccagtgtttttctattatgaaatccttatttcatctaatgttacttatgtcgatgacaatggttattaaaatccataatgactcaagtcgtttcatttgccctggct

SEQ ID NO: 13379 - DNA, 1301 bp, Glycine max
  Clone ID: JC-GMST02400069B11_FLI
atacaaggaataggaataaatagttctcttttgtgcaatcttcctgaatataccagaattgttttcattattactactcaacaatttctttctttctttctttcttttggttttgcagcaacaaaatcaacaccaagcaaatggaagtaacagtcctcatgagctgcttccgccgctgcctcagccgccacaggcccctcacgtgggggttgaatccgagcaaatccggtccggtctgatggcggatcgggccaagattccggcaccggaaggagttctgaagtgtcctcggtgtgaatccaccaacacaaagttttgctacttcaacaattacagcctctctcagccaaggcacttctgcaagacatgtaggcgttattggacaagaggtggtgctctcaggaacgttcctgttggtggaggatgccgtaggaacaaaaagaacaaaaggtctcgctccaaatctccggtttctactgagaaaccatcacttcccaataatacaagtgcaatccctgagcttattggtcgtttcccacaacctttcatggcctctcttcagagtatgaaccgctatggtgtagggattaacacaggtgttaacttgcgtgagattcaagcacagaacgcttctcaaatggagtttcaaattggaggtcttggcaatggttcaagcgttgctactgcaggaggaggaggaggaggaggagtggagcagtggcggtttcagcagtttcctttcttgaatggttttgagtcaacttcagctgcttctaattcctacccttttcaaagtgaaattgttgaaggtttggttggagatattaatgccacaagttctaggattactcagctgccagcacgggttaaaatggaatataacggtggcttgaatttgtcaagatctcctttgaatgtctcagaaaatagtaaccatttctattcatggacggatttatctggtcttgcatcttcttcagcgagtcatctcttgtaactttgacctctcatatgggttagtagccacaaaaatttaagggttttggtgctgttattttttgatcaataattgaatgagtttccattttatgaagctctctctctccctttctcttggcatgtttaaactcatttatttatcgatccaaaaaatatttgtaccaataaactcttagatttatatatccgggttagaatgacagctctccaatgtcgttccaccgtcttcacgcgtcagtgttgttaacagaaatccaatcaggctggtagaatttaatcttcaattgtatatttttcttatc

SEQ ID NO: 13380 - DNA, 1586 bp, Glycine max
  Clone ID: JC-GMST02400072C12_FLI
atcatccccgtattataaacccaggattgcctcttcttccaggaaccccctcaacaaaaggaaactctcattcaccttcttctctctccctcactccctctctttcttaatacaccaccttcccaaccctcttccattctccttctccaactccaacccctgcttcccttttttcattttctcactccccatcttctgagagtgatgggtgtttgctaccgctgttcccacacctcccacatcaccgccatcatcatcaccagcttcttccgccacaagccttagaattatactattcccaccctccctctttcttcaacaacaaccgttgacttcactacagtcacgtggtctttctctgaggatccaaccatggcggctggaactgtcttctgcgctgctgctactgctgcttctaatttgacaacaaccacttttcttcacaaccaaacacctccttccacctcctctcagcctcctctcgattctcttttcctctctgcctcttcccctttcctcggttcaagatctatagtgagttttggagatgttcaaggagggaaggggtgcaatgattcattcttccgcccctatgatgagaatggggatgaggacatggacgagtacttccaccagcctgagaagaagcgcaggctctccgtggagcaagtgaagtttcttgagaagagctttgatgaggagaacaagctcgagcccgagaggaagatttggctagccaaggaactcggcttgcagcctaggcaggtggcgatttggtttcagaaccgccgcgcgcgctggaagaccaagcagatggaaaaggactatgattccctgcaggctagttacaatgatctcaaggctaactatgacaaccttctcagggaaaaggataaactcaaagctgaggtggcaaggctcactgagaaggtgcttggaagagagaaaaatgagagtcacttggaacaggctgaaaccaacggattgcaggagccgctgcacaagtctttggttgattcagcttctgagggtgaagggtccaaagtgacctttgaggcttgtaaacaggaggacattagctcagccaagagtgacatatttgattcatcagaaagcccacaatacactgatggagttcactctgcacttctagagactggtgattcttcttatgtgttcgaacctgatcgatctgatgtgtctcaggatgaagaagataacttgagcaagacccttctgcctcattacatttttcccaagcttgaagatgttgattactccgacccacctcatggttcatgtaattttggaattccggaggaagatcaagccatttggtcttggccttactgaattttctctatagcatatagagcatgtctctaccttctactctcaagttcttctgtttaaacttgagatcatgtggtagaaaagggtgagttaataataagccaaagaaaaaatggcactctactggtttgttcccaatggtggtttcttgccagctttttttttttttttttactttgcaatgtaacttttggttcaaatgtaaataaataatatcttcttgttgaggatgt

SEQ ID NO: 13381 - DNA, 1202 bp, Glycine max
  Clone ID: JC-GMST02400073F10_FLI
gcttctcttattcccttttctctctccttctactctccccctctttctcattttccggtgacatggagtccaagtggggtggcgcccccgccagcatcatggcggcgaatttcgacgacttcaagtggatcgcctccatgttcgatcccggaaacgacgacgtcaagcccttctccgacgcagctttccaaaaccaggatgcagtaactgcattttcaacttgtggtggagtaacagatgatacccttgttcgttcccaaaacctcactcccattcaatccaccatttctgcaactattgattctcagtcttccttttgtgttgggagcccagtgtctgctaacaaaccaaacgtgagagataatcaagtaaaaggggtcgccaccactacaagtggttcctcacgtgagccatctgatgaggatgatgaagcaggtccttgtgaacaaagcacaaacgctattgatatgaagcgccttagaaggaaggtttctaatagagagtctgcaaggaggtccaggagaagaaaacaagcccatttggctgacctggagtggcaagttgaacggctgagactggaaaatgcaaacctatttaagcagcttacagatgccagccaacaatttcgtgacgctgatacgaataaccgagtcctaaaatcagatgtcgaagctttgagagctaaggtgaaattagctgaggatatggtcactcgtggcacactcacccctatcaacaaccagattcttcaaaatcagagttcactaaacaccccacctcaactcaacacaaataatctacaccgcatgacacatgtttcgccaaccatcaccgtccgtgggaatgatgatgcttcatatggaggtggaattacagttagtggacaaaattcacctcttggtgggcttggaaacttggataatattccttgcagcgatttcaatagtggaatcaatagtaataatgctgtgagctctatgactagcatgtggccttaacgttattcttattgcaccacatgacttgtgttgtagtagtactgtccggttagatccaactttatgcatgtcttggttttattagatttgtggttatattgtggaaaatattatataggtaacaaaaatgtggtatctacgtgtaagaatccatctagaatatttagcatggtgtgtgttaaatggtttcttttttcttcttca

SEQ ID NO: 13382 - DNA, 954 bp, Glycine max
  Clone ID: JC-GMST024139A01_FLI
gaactactatgcttgtctttccataatgtcactactaattctcacaccatcaagagtggagagccagctttcagtgttcttgtgtcaaggttcttgctcggagaagcattcccaatgccggtatatctgtcactgctgccaattattggtggttgtgcattagctgcagtgactgagctcaatttcaatatgattggctttatgggggctatgatatcaaatttggcattcgtcttccgcaatatattctcaaagaaagggatgaagggaatgtctgttagtggaatgaactactatgcttgtctttccataatgtcactactaattctcacaccttttgccattgctgttgagggccccaaggtttggattgcaggctggcaaacagctgtgtctcagattggtcccaattttgtatggtgggtagctgcccagagtgtcttctaccacttgtacaatcaagtctcatacatgtctcttgatcagatttctcccttaacattcagcattggaaacacaatgaagaggatttcggtcattgtctcttccatccttatctttcacacgcctgttcagcccatcaatgctcttggtgctgccattgcaattcttggcaccttcctctattcacaggctaaacagtaagttgataattttgaagctgttaagtaacacacgcgaacaatgactcatggctggagctcaaagtgtcactaatgaggactacggcattaattagctagttttgttgtcaataggaatttaagtttatttcttttgggccatagcaggagcatttctaatcacgtttcgatctgtgtaaattagctttagaagaatggaatgcactaagccgtacttgatctttaggatgtaggtatatcaattctcgaaaaaaaaaatcgttgtaaagtcatgtaaatcagtacttattattttattggtttgttactt

SEQ ID NO: 13383 - DNA, 1483 bp, Glycine max
  Clone ID: JC-GMST024150F06_FLI
taaaagttgatgcacatttcatttttcatcttaactgcaaaactcaagggaaatcctctttctcttcttctctgattttataagtgaattaaaatggtctcagattcttgcccccctcttaaggaacctgaatcagataaaaaatgggaggaaaagggtccccctcgcaatgccaaatggtggtactcaacttttcacgctgtgacagccatgattggtgcaggtgttctcagccttccctatgccatggcatatctaggatgggtgccagggaccttgattttgttgatgtcttggtgcctgactttaaattcaatgtggcaaatgatccaactccatgagtgtgtcccgggaaccaggtttgatcgttacattgatcttggaagacatgcttttggaccaaagctagggccatggattgtgctgccccagcaactgattgtccaagttgggtgtgatattgtttacatggtcactggtgggaagtgcctgaagaagttcatggagattgcatgcaccaattgcacacaaatcaaacagtcctattggattctcatttttggtggcatccatttctttctttcccagcttcccaatttcaattctgttgccggggtttctctagcagctgctgtgatgtcactgagctattcaactatatcctgggtggcttgtttggctagaggtcgtgttgagaatgttagctatgcatacaagaaaaccacttctactgacttaatgttcagaattttcaatgcacttggtcaaatttcatttgcatttgctggccatgcagtggcccttgaaattcaggccacaattccatcaacccctgagaagccctcaaagataccaatgtggaaaggtgctattggtgcctatgtcatcaatgctatatgctatttcccagttgcacttgtaggatattgggcctttggaagagatgttgaggataatgtgcttatggaatttgaaagacctgcatggcttattgcctcagctaacttgatggtgttcattcatgttgttggtagctaccaggtttatgctatgcctgtttttgacttgattgagagcatgatggtcaaaagatttaagttccctccaggagtagcacttagacttgttgctagatctgcttatgtagcttttacattattcgttggggtcacattccctttctttggtgatctgcttgggttctttggtggatttggttttgctcctacttcatactttcttcctagtataatgtggctgataatcaagaagccaaaaagattcagcaccaactggttcatcaattggatttcaatatacattggagtgtgcattatgttggcatctacaattggtggcttaaggaatattgccactgatgcttctacttataagttttacacctaaactattttatattattgcaaaaatatgtagcatgagcaattaatctagttaattagactggagttggtgaatgtct

SEQ ID NO: 13384 - DNA, 1885 bp, Glycine max
  Clone ID: JC-GMST024168H05_FLI
gtagtaagcagtttcatcattttttctttttttctctcttttggtacattggaaagaaagaaaggaagcttcaatttcttccaataaagcgtgttttagaacgtgcttttaaggtatatatatatatacataactacatataccaaaaaactgatttgcagctgaaattgctttcgttcattagtatttagtttttcacaagctagggaagacatgggagaagtggctgatgaaggtcaatatttcagatcagaaatagctctattgaattactcggatgcaaccttcaaacccccactttcttctctgttgatacacattgatccactcataatacccaatggccacacttgttctgcatcagaatctgatccatcacccacttctcagcaccatcagcaggagcagcatcccaaagatgcctggcttccaatcactgaatcaagaaatggaaatgcctattatgcagcctttcatattcttaattccaacattggattccaggctctcatgcttcccgttgccttcgccactcttggttgggcatggggtacagtatgtttgtcactagcatttgtttggcaactctatgccatatttcttcttgttcagcttcacgaatccgtccccggaattcgtcacagcagatacctcttccttgccatggctgccttcggtaaaaagttagggaaggtggcagcattattcccggtaatgtacctttcaggaggcacatgcgtcatgataatcatcaccggtggtgggaccctgaaacaattattgaagacgctttgcgacaacgatgatcatgttcatgagcaaataacatgtaatgcccacgcgcttagcggggctgagtggttcttggtgtttacctgtgtcgccattctcattgcacagttgcccaacctcaactcaatggccatggtttctctcgtcggcgccgttacctccgttacttattgcaccctcttttgggttctctctgttaagaatggtaggcccaacaacgtatcctatagctcatccctgcagtcccaagaacacacaccagtggctaagatcaatggcgttctcaatgccattggaatcattgtgctagccttcagaggacacaatgttttgcccgaaatacaggggacgctgccttcaaatttcgaacaaacatccaaaagaccaatgcgaagaggagttagcatatcatatgtactcatttccatgtgcatgtttcccctcgcaattgccggattttgggcctatggaaaccagataaatgacgggggattgttaacttcgttcccacaattccacaagaggcaaatcacaaaattctctatgggtgcaatatatgttctagtaataatacattgtttaaccagctttcaaatatatgcgatgcctgtttttgacaacctggagataagatacacgagcataaagaatcagagatgtccacgattggtgagaacatgcataagactattctttggggggttgacattttttatttcggtcacgttcccattccttccacgcctatcagcactactcggaagcatgacccttgtgcccattacatatgcatacccttgtttcatgtggctatccctcaagaagcctcgtccaagaggttttgtttggtgcttcaacgttgcactcggttgtgtagggatgcttctcagtgctcttttggtagctgcagctatacggactctagctctcaatggcctagatgctaacttcttcaaaccataacaattaatattatgccatccaacagcaactagtatattgccaacaatttattttaatctactgttagtgatatacagaaaatcatttttgaacatgatactccagtaatacaaacgttaagttttgaatt

SEQ ID NO: 13385 - DNA, 1752 bp, Glycine max
  Clone ID: JC-GMXLIB3563P012CF08_FLI
atcaccaaaccccatttccattaatctaattcaattgtgttttactaccaaatctccgttgcttccttactctccagcgcctactcatatcacagatcatggataattcatagtactactatttcgtacaagtattcacgaaccattccattccaatttccattcagcagcaaccaaatcaccatcttcttttgcatcattagttttttagttagattaccctcttccgtttcaccttcctttcatgcttacgtcaccaccactcactctttttctaccctaaaccattgaatcgatctaaatctctcccaaatcgcaaaccccttttgctcaattcagtcaattctctccctaagttccgctgtcggcgtctaggttttggagcatacgacaaaaagatgggtgagggagaacgtttccagcttgggacggtgggcgcgttgactctttctgtggtctcatctgtgtccattgtgatttgcaataaggcgctgatgagttcactgcatttcattttcgctacaactttgaccagctggcatctgcttgtcacattttgttcccttcatgtggcgctcaaaatgagattctttgagcacaaaccttttgagcagaaagctgtaattggatttgggattttaaatgggatctcaattggacttttaaatttgagcctgggtttcaattctgttggcttctatcaaatgactaagctggcaatcattccttgtactgtattgttggagaccatatttcttgggaagagattcagtaagagaattcaatttgccctcagtatcctccttttgggtgtcgggattgctactgtcacagatttgcagctcaatgctctgggctctttcttatcttttctcgcagtgattacaacttgtgttgctcagattatgacaaatactatccagaagaagtacaaggtttcttccacccagcttctgtatcaatcatgtccatatcaagcagcaaccctgttaatttctggcccatatctggataaacttttgaccaaccaaaatgtatttggtttcaattatacgacacaagtgacggttttcataattctttcctgccttatctctatctcggtcaatttcagtacgttccttgttattggaaagacatctccagtcacctatcaggttcttggacacctgaagacatgccttgtattggcatttggttatatacttctccgagacccgtttagctggagaaacatactgggtattttgatagccatgattgggatgatactatattcttactattgcactcttgagaatcagcaaaaaactgtcgaagctgcatcgcaatcatcccaggcaagagaagatgaatctgatcctctgatgaatgtggaaaatggaagtgcagttgtgagttctaatgtcggacaaagacaaatgtctcctgtatggagcaagagcaaagactagtatgtttaatgggttttgtcttagcattgtcaagaacagttttatagtccttatagagggttaacacccgtaatccatatggaattagaaagtggaagtgctgccaaacgcatatcctagccatttttcttaatagctttagtttaatatttttatcaatcttttgccgaccaacaatattagggaggggaacaagcacatggtcatgtcgtaattctattggccaacaatgtcttatagtaacatacatttcctggtgatgtttttatatcataatacttattatgattttatatag

SEQ ID NO: 13386 - DNA, 871 bp, Glycine max
  Clone ID: JC-GMXLIB3563P016BC05_FLI
cttttgaccctgctagaaagaaactctcaagcaatatccagaaccaatgaagctgctctcttattctagcttacttgggactatccttagtgcaatagtctcggggatagttgagagggacataaatgcttggaagataaagcgtaacaaggatgtcattctcattgttctaactgcactagttgggggagtgattcgtcctaatattcaagtatggttcactcgcatgaagggtccactttatgtgccacttttcaagccatttggtattgcatttgccactacttttgcagtttgcttcttttcaaacagccttcattatggaagtgtgataggaacaactgtacttggaatggggcattatacagtaatgtatggacaactcagagaaaatgaagaagagacaagctgtgacgaaagctctgattctttggacaagatggtaccccttttgcaagaaaagatggaagtgtgaatagaacttcgaaagattctagaggcagaggaattcacctatttttcagaatcttcctccctttcgtttgattcgtttcaaacgattgtgatacaaatacaagtctctcccatgttgcaaatattttaattgtaattaactccaactgtgtatatataaatcatgaaacatgtaagtagcatgcaaaaaaaggtggtcgaatttttatttgagacctttatattttcgttgtacaaaaaatttctctgtaaatatatgtaatacacgtatctcgagctttactgtactgatatatgtgtttcacaagttgtttttttggtaaatatgtgattcacaaattgttgtggaatgattcaaatttccaatcgtgattatataaaatgaacgcattaaatc

SEQ ID NO: 13387 - DNA, 729 bp, Glycine max; identical to SEQ ID NO: 9615
  Clone ID: JC-GMXLIB3563P026BE10_FLI

SEQ ID NO: 13388 - DNA, 1331 bp, Glycine max
  Clone ID: JC-GMXLIB3563P040AB09_FLI
gctggtgcatgtttatttgaagagcttgggttattctacattggcccagtagatggccatgacatagaagaccttgtgcacatcctgaaaagtgtcaagggtatgccgacacttggacctgttctcattcatgtaatcactgagaaaggaaaaggttatcatccagctgaagttgctcctgacaagatgcacggtgttgtgaaatttgatcctaagtcagggaagcaattgaaatccaaagctagtacgcggtcttacacgcagtattttgcagaatctttgacagcagaagcagaagttgatgagaaaattgttgccatccatgctgcaatgggagggggcacggggcttaacttgtttcaaaagcgcttccccgaacgatgttttgatgttgggatagcagaacaacatgctgtaacttttgctgcaggcctagctgctgagggcctcaaacccttttgcgcaatttactcttcctttctacaaagaggttatgatcaggtagcacatgatgtggatcttcaaaagcttccagttagatttgcgttagacagagctggcttagttggtgctgatggtccaactcactgtggagcatttgacacaacattcatggcttgtttgccaaacatggtggtcatggctccatcagatgagactgaattgatgcacatgatagccacagctgcagccatagatgataggcctagttgctttaggtacccaagagggaatggcataggtaccattcttccacccaacaataagggcacgccattggaggtcggtaaaggaagggtattaaaggagggaagtagggttgctcttgttggttatggaacaatggtccaaagttgtatggaagcagctaaggttcttgaagctcatggcatctcaacaactgtggttgatgcaagattttgtaagcctctagatggagatttgatgaggagactcgctagagagcatgagattcttatcacagttgaagagggatccattggaggatttggttctcatgtttctcattttctaggcttgaatggtcttctagatggtaatctcaagtggcgagccttgacattgcctgacagatatataaaccatgggtctcagacagatcaaattcaaatggcaggactgagttcaaaccatattgcagttactgctttgtcattgaccaatgtgcattgggatagtcgtttgcttctcagcctacagatatgaatcttaacagaaattgtgagcttgtgattcaatttttaggtgtccccttaatacatgtacataagtagtagttaaatcacaaaaattatggcattaattcaatt

SEQ ID NO: 13389 - DNA, 1560 bp, Glycine max
  Clone ID: JC-GMXLIB3563P041DF04_FLI
gggtgtaaagtatcttccatttgaaaacagcattgtgttgttacctacccccattcattcactcaccaacaccaaacaaacaagtccctgctggtggcggacactccgagggcctctcccctcttcctctccacagtataaaacccaaaactcacacaacccgacccatcacgcaagacaaaagcgcgctcttgtgttccgtttccgtttgtttctgttttctttctctttcagatctcgaaaaatgcagagcgcggctttcactttctctccctctctccctctccgcaacccttcccctaactattggaggagaccttctctctccctccgtctctcggccaaacacggcaacagcaacagcgatgacgtgaactccaatggcgtttcttcaactttcttcactcgccgatcttggactcttcctccttcctcttccttcaagttcaggcctctccctccccgcgccgccgaaagcgccgttcccgaaagtgcgcccgtcgaaaacccgctcttcaaaactctcgaactcggcgccttgtttggcctctggtacctcttcaacatctacttcaacatctacaacaaacaggtgttgaaggcgtttcattacccggtaactgtgactgttgttcagtttgctgttgggactgtgctcgtggcatttatgtggggtttgaatctctataagaggcctaaactcagtggtgctatgcttggagcgattttgccgctggctgcagtgcatactttggggaaccttttcactaatatgagtcttggaaaggtggctgtgtctttcactcacactatcaaagccatggagcctttcttttcagtggtcctttctgccatgttccttggagagtttcctacaccgtgggtggttggttctcttgtgcctattgttggtggagttgcactggcatctgttacagaggcctctttcaattgggctggattttggagtgcaatggcatccaatgtgacaaatcaatctcgtaatgttcttagcaaaaaggccatggttaataaagaggattctatggacaacattactctcttctctatcataacagtaatgtccttcttcttgttagcacctgtggctatcttcatggagggtgtcaaatttactcctgcttacttgcaatctgctggggtgaatgttagacaactttacatcagatctcttcttgctgcactctgtttccatgcgtatcaacaagtttcttatatgatattgcaaagggtatcacctgttacccactccgtgggcaactgtgtgaagcgggttgtggtcattgtgagctctgtcatcttcttccaaacacctgtctcacctgtgaatgcttttggaactgctatagctcttgctggcgttttcctctattcaagggtgaagcgtattaaggcaaagccaaaaacagcttaattttcaattgtaaaattttgttagttgcatcacggaagccaaatagttgcaatctgcaattctgaatttctttgtaggcgagatagggaatttgaagattatctttattgatccttacattttcc

SEQ ID NO: 13390 - DNA, 957 bp, Glycine max
  Clone ID: JC-GMXLIB3563P052CH08_FLI
caaccaccgaaacggccatgtcgtacatccacacgctacttctggccttatgaccatatttggtgctctcgcttctgtcgcaagcaacgtctcttatgccatgtggcttatcattcaggcaaagatgagtgaaagatacccgtgtccttattcgagcacagcgttgatgtccctaatgggggcagtgttatccatttcgtttgctttttgtgttgaaagggatttgagtcagtggaggttgggttggaatatcagactattgactgtggcttatgcgggtatagtggtttctggagtgatggtagccgtgatttcgtggtgtgtacgcacgagaggtccactgtttgtctccatttttagccctctaatgcttgtggttgtggcctttgctggatccactattttggacgagaaactataccttggaagcatcattggatcaatgttgattatttgcggattatacgtggttctttggggtaagagcaaagagatgaagaagaatcaatctggtcagtcagaaagcacccataaatctgacacaattgaaataatggtcaaacctcgtgtagaagataaaagcaacaataagagcaataccctcattaactctgtaaatgtgacgggggataataaagattcatggaaaaatggacgtgaaagcaatgtatcacatatacactgctgcaaggtgcaagaagaagtaacatctcagaatgtctcacgtacctaaacacttcatacatgtaagacacttattgtacaatgtagatagcttgccatccttttccaatcgccccaacatgctgtgggcttttttttgtattgttggagaaggaaaggcaaggctagattgacttctatcttttgtcttggtccgtcccgtatgttgtaattggtttcttaaacccaaattgcaaaaaacaaagcttgtattcaaccaacttcaacttaaac

SEQ ID NO: 13391 - DNA, 1238 bp, Glycine max
  Clone ID: JC-GMXLIB3563P082DE09_FLI
gccaaacaaggcgccgagttcgagagttttgaagagcgggttttatgtggggtttgaatctctataagaggccgaaactcagtggtgctatgcttggagcgattttgccgctggctgcagtgcatactttggggaaccttttcactaatatgagtcttgggaaggtggccgtgtctttcactcacactatcaaagccatggagcctttcttttcagtcatcctttctgccatgttccttggagagtttcctacaccgtgggtggttggttcccttgtgcctattgttggtggagttgcactggcgtctgttaccgaggcctctttcaattgggctggattttggagtgcaatggcatctaatgtgacaaatcaatctcgtaatgttcttagcaaaaaggccatggttaagaaagaggattctatggacaacattactctcttctctataataactgtaatgtccttcttcttgttagcacctgtggctatcttcatggagggtgtcaaatttacccctgcttacttgcaatctgctggggtgaatgttagacaactttacatcagatctcttcttgctgctctctgtttccatgcgtatcaacaagtttcgtatatgatattgcaaagggtatcacctgttacccactctgtgggtaattgtgtgaagcgggttgtggtcattgtgagctctgtcatcttcttccaaacacctgtctcacctgtgaatgcttttgggactgctatagctcttgctggagttttcctctattcaagggtgaagcgtattaaggcaaagccaaaaacagcttaattttcaatggtaaaattttgttagttccattgaggaagccaaatagttgcaatctgcaattctgaatttctttgtaggtgagatagggaatgaggattatctttattgatcctcagtcctcacatttcctttttatttcttctccttaagttaccttgtggatttcattatttatgtttgagtaagtgcctaatggttctgctccatgaaaaaattatcctcttctgaattttgcttaaataggtgtgtttttaattatcattttcgtacaagcatatatgtaatcagccatagattttttaaatgatgtgcaagttttgggccatcgttaatctttcagtatattacgtatcaattttttttttttccacaaatcgacttgtgccttaattgtgaacgactgaacgtagctgcatctgagttttc

SEQ ID NO: 13392 - DNA, 953 bp, Glycine max
  Clone ID: JC-GMXLIB3563P087AE09_FLI
gcttcttcttcttcttctctgcatcatcacaatggctgaagtacgttcacaacaaccccagcatgttcaagtccacgcaagcacaacacacacaccacaacaataccgttattaccaaggtggcgccaaaacacaacaccatggcggcgaaggtggcggcgttatgagcctcttcccggagatatccctcacgggctcccaactcctcgccctcctcgccggcgtccccctcggcggcatgttgctactcctctccggggtctcgctcatcgccagccttgtggggctggcggtggcgacgccgctcttcattttcttcagcccggtgctggtgcccgccgccttcgtcatagggatggcggtgaccgcggtgctggcggcgggcgcgtgcgggctggtggggctggtgtcgttctcgtggctggtgaactgtctccggcagatgccacgggggacgacgacgaagacgacgatgatgcggccggagcaggcaaagcggcacgtggcggacatggaagagtacgtggggaagaagacgaaggatgttgggcaagacattcagacaagggcacatgcacagggaacaaccgggatggtatagtgcattcagttatcatcagacaagaaaatggtttcagtttgtgtttatgtctatgacttgtgagataaacgtactagtatctatgtgttttgaattatggagagtttcattttgtgttccatgcacggttttaaaattgcatgcggttagctaaaacaaatctttgtgattgctaaaatgtgactgatgcaatcatgggattgccattgcggttgcagatctcagtttaaaaccatgttttcatgttgtgtcatcacttcctctggatctgctcatttacatgagttgttgaatattccatcatgtgtaatcagtaataatattaataatgcatgcatttttctttcggttt

SEQ ID NO: 13393 - DNA, 1494 bp, Glycine max
  Clone ID: JC-GMXLIB3564P111AF11_FLI
tacggctgcgagaagacgacagaagggtacggctgcgagaagacgacagaagggtacggctgcgagaagacgacagaagggtacggctgcgagaagacgacagaaggggactgaaagaaacatatgaggagacaaagagaaaaaaacgtagtgtcccaaatcacccaatattcagagtgcaagaaggttcttcttcctttttttcttcatcgtaagccaacaccgattcgtttttctctctctgcgtgaaaattctgaggttgtggaggctccgaaaccatctgggtcgggtgatggaagaagaggttatttgccaatggagcgtgtttagatctctcttggcaatacttcaatggtgggctttcaatgtcactgtcattatcatcaacaagtggatcttccagaaattggatttcaagtttccactgtcggtatcatgcatccactttatctgctcagccattggaggatatgtggtgattaaggtgctgaagcttaaaccactgataactgttgaccctgaagaccgctggagaagaatctttcctatgtcatttgtgttctgtattaacattgtgctagggaatgtgagcctaagatacataccggtttcttttatgcagacaataaaatcattcacccctgcaacaacagttgttttgcaatggctagtttggaggaaatattttgactggcgtatttgggcttctcttatacccattgttggagggattcttctcacatctgttacagagcttagctttaatgcatttgggttttgtgctgccttacttggctgtttggctacatctacaaagactatccttgcagagtctctgttgcatggatacaaatttgatagcataaacaccgtttattacatggccccttttgcaaccatgatcttggcaataccagctttgttacttgaaggcaatggagttcttgagtggctaagtactcatccatatccttggtcagctctgatcatcattttcagctcaggagttttggcattttgccttaacttctccattttttatgtgattcattccaccactgctgtaacatttaatgttgctggaaaccttaaggttgctgttgctgtccttgtttcttggctaatttttaggaaccccatatcatatttaaattctgttggatgtgccgtgacacttgttggatgtacattctatggttatgtgaggcatatgctctcccaacagccaccagttccaggaactcctcgtacaccaaggactcctaggagtaagatggagttgcttccacttgtaaatgacaaattagatgataaggtctaataataattaattggtttagtttaggctacaaatgaatgaggtttctgccgtttgtaaaggcagtgatagctaaatggtatacaagttactataaaagtaaagtgactttgattattttgttccgttagattttccacagtttttaatacatagttcttttttgaagcccttc

SEQ ID NO: 13394 - DNA, 1032 bp, Oryza sativa nipponbare
  Clone ID: JC-OSLELIB3474007E02_FLI
tttctctccttgtagaaacaagcctagagagtactatggagcagaggaaatttttgttgtgcctaattcttggcttacttgcgacttcaggacctgccaagaccgtcaatgctgactcgccctttgatttttattatctcatcctcatgtggcctggagcatactgcactgacagcgagtatggttgttgcgtgcccaagtatggttacccgtcagaagatttcttcgtcaagagcttcatgacctttgactcgtcagagaacacagctgttgtcaggtgcaactccgacaatcctttcgacattaacaagctagactcaatcgagaacaacctgaaccactactggagcaacatcaagtgtcctcgcaccgacggcgtgaactcatggaagagcgagtggaacagctatggcgtctgctccggcctcaaggagttggactacttcaaggccggtctccagctcagaaagaacgcagatgttctctctgctctcgctgaacaaggcatcaagccggactaccaactgtacaacacggcgttcatcaagtgggcagtgaaccagaagctgggtgtgacaccaggagtgcagtgcagggacgggccatttgggaagaagcagttgtacgagatctacctctgcgtcgacaaggacgccaagagcttcatcgactgccctgtcctgcccaacctcagctgccctgccgaggtgctcttccatccgttccacacctggatgctcaacaccacatcggctgccaacatcgtgatgcccactgaaactgtgctggcctaattaagagcctttaatttgctagctaagctgccatgatctacttgatcaacctgtcctaagagcatgtagcatatgcttagcttgttgctttgggtgaataatcgcgcaacttttatacattgttgtgccctctgaataatatgtgcagtactatatatgaagtattgtaccgcatatgttatgtattacatgtgcaggtcttgtgcacacctgtgaggtgaatggatatattatgaat

SEQ ID NO: 13395 - DNA, 1053 bp, Oryza sativa nipponbare
  Clone ID: JC-OSLELIB3474010C08_FLI
ctctccttgtagaaacaagcctagagagtactatggagcagaggaaatttttgttgtgcctaattcttggcttacttgcgacttcaggacctgccaagaccgtcaatgctgactcgccctttgatttttattatctcatcctcatgtggcctggagcatactgcactgacagcgagtatggttgttgcgtgcccaagtatggttacccgtcagaagatttcttcgtcaagagcttcatgacctttgactcgtcagagaacacagctgttgtcaggtgcaactccgacaatcctttcgacattaacaagctagactcaatcgagaacaacctgaaccactactggagcaacatcaagtgtcctcgcaccgacggcgtgaactcatggaagagcgagtggaacagctatggcgtctgctccggcctcaaggagttggactacttcaaggccggtctccagctcagaaagaacgcagatgttctctctgctctcgctgaacaaggcatcaagccggactaccaactgtacaacacggcgttcatcaagtgggcagtgaaccagaagctgggtgtgacaccaggagtgcagtgcagggacgggccatttgggaagaagcagttgtacgagatctacctctgcgtcgacaaggacgccaagagcttcatcgactgccctgtcctgcccaacctcagctgccctgccgaggtgctcttccatccgttccacacctggatgctcaacaccacatcggctgccaacatcgtgatgcccactgaaactgtgctggcctaattaagagcctttaatttgctagctaagctgccatgatctacttgatcaacctgtcctaagagcatgtagcatatgcttagcttgttgctttgggtgaataatcgcgcaacttttatacattgttgtgccctctgaataatatgtgcagtactatatatgaagtattgtaccgcatatgttatgtattacatgtgcaggtcttgtgcacacctgtgaggtgaatggatatattatgaatatataacgtgttgtattatgaact

SEQ ID NO: 13396 - DNA, 1877 bp, Oryza sativa nipponbare
  Clone ID: JC-OSLELIB3474019G01_FLI
cggatcacctgtggtcctgtgcagccgtaccgtacgcctctgctttcctctcaccccaccgcgccaccggcgagcggcccgcgagggaggaggcgctgccgccgcctctgctgatgctgatgatgctaggggcggcctcccagtggatcctggccgccgccgcggcggcggccgtggcggcgctgctgtggctggccgtgtcgacgctggagtgggcctggtggacgccgcggcggctggagcgcgccctccgggcgcagggcatccggggcaaccggtaccgcctcttcaccggcgacgtgccggagaacgtccggctcaaccgggaggcccggaagaagccgctgccgctcggctgccacgacatcatcccgcgcgtgctgccgatgttcagcaaagccgttgaggagcacgggaaaccatcattcacttggtttggcccaacgccaagagtgatgatttcagaccctgaatcaataagggaagttatgtctaataagtttggccactatggcaaaccaaagcctacccgtctcggaaagttgctagcctccggagttgtaagctatgaaggcgagaaatgggcaaagcaccggagaattctgaatcctgcctttcaccacgagaaaataaagcggatgctgccagttttttctaactgctgcacggaaatggttacaagatgggagaattcaatgtctattgaaggaatgtcagaggtagatgtttggcctgagttccaaaatcttacaggagatgtcatatcaaagacagcattcggtagcagctatgaggaaggaaggagaatttttcagctgcaagcagagtcagccgaacgcataatacaagcctttcggacaatttttataccaggatattggttcttaccaactaaaaacaacagaaggttgagagaaattgaaagagaggtcagcaaacttctacgaggaataattggaaagagagagcgggctattaaaaatggtgaaaccagtaatggtgacttgttgggcttattggtggagtcaaatatgagggagtcaaatgggaaagcagaactaggaatgactacggacgaaattattgaggaatgcaagctattttattttgcaggaatggagacaacatcagtattgctcacttggacattaattgtgctaagtatgcacccagagtggcaagagcgagcaagagaagaagtgctacaccactttggaagaaccacaccagactatgatagcttaagtcgtctgaagattgtaacaatgattctgtacgaggttcttaggttgtatccgccagtggtgttcttgaccagacgaacatacaaggaaatggagctcggcggcatcaaatatcccgctgaagtgacccttatgttgcccattttatttattcaccatgatcccgatatttggggaaaagatgcaggtgaattcaatccagggaggtttgctgatggcatctccaacgcaacgaagtatcagacctctttctttccatttggatggggtccccgaatctgcatcggccagaactttgcactattggaagccaagatggctatctgtacaatccttcagcggttctcctttgagctttcaccatcgtacatccacgcaccattcactgtgataactctccacccacagcatggtgcacaaattaagctgaagaaaatctaaccatgctgctcacttgctcggattggtcaaggagaaacaagtcagtttgataagttatatatctttctcttttgtaaacagaggtagtctacaggtttcgtattcgaactagaaagattttacttattgatatactagcttttatgcagataaaaacatggtgagtgaaataatattccgagtttttaatac

SEQ ID NO: 13397 - DNA, 957 bp, Oryza sativa nipponbare
  Clone ID: JC-OSLELIB3474024D11_FLI
gggccattccacggtcgatcgatcgtctccggccggccggtcgccggtgggaattgaagcagctagctgacatacatacatggcgggcgtgtgggtgttcaaggacggcatcgtgcggcgcgtggagaaccccggcagcgaggaatcgtcgtcggcgggggacggcggcggaggcgggcggcggaaggtgctggtgcacgtgccgagcggggaggtggtggcgtcatacgaggtgctggagcggcggctgcgggagctcgggtgggagaggtacctcaccgacccgtgcctcctgcagttccaccagcgctccaccgtgcacctcatctctgtcccccgcgacttctccaagttcaagctcgtccacatgtacgacatcgtcgtcaagacccgcaacgtcttcgaggtccgcgacgccgctgcccccgccgtctcaccggcgacctagctgctgatccgagatccatccatccatcgatcagacgacagcttatagctacagcagtccacatgagcttgcctgcctgctattataagagtgtaagtatgtatatatatactggtatgcgtgtgatcgatcaaggatcgatgtacacacaaatgatcagcatgcacagatcactagatcgagatctatagctcgatcgatttggggtttctcctgccggcgttgcagcttttggattagatgttgcgccggtgaggacattgctataggttaattggcttttgggtatatttctgcataaataatgcatcaatagagagcacaacatgtgtatgcatacttatatttatatgtacacatgcatacatatataagtacatacataggggccgggggcaacatgcaggttgcagagattctgccagagatcaagcagaaaggggatcgccgatgccctactctcaaccgtacctttttactgtttaatttggaataatttggattgtctc

SEQ ID NO: 13398 - DNA, 1096 bp, Oryza sativa nipponbare
  Clone ID: JC-OSLELIB3474025C11_FLI
tctcgccctaatcatcatcgtcttcctcctcttggatcttctcctctgccatggcgggcaacagaggaggcgatgccggggaaggggagtggctcaaggtcgccgagctcagggccacggtggaagcccaggacccccatgccaaggaagtggacaacctgacgctgaggaggttcctgcgggcgcgagaccacaacgtggagaaggcgtcggcgatgctgctcaaggcgctccggtggaggagggaggcggtgcccggcggctcggtgccagaggagaaggtgcaaagcgacctcgacgacgacaaggtctacatgggcggcgccgatcggaccggccgccccatcctcctcgccttccccgccaagcacttctccgccaaacgcgacatgcctaagttcaagagttattgtgtctacttacttgacagcatctgtgcaaggatccccagaggccaggagaagttcgtctgcatcgtggatctcaagggctggggttactccaactgcgacatcagagcttacatcgcggccatagagatcatgcagaattactacccggagaggctcggcaaggccctgatgatccatgtaccctacatgttcatgaaggcctggaagatgatctaccctttcatcgacaatgtcaccagggacaagttcgtgttcgtggacgacaagagcttgcaagaggtgctgcaccaggagatcgacgatagccagatcccggatacgttgggcgggaagctggcaccggtttccctcaagaacaacgcgcgaattaaccttgattagtagcgaggctcaattagcacgcagttataccgataatcaagcacaagattatacacacacgtatactatacatggatcgatgggatgaacaaaagatatgtgtaattgtgaaaaatgcagctctcatatcacagctggtctcactgtttgtagcattgccatcgtcatttatctcagtaacaaaagcttctgatcagtaattacatgtactactgtcactatgacaagtaaagactccaatactccatatcgaaaaaatatgaaaaagggagccacgtggctaagaagtataaatttataat

SEQ ID NO: 13399 - DNA, 1072 bp, Oryza sativa nipponbare
  Clone ID: JC-OSLELIB3474027G03_FLI
caccgatcgatcccggccattccacggtcgatcgatcgtctccggccggccggtcgccggtgggaattgaagcagctagctgacatacatacatggcgggcgtgtgggtgttcaaggacggcatcgtgcggcgcgtggagaaccccggcagcgaggaatcgtcgtcggcgggggacggcggcggaggcgggcggcggaaggtgctggtgcacgtgccgagcggggaggtggtggcgtcatacgaggtgctggagcggcggctgcgggagctcgggtgggagaggtacctcaccgacccgtgcctcctgcagttccaccagcgctccaccgtgcacctcatctctgtcccccgcgacttctccaagttcaagctcgtccacatgtacgacatcgtcgtcaagacccgcaacgtcttcgaggtccgcgacgccgctgcccccgccgtctcaccggcgacctagctgctgatccgagatccatccatccatcgatcagacgacagcttatagctacagcagtccacatgagcttgcctgcctgctattataagagtgtaagtatgtatatatatactggtatgcgtgtgatcgatcaaggatcgatgtacacacaaatgatcagcatgcacagatcactagatcgagatctatagctcgatcgatttggggtttctcctgccggcgttgcagcttttggattagatgttgcgccggtgaggacattgctataggttaattggcttttgggtatatttctgcataaataatgcatcaatagagagcacaacatgtgtatgcatacttatatttatatgtacacatgcatacatatataagtacatacataggggccgggggcaacatgcaggttgcagagattctgccagagatcaagcagaaaggggatcgccgatgccctactctcaaccgtacctttttactgtttaatttggaataatttggattgtctcaatacaaattatgtaccagttttttcacatatgatttgcacgacattttaaatattgtaatctgtacacataatattgatcggtctctctttccctgtggcc

SEQ ID NO: 13400 - DNA, 2235 bp, Oryza sativa nipponbare
  Clone ID: JC-OSLELIB3474028D09_FLI
gcccaaaatccgaggttggagcttttgctcgggcgattgattttggaatcggaggaggggatgtcaggaccactcgatcgatttgccaggccatgttttgaaggttttacgcataatgatgaaaagaaagagatcagatctgacgcagacaactccgaaggagagaagaagactaaaattggttctttcaagaaaaaggcgattaatgccgggaacaaattcaggcattccctgaggagaagaagcaaaaagaaaaatgaacctcggggttccattgaggacataagggatgttcaagatcttcaagctgttgatgcatttcgacaatgtttagttgatgaggacctgttgccgcaacagcatgatgattatcacacaatgcttaggttcctcaaagcacggaaatttgatgttgagaaagcaaagagtatgtggtcagatatgcttaaatggagaaaggaatttggggctgacaatatagaggagtttgactacaccgaggcggatgaggttatgaaatattatccacaattttaccatggagtggataaagaaggaaggcctatctacatagagttaataggaaaagttgatgcgaataagctaatgcaagtaactactatagagcgatatgtgaaatatcatgtgaaggagtttgagagatgcttccaaatgagatttcctgcctgctcgattgctgcaaaaaggcccatagattcatctactactattctggacgtgcaaggcgtgggtttaaagaacttctcaaaagctgcaagggatctaatcacacgactgcagaagatcgacaatgacaactacccagagacgttgcgccgcatgtatattattaatgccggccaaggcttcaagatgttatggagcactgtaaaatctttcctagatcctaaaactgcttcaaagattcatgttctaggaagcaagtaccaaaataagttacttgaaataattgatgagaatgaattgccagagttttttggtggaaaatgcaagtgcgaggcatttggaggttgcaaaaaatcagataaaggtccttggaaggatcctaacataataaagagggtcctgaatggcgaagcaaattatgggaggcaaattgtgaccatatcaagcactgatggaaaaataattcgttatgctgggccacaatacccaacaagaaaaggaagtgatggctcagcggagtctgggtctgaagtggaagatggcgcgtcacctatggcatcaaggaacctgataacaaatccccttttgacccctgttcatgaggagtcaaaattggcagcacatggatttacatctgcttccccttccattattgaagaaagcattcctgttgttgacaaggttgtggatgatggatggggcagtcctagagctagttcatcaccctcgagaagtttgcctatcacatttgatggcctctggacacaagttatcacatggctgactgtcttgatcgtgagcctttttgctatggttcgctctgtcccaagcaggatggctaaaagattctcaagccaatccactgaccatgatcactcctatgtggagtatcctcaagaagcagagtacaaggaagaattccggccaccgtctcctgctccgtcttatactgaaaaggatgtcctctcatctatggtaagacgactaggcgagttggaggagaaggtgcaggcgctcgaaacgaagccatccgagatgccatttgaaaaggaggaattgctgaatgcagccgtccgccgtgtggatgcattagaagccgagttaatctctacaaagaaggctctctatgaagccctgatgcggcaggacgagctgcttgcgtacattgacaagcaagatatgatcaagtttcgtaaaaagaaattctgcttctagcagctcaacgacgagttaattctccatacacagagctgttcgtgtatatttggatcaattaatcaccacgaatatgaatgaatgcagctagtttggagtgtaaaattaaaagtgtgcatatggcaaattgagaatccaacaataacaccacggtatcggtatgtgagttacaaggtggaccttgaggtgttgttggctggtcattcagaatccagacgatgcatcgtcttgtgctggagggtcctggctgctgtaaattaagcctgtaattaatcttgtgacttgtaacatatatagcacaaatgtgagttaaaatcgttgtaaatggacttc

SEQ ID NO: 13401 - DNA, 4012 bp, Oryza sativa nipponbare
  Clone ID: JC-OSLELIB3474034A06_FLI
tcccctgcgcctcctccaccgcccgtgtcgccgccgcgcgcgtctatcccctcgccgccgccgccgtctacgccgcgtgaggtccggattggttgaaaggctgatcgaggtgcttttattgctaactggagcagtttgtgtagtttctttctttctctttgagaattctctcagtttcttgggcaggctcttgagctaccaagtatgtcagcttcaaatgagaagtggattgatgggctccagttctcatcactgttctggcccccaccacaggattcacaacaaaaacaggcacaaattctggcctatgttgagtactttggccagtttacagctgacagtgagcaattccctgaagatatagctcagctaattcaaagttgctatccatcaaaagaaaagcgccttgtagatgaagtattagcaacttttgttcttcatcatcctgagcatggccatgcagttgtgcatccgattctgtcacgcatcatagatgggacactcagttatgatagaaatggtttcccgttcatgtccttcatctctttatttagccatacttctgagaaagagtactcggagcagtgggccttggcctgtggagaaattcttagagttctaactcactacaacaggccaatcttcaaagttgatcaccaacatagtgaagcggaatgtagcagcacatctgatcaggcctcatcatgtgagtctatggagaaaagggctaacggttctccaagaaatgaacctgaccggaagccattgaggccactatctccttggatcacagacatattgcttgctgcacctctgggtattagaagtgactattttagatggtgtggtggagtcatgggaaaatacgcagctggtggagaattgaagcctccaacaactgcttacagccgaggatctgggaagcacccacaacttatgccatccacgcccagatgggctgttgccaatggagctggagttatactaagtgtctgtgatgaggaagtagctcgttatgagacagcaaatttgactgcggcagctgttcctgcacttctattacctccaccgaccacaccattggacgaacatttggttgcggggctccctcctcttgaaccatatgctcgcttgtttcatagatactatgcaattgctactccaagtgctacccaaaggttgctttttggtcttctcgaggcaccaccatcatgggccccagatgcacttgatgcagcagtacagcttgttgaactccttagagcagcggaagattacgattctggcatgcggcttccaaagaactggatgcatcttcatttcctgcgtgctattggaactgcaatgtcaatgagagctggtatcgctgctgatacgtctgctgctttacttttccgaatactctcccaaccgacattactttttcctccactgagacatgccgaaggagttgaactccatcatgagccactaggtggctatgtatcatcgtacaaaaggcagctggaagttcctgcatctgaagccactattgatgccactgcgcaaggcattgcttccatgctatgtgctcatggtcccgatgttgagtggagaatatgtaccatctgggaggctgcgtatggtttgctacctctgagttcatcagcagttgatttgcctgaaattgttgtagctgctccacttcagccacctactttgtcatggagcctatacttgccattgttgaaagtatttgagtatttacctcgtgggagtccatctgaagcatgccttatgagaatttttgtggcaacagttgaagctatactgagaagaacttttccatcagaaacctctgaacaatccaggaaaccaagaagtcaatctaagaaccttgctgttgctgaactccgaacaatgatacattcactctttgtggagtcctgtgcttcaatggaccttgcgtccagattactatttgtagtattaactgtttgcgtcagtcatcaagctttgcctgggggaagtaaaaggccaactggtagtgataatcattcctctgaggaggtcacaaatgattcgagattaaccaatggaagaaacagatgtaagaagagacaaggaccagttgctacattcgactcatacgttctagcagccgtttgtgccttatcttgtgagctccagctgttcccttttatttccaagaatgggaaccattcaaatctgaaggactccataaagatagtcatacctggaaaaaccactggtatcagtaacgagctacacaatagcattagctcagcgattcttcatactcgtagaatacttggcatcttggaagctctgttctccttgaagccatcatctgttggtacttcatggagttatagttcaaatgagattgttgcagcagctatggttgctgctcatgtttctgagttatttcgtcgatccaggccatgcttaaatgcactgtctgcgctgaagcaatgcaagtgggatgctgagatttctaccagggcatcatccctttaccatttgattgacttgcatggtaaaacagtgacctccattgtgaacaaagctgagcctctagaagctcacctgacccttacaccagtaaaaaaggatgaacctcccattgaggaaaagaacattaactcatcagatggtggtgcattggaaaaaaaggatgcttcaagatcacacaggaaaaatggttttgcaagaccactcttgaaatgtgcagaagatgttatactaaatggtgatgtcgcaagtacttctgggaaagccattgcaagtttacaggtggaagcttctgatttggcaaacttcctcaccatggaccgaaatgggggttacagaggttctcaaactctcctaagatctgtactgtcagagaagcaggagctatgcttctctgttgtctcattgctctggcagaagctcattgcatctcccgaaatgcagatgtctgcagaaagtacatcagctcatcagggttggagaaaggttgtggatgcgctttgtgacattgtttcagcctcaccgaccaaggcttcagctgctatcgttctgcaggccgagaaggacttgcagccctggattgctcgagatgatgagcaaggtcagaagatgtggagagtcaaccagcgaatagttaagctgatagcagagcttatgaggaaccacgatagcccagaagcattggtgatccttgctagtgcttcagatcttcttcttcgagcaactgatggaatgcttgttgatggtgaagcttgtactttaccacaattagagctattggaagtaaccgccagagcagtccatctcatcgtcgaatggggagattcaggtgtatccgtcgctgatggcctctccaatctgctgaagtgccgtctatcaaccaccatccgctgtctttcgcaccccagcgcgcatgtccgtgcactcagcatgtccgtccttcgcgacatcttgaacagcggacaaataaactccagtaagctcatccaaggggaacaccggaatggcatccagagcccaacctaccagtgcttggcagcaagcatcatcaactggcaagccgatgtggagagatgcatagagtgggaagcccacagccgccgcgccaccgggctgacgctcgccttcctcaccgcggcggcgaaggagctcggctgcccactcacttgctgacaaggccacaccatgactgtcactgcaagcagctgctgtaggatcagcgagtaggaaaggatgacttgccggccagtttcctgagatgtgatttaagactgatattagctgatgttcccaagcatgatacggggcttgctcccaagatgtgatttttactttacttttggttaatgtgctaccgctgacattagatgttcaagcatatgaaaactgcttgtgctgtaacttgtatgtctgtaacgtaaaaatctttccatatggtaaccggggaagcagaggtatatccttttctgctgttgtatctatttccagtttcctgctg

SEQ ID NO: 13402 - DNA, 1690 bp, Oryza sativa nipponbare
  Clone ID: jC-osleLIB3474046g02_FLI
cgaccagacgtcgagtcgagcattaactcagtcagggtggccatggcgctcaaggtcgtctctttccccggggacttggccgcggtctcattcctcgactccaacagaggaggagctttcaaccagctcaaagtggacctcccgtttcaaacgagggacagaagagcagtttccctgagaaggacttgctgttcaatgcaacaggctccaccaccagcatggcctggtcgagccgttgttgaacctgggaggaggtcatgggatggccccaagcctatctcaattgttggctcaaccggttctattggcacacagacattggacatagttgcggagaatccagataaattccgggttgttgctcttgctgctggctccaatgtgactcttctagctgatcaggtgaaaacattcaaaccaaagcttgttgctgtaagaaatgagtcattagttgatgagctaaaggaagccttagctgattgtgattggaagccagaaattattcctggtgagcaaggtgtcatagaggttgctcgccacccagatgcagttacagttgttactgggatagtagggtgtgcaggactgaagcctacagttgctgcaattgaagctgggaaagatatagcattggcgaacaaagagacacttattgcaggtggtccttttgtgcttccccttgcacaaaagcacaaagtgaaaatacttcctgctgattctgagcactctgctatatttcagtgtatacaaggcttgcccgaaggagcacttcgccgcattattttgactgcatcaggtggtgctttcagggactggccagttgacaagttgaaagaagtaaaagttgctgatgctttaaagcacccgaactggaatatggggaagaagattactgtagattctgctacattattcaacaagggtttagaagttattgaagcacattatttatttggtgctgaatacgatgacattgaaattgtgatccacccacaatctatcatacactctatgattgaaacccaggattcatctgtgttggctcaactgggatggccagatatgcggataccaatcttatacaccatgtcttggccagacagaatctattgctcagaggtcacctggccccgactagatctttgcaagctgggttcactgacattcaaagctcctgacaatgtgaaatacccgtcgatggatctcgcctatgcagctggaagagctgggggcaccatgacaggagttctgagtgctgctaatgagaaggctgtggagttgttcatcgatgaaaagatcgggtacctggacatcttcaaggtggtggagctgacatgcgacgctcatcggaatgagctagtaacaaggccatcactggaggagatcatacattatgatctgtgggcgagggagtatgctgccagcctacagccatccactggcctcagccctgtacctgtctagtacttgtagcaatacaaaattacagtagcattgtacactactgccgtgccagctccatgcatagtcagcagctggccactctctagctatatctagatgcgagagaattttaaggatgtaaatcatgccttcacatgaataaatcgttcgtccgtgcgttgtgtattcatgtaaattttgacggatggtcaagtaaaaataacaatggcaaattaatttagggaag

SEQ ID NO: 13403 - DNA, 1665 bp, Oryza sativa nipponbare
  Clone ID: JC-OSLELIB3474051H06_FLI
cacaaatacagggggactcgtcttcttccccgagctttgcgagcagagtcgttcagccatggcgcggcaggagcagcagcagcacctgcaggtgctgagcgcgctggacgcggcgaagacgcagtggtaccacttcacggcgatcgtcgtcgccggcatgggcttcttcaccgacgcctacgacctcttctgcatctccctcgtcaccaagctgctcggccgcatctactacaccgacctcgccaaggagaaccccggcagcctgccgcccaacgtcgccgcggcggtgaacggagtcgcgttctgcggcacgctggcggggcagctcttcttcgggtggctcggcgacaagctcggccggaagagcgtgtacgggatgacgctgctgatgatggtcatctgctccatcgcgtcggggctctcgttctcgcacacgcccaccagcgtcatggcgacgctctgcttcttccggttctggctcggattcggcatcggcggcgactacccgctgtcggcgacgatcatgtcggagtacgccaacaagaagacccgcggcgcgttcatcgccgccgtgttcgcgatgcaggggttcggcatcctcgccggcggcatcgtcaccctcatcatctcctccgcgttccgcgccgggttcccggcgccggcgtaccaggacgaccgcgcgggctccaccgtccgccaggccgactacgtgtggcggatcatcctcatgctcggcgccatgccggcgctgctcacctactactggcggatgaagatgccggagacggcgcgctacaccgccctcgtcgccaagaacgccaagcaggccgccgccgacatgtccaaggtgctccaggtcgagatccaggaggagcaggacaagctggagcagatggtgacccggaacagcagcagcttcggcctcttctcccgccagttcgcgcgccgccacggcctccacctcgtcggcaccgccacgacatggttcctcctcgacatcgccttctacagccagaacctgttccagaaggacatcttcaccagcatcaactggatccccaaggccaagaccatgtcggcgctggaggaggtgttccgcatcgcgcgcgcccagacgctcatcgccctgtgcggcaccgtcccgggctactggttcaccgtcttcctcatcgacatcgtcggccgcttcgccatccagctgctagggtttttcatgatgaccgtgttcatgctcggcctcgccgtgccgtaccaccactggacgacgaaggggaaccacatcggcttcgtcgtcatgtacgccttcaccttcttcttcgccaacttcggccccaactccaccaccttcatcgtgccggcggagatcttcccggcgaggctgcgttccacctgccacggcatctcggcggcggcggggaaggccggcgccatcatcggatcgttcgggttcctgtacgcggcgcaggacccgcacaagcccgacgccgggtacaaacccgggatcggggtgaggaactcgctgttcgtgctcgccggatgcaacctgctcgggttcatctgcacgttcctcgtgccggagtcgaaggggaagtcgctggaggagatgtccggcgaggcggaggacgacgacgacgaggtggccgccgccggcggtggcgccgccgt

SEQ ID NO: 13404 - DNA, 1516 bp, Oryza sativa nipponbare
  Clone ID: JC-OSLELIB3474052F08_FLI
cgcggcagaggaaagaggagaagaaaagatggcggctttcgcctccgctctccgcgttctcccctcgccgccggctgcggtgcctcgtcggcttcgctcgagagaacaaaggcagggctgtagatctcgaaggtattcaaaagtcgtggcttactacgctctcactactccgccgtataaacttgatgccctggaaccttatattagcaagaggacagttgaacttcactggggtaagcatcagcaagactatgtggatagcttgaataagcagcttgctaccagcatgttctatgggtacactctggaggaactaataaaagaagcatacaacaacggcaacccattaccagaatataataatgcagcacaggtatggaaccatcacttcttctgggaatcaatgcagccagaaggtggtgggtcaccagggcgaggtgtcctgcagcagatagagaaggattttggctcttttactaattttagggaagagtttatacgctcagcattatcacttttggggtctggctgggtttggcttgtctgtaagttttttattttcattttctttgaagttcagcctgtacaggcactgttggttcaatctgacttcctgaaatgttgtttctacaatctaaatttagtttttaaagtctgatttatacacgtctggtctatcttttgcttgtttcagtgaagagaaaagaacgaaaattttcggtagtccatacacaaaatgccatcagtccacttgcacttggtgatattccactcatcaatctagacttgtgggagcatgcttactacttggattacaaggatgacaggcgaatgtatgttacaaactttatcgaccatcttgtctcttgggatactgtcactctacgcatgatgcgcgctgaggcttttgtgaaccttggtgaaccaaatatcccagttgcatgatatgagatgatatggatatgacctagagatatctatgcatgtattctcatcatgagcgacgccgaggaatttctagatcacatgatacctgatgctgagattcgcatgcatgagagacacttacaccacctcatgtcctgcacggtgaaatagtggaaatctgcttgaggataaacagctttggttttatcgtcaccttggaattttgatatagcatcaaagcaaccttgacactagagcatgattacagagtatgggccatcgatctaacttcttcttgaagctgcaccacttcttgcaaacgtttatgcttcagaactaggacccatggtcccattatgctttttagattagatcttcatcctaagtttcgacaactcatagctgtagtttttgtctttcttttggcacagaattctgtcattgttaagcctagctttgttccctctattatgtaacctgacctttatgtccccattgctcattccttttgtcgacattgaattatttgatgcgatattttcgcatccattactaagcttttgctcaaagtcacagcctattagccttc

SEQ ID NO: 13405 - DNA, 1357 bp, Oryza sativa nipponbare
  Clone ID: JC-OSROLIB3475003E02_FLI
gttttcaactataatccaccacaactcgtgcaacatcagctcactcgtgttcccaaccgcgacaaagcttcacagatggaggctcagaaccaagaggtcgctgccctggtcgagaagatcgccggcctccacgccgccatctccaagctgccgtcgctgagcccatccgccgaggtggacgcgctcttcaccgacctcgtcacggcgtgcgtcccggcgagccccgtcgacgtggccaagctcggcccggaggcgcaggcgatgcgggaggagctcatccgcctctgctccgccgccgagggccacctcgaggcgcactacgccgacatgctcgccgccttcgacaacccgctcgaccacctcgcccgcttcccgtactacggcaactacgtcaacctgagcaagctggagtacgacctcctcgtccgctacgtccccggcattgcccccacccgcgtcgccttcgtcgggtcgggcccgctgccgttcagctccctcgtgctcgccgcgcaccacctgccggacgcggtgttcgacaactacgaccggtgcggcgcggccaacgagcgggcgaggaggctgttccgcggcgccgacgagggcctcggcgcgcgcatggcgttccacaccgccgacgtggcgaccctgacgggggagctcggcgcgtacgacgtcgtgttcctggcggcgctcgtgggcatggcggccgaggagaaggccggggtgatcgcgcacctgggcgcgcacatggcggacggcgcggcgctcgtcgtgcggagcgcgcacggggcgcgcgggttcctgtacccgatcgtcgatcccgaggacgtcaggcgtggcgggttcgacgttctggcggtgtgccacccggaggacgaggtgatcaactccgtcatcgtcgcccgcaaggtcggtgccgccgccgccgccgccgcggcgcgcagagacgagctcgcggactcgcgcggcgtggttctgccggtggtcgggccgccgtccacgtgctgcaaggtggaggcgagcgcggttgagaaggcagaagagtttgccgccaacaaggagctgtccgtctaacagccggacgatcgaaaggcgcactatattatggcaataaatcatttgattatacttatgctgcatttgcgaagctaaggtatactatgcaagccatatgtttgtgttcgtacgtgttgtttgggacgtacagttgtgttgttgtacgtcgtgaagtactgaagtgttcacagtagatcacaagttcacagcaatcaatgaggaccctgtaagccagtgtaaacgaggaacatgccatctgtgtatgacagtgagaaattatataagaaaaacattttgtgac

SEQ ID NO: 13406 - DNA, 1710 bp, Oryza sativa nipponbare
  Clone ID: JC-OSROLIB3475005G05_FLI
gctccctcttagacagaggccagagggagaaagagagagagagagaggagaaggctgagactgaacattcaagatggccggaggtgtcatcgtggcgaacgacggtgatggctccgccgtggaccacggcggacggctgacgttctcggtggtcatcacctgcctcgtggcggcctccggcggcctcatcttcggctacgacgtcggcatctcaggcggcgtctcgacgatggagccgttcctgcggcggttcttccccggcgtggtgaggaggatggcggaggcgaggcccgggaacgagtactgcgtctacgacagccaggcgctgacggcgttcacgtcgtcgctgtacgtcgccgggctggtggcgtcgctcgtggccagccgcgtcaccagggcgatggggcggcaggccgtcatggtcatgggcggcgcgctcttcttcgccggcggcgccgtcaccggcttcgccgtgaacatcgccatgctcatcgtcggccgcatgctgctcggcttcggcgtcggcttcaccaaccaggcggctcctctcttcctcgccgagatggccccgacgcggtggcgcggctcgctcacggccgggttccagttcttcctcgccgtcggcgtcgtcatcgccaccgtcaccaactacttcgcgtcgcgcgtcccctgggggtggcgcctctccctcggcctcgcgggggcgcccgccgtcgtcatcttcctgggcgcgctcttcctcaccgacacgcccagcagcctcgtcatgcgcggcgacacggcccgcgcgcgcgccgcgctgctccgggtgcgcggggctggcgccgacgtggaggcggagctgaagggcatcgtgcgcgccgtggaggtggcgcgccagggggaggacggcgcgttccggcggatggcggcgaggcgggagtaccgcccttacctggtgttcgccgtggccatgcccatgttcttccagctcacgggcgtcatcgtgatctccttcttctccccgctggtgttccgcaccgtcgggttcggcagcaacgccgcgctgatgggcaacgtcatcctcggcgccgtcaacctcgtctgcctcatgctctccaccctcgtcatcgaccgctacggccgcaaggtgctcttcatggtcggcggcgccatcatgatcatcgcccaggttggggtggcgtggatcatgggggcgcaggtggggaagaacgggtcggaggcgatggcgaggccgtacgcggtggcggtggtggcgttcacgtgcctgcacacggcggggttcgggtggtcgtggggcccgctggggtgggtgatccccggcgagatattcccggtggacatccggtcggcggggcaggcgatgaacgtgtccatcggcctcggcctcaccttcgtgcagacgcagtcgttcctcgccatgctctgccggttcaggtacggcaccttcgcctactacgccgcgtgggtcgccgtcatgaccgtcttcatcgccgtcttcctgccggagaccaagggcgtcccgctcgagtccatggccaccgtctgggcgcgacactggtactggaagcggttcgcgcgggagcaaccaaagacgagcgccgacgaaccgaccgggacgtactgatgtttcacgatgtgtagatgtacttaattctgtggagtacatgtcttgtataacttttgaatcatggtacttggtcctagttc

SEQ ID NO: 13407 - DNA, 1304 bp, Oryza sativa nipponbare
  Clone ID: JC-OSROLIB3475011G10_FLI
tagtgatttagggtttctagcaaagcacttgtagaaaaatgaagatcaagcttgatttccacatgattaagggggatggtgactcaagctacgcaaagaactctagtacccagggaaaagccattctttcaaccaaaccaatggttgagaaagccacgaaagaaatatgcatggatcttcaacctcggtcaatggtcgtagctgacctaggatgctcctctggtgcaaacacgctcctctttatctctgaggtcattgctatcataagtgaagaaacccctgctaacaacaacaatagggagtgccccatggaggtccaattcttcctcaatgacctacccaacaatgatttgaaccacaatttccagttgctagagcaattcaagcagtcaatagtgcgagattgtgctcgcagagggctacaacatcctccatactacgttgctggcgtgccaggatctttctacaccaggctcttcccttgcaatagtgtccatatcttccactcatccttcagcctcatgtggctctctcaggtcccagatcttcttggtagcagcatgaacaaagggaacatttacagtgattttgcctcccattatctttttacagaccacaaaatcacttactaaagatttttgatttagaataaaaaaatatttcatgattcttttattatcttacacaatagggtcgtgtggagaaggagaagctggactctttcaaccgaccaatgtacggcccttctgtggatgagctgaagcagctggtacaagagagccagttgttcgacatcatagacatccgggcctttgatttaacttttgatcccatagacaaattggagttggaagagagcgccaccgctacaacagggagaccatatagtgttcatgaggctatcgataacaaccacaccacaactttaagagcggtgacggagaccctattggcaagccattttggggagtctataatggatgatctcttcacgctctttgcatgtaatgtcacgcggcatcttgagagctgtgcgtgggaggagagcagcattatggccatttctgtgtcactggacacaaaagtgcgaggatgatagccaattaggaacataagaactggttgagaatttagatatggtctcggtagcccaaccagatcagttcaacctgttgtctacatgacagtactgagtcttgatccagcaagtgtctcctccaagcttagggctagtccgaaccagcactgttcaccctcagaaaacatgatggattattagcacatgattatgtattaaatattat

SEQ ID NO: 13408 - DNA, 1304 bp, Oryza sativa nipponbare
  Clone ID: JC-OSROLIB3475015G11_FLI
gtgagagtgatcgatctttgttagctagagtgttgagcaatggcgtccaagctgggtatggttgtgctactgatctcgggcctctttgctgcccgttgcgcggccgtggtgaccaccggcgaacccgtcgtcgccggcctctcctgggggttctatgacacgtcgtgcccgtcggtggagggcatcgtgaggtggcacgtcaccgaggccctccgccgcgacatcggcatcgccgccggcctcgtccgcatcttcttccacgactgcttcccgcaggggtgcgacgcgtcggtcctcctgacgggttcccaaagcgagctgggtgagatacccaaccagacgctgcggccgtcggcgctgaagctcatcgaggacatccgcgccgccgtacactccgcctgcggcgccaaggtgtcctgcgccgacatcaccacgctcgccacgcgtgacgccatcgtcgcctccggcgggccctacttcgacgtgcctctggggcggcgcgacgggctggcaccggcgtcgagcgacaaggtgggcctcctgccggcgcccttcttcgacgtgcccacgctcatccaggcgttcaaggaccgaaacctggacaagacggacctggtggcgctgtccggcgcgcacaccatcggactaggccactgcggcagcttcaacgaccgcttcgatggctccaagcccatcatggaccctgtgctggtgaagaagctgcaggccaagtgcgccaaggacgtgccggtgaactcggtcacgcaggagctggacgtccgcacgcccaacgccttcgacaacaagtactacttcgacctcatcgccaagcaggggatcttcaagtccgaccagggcctcatcgaggacgcgcagaccaaccgcaccgccgtccgcttcgccctcaaccaggccgccttcttcgaccagttcgcacgctccatggtcaagatgagccagatggacgtcctcaccggcaacgccggcgagatccgcaacaactgcgccgctcccaaccgccgctcctccgacctcctcaacgctgccgacgacgaccaaggcttcgccgccgacgcctaattaacttatggagtaattagtgatcgttttatgtttatgttttgtgctagtaataataattaagaggatgccatctgcgcgtggtgtttggtttccatgcattctctgcttagttagaatggttttgcttcataaaaagtaaagttactactcgattcctcggtcgggacagagtaactgcatgtcaaatgtatcatcatcatcagttagtgctacatcatcac

SEQ ID NO: 13409 - DNA, 1733 bp, Oryza sativa nipponbare
  Clone ID: JC-OSROLIB3475020C05_FLI
ggcggcgcgggtggagttcgggtacgagagggacttcgaggggaggtaccaggtcgggaggctgctcggccacggccagttcggctacaccttcgccgccaccgaccgggcctccggtgaccgcgtcgccgtcaagcgcatcgacaaggccaagatggttcgccctgttgctgtggaggatgtaaagagagaagtgaagattcttaaagaacttaaaggccatgagaatattgttcacttctacaatgcgtttgaagatgactcatatgtatatattgtgatggaactatgtgagggtggtgaactattggaccggattttggcaaaaaagaacagccgttatagtgagaaagatgctgcagtggtggtgcggcagatgctcaaagtggcagctgagtgccatctgcatgggctagttcaccgagatatgaagcccgagaacttccttttcaaatcaaccaaggaggactcacctttaaaggcaacagattttggtctgtcagacttcataaaaccagggaaaaagtttcacgatatagttggcagtgcctattatgtagcaccagaagttttaaaacgacggtctggccctgagtcagatgtttggagcataggagtcataacttatattttgctctgtgggagacgccctttttggaataagacagaggatggcatattcagagaggtactaagaaacaagcctgattttcgtaagaagccttggccaggcatcagttcaggtgctaaagatttcgttaaaaagttacttgtaaagaacccaagggcaagattaaccgctgctcaagctctctcgcatccatgggtaagagaaggaggagaagcatctgagatccctgttgatatatctgtattgtccaacatgcgtcagtttgtcaagtacagccgttttaagcaatttgctctgagggctttagcaagtacactaaaagaggaagaactagcagatctgaaggaccagttcgatgcaattgatgttgataaaagtggatcaattagtattgaggaaatgcggcatgcccttgcaaaggatcttccttggagattgaagggcccccgtgttctcgagattatccaagcaatcgacagcaacactgatggtcttgtggactttgaagagtttgtagcagcaaccctccatatacatcaaatggctgagcttgactctgaaaggtggggcctacgctgccaggctgctttcagcaaatttgatctggatggtgacggatacatcactccagatgaactcagaatgcacactggcttgaagggttccatcgagccattgctggaggaggccgacatcgacaaagacgggagaataagcttgtcggagttccgcaagctcctgcggacagcgagcatgagcaaccttcccagtccaagaggacctccaaatccacaacccctgtgaacgtcggtaagaaccgagatgagacgtcgtaaattagtcttgtaaaggttgtcttgttcctgtccgcgtgccatgtgatgttgagggtgtcttgagtttttagcatccaggttccgtgtgcagcatgcagataaagtttcggtgtagtacggagtacatacatatttttttcaaaaaaaaatgttacaagcagaaatgctgttctagtctcccattctcctccttgtacataattctatatatgtatgatttgattgcacgtattcatcgcaataaagttgcctgggattgcatgatc

SEQ ID NO: 13410 - DNA, 1493 bp, Oryza sativa nipponbare
  Clone ID: JC-OSROLIB3475020F09_FLI
agtccaggcgcttctcccccccgaagctcgcgcgcacgcacgcacgctgggcgcttcttcttcccccgcgcatcgtccgaaatcctccggattttctgaggaatccccccgaatttccttgcgtcccatcatggcctcctcagatgtctccgttgatgttcggccagagtttaactcttttgatcatttgagaagcatacgatatattgcaacagatagaccatggctgacgttatatggaataagagttcaacctgtaacaccattcagcagtttgagcagtagacctgatctggcactcattcatcaatgcctacctgatgagctgctttttgagatctttgcaaggatgagtccatattctttagggagggctgcttgtgtgtgtcgcaagtggaaatatactgtacgcaatccgactttgtggcggaatgcttgcctcaaaacttggcagaggactggaatggaggctaactaccagatggtgcagtcgctatatgattcttcttggaggaaaatgtggatgctgagaccaagaatccaatttgacggtctttatgttagtaggaacacatatatccatacggggactgcggagtggcagttcacaaaaactgtcaatgtggtttgctactatcgttacttgagattttttccaagtggaaaattcctctacaagatttccccacagaagattaaggatgttgtcaagtgcatgcatttccgggcatccaaaggtgattgtgtatttaaaggcgactacgtattgtcagaggatggccagatagaactggcactcctgtatccagggcgtcgctacacactagttaggatgcgcctcaggcttagaggcacaactctgggcgcaaacaacaggttggatgtattgaagatcttaaccaccggggtgaatgcaaccgaactgagaaactggaaaggcagcgtgcttgaacttgtggagacctgggatgaggatgagacgcatgatccagaagttcctgctgttacccacagcaggggtttgaccccatttgtgtttgttccatttgaggaggctgatacttcagtgatgaatctgccagtggagaagatggactactttgtccctgggtgatcttgcgcacaaataatagtttttccaagatatatgatgaagacgcaatttcgctgatgttagggcaataatgtgcatacaccatcagacgtcagtctttgttcaatttcatgctcatgttgcttgtatactgttgtatgaataatgctatgttttgttggtgcttgaaagcaaacattttgttggaccatcctcccgcagcaataatggtccaatacttactagtacatggtgttgccttgtaaatagatcatggtgcaactgatgaaacaatacatttgtggttcagtacatttctcaccaaacactggccttgtgatatgtagtacagatgagaaccacatgtaatataatgtaatgtaatgactgctctttctac

SEQ ID NO: 13411 - DNA, 2103 bp, Oryza sativa nipponbare
  Clone ID: JC-OSROLIB3475021B12_FLI
ctctgttttccttggccctcctcgtctctggtcaaccgggggcaagtctgactgcgtccgcatctttgctttctctctcttcttcttcttccgcgcctgtttcttggctcccggccgaggacggcgggcgggatgaaggcgggcgagcggccgaagctggtccggggcgtccggcaggagtcgcggcggttccggctgctggtcatcgtcgtcggcttcttcctcgtctccctcaccttcgtcttcgtttccaagcccgacgccatcctcttcagcttgaacggcaagcttccggtggaacaggcgccgacgtccatcctgatccagcagaaggtcaacgagccctccggcgagtcccggaaaacctccaccgacgctctccgtggtgaccccaaagtggtcgacgacgaagctgatgcgaaaccaaaagggacaggaggaggcagcgaggaggaagaggggagagtgctgagcgagccggacccgaccagcggaatgatggagccgacccacaacaaggacggcaacggccataaatctcaccaggagacgttaggcggtggaggagacggggagagtaaagggaatgacgaggagggcgaacacgcggagcagaagcataaagtcaccctcccaacagtttccaattacacaattcatgatgctgctgaggacactgaaaatgccaagcaagaaggtatgaataatgtccagcagggtagcaagcccttgtgtgatttctctaatttcagagcaaatgtctgcgagatgcgtggtgacgttagaattcatccaactgccacttcggtcttgttcatggagcctgaaggttcgcagagggatgaggtgtggaagattaagccgtaccctcggaaaggggatgaattctgcctcagccatatcactgaggtaaccgtgaaatcgagcaaagtggcgcctgaatgcaccaaataccacgatgtgcctgctgtgatcttctcactgaccggctacacggggaacctgttccatgatttcactgatgtgctcgtccctcttttcacgactgcaagcgagttcaatggagaagttcagttccttataacagacatggcactttggtggacgatcaagtaccagacagttctccagaagttatccaagtatcctgtgattgatttcagcaaggatgaccaagtgcactgcttcaagcatgccattgtcgggctgcatgcctatatggagttcacaatcgactcaaccaaggcaccgcacaactattcgatggctgatttcaacagattcatgcgtggagcttactcgctgggcagggacagtgtgaccgtgctcggtgagtaccccaagatcaagccaaggttgctcatcatcaagaggcaccgtacaagaatgtttctcaacctggatgagatcatttccatggcagaggagcttggctttgaggtggtgattgacgaggccaatgtgagctccgatatctcccggtttgcgcggctggttaactccgtcgacgtgatgatgggtgtccatggtgctgggctcacaaactgtgtgttcctgccacagcatgcgacgctcattcagatagtgccatggggtggcctggactggatatcacgcaccgatttcggcaaccctgcagagctgatgggtctgaggtacaagcaatacagcatcggcgtcgacgagagcagcttgacagatcagtaccctagagaccacgagattttcaagaatcctatctcattccaccagcgcggattcgatttcatcaggcagactttcatggacaaacagaatgtgaagctggactgcaagaggttcaggcctattcttctggaggcactggataatctaaacccgtaggctttgagatgctcttgtacaatgttccatttttcttttcacggttcgttccttttacttttatgtagtaaatctgttgtttattctctctctatctctcatggctttcatgaggagatgcaaattgtctgaattatagaaaaattaagaactacttgtgtgatagtgtaaactgtataaattgccgtcgctccaagatggaacaatattcattctaatcatataaaggttccttgaatt

SEQ ID NO: 13412 - DNA, 795 bp, Oryza sativa nipponbare
  Clone ID: JC-OSROLIB3475021F07_FLI
ccgtcaccgcaggcgtcgccctcgccctcctccgcttcttcgaggagctcgccaagcgcggggtcttcgagcagaaactcaatagaaaacttgtgcatataactatcggtatggtattcttgctcttttggcctcttttcagctcaggaagctatgctcctttcctggctgcagtagcaccagggattaatattataaggatgcttctgctggggttaggagtaatgaaaaatgaagctatggtaaaatcaatgagccgatctggagacccgagggaacttctcaagggtccactgtattatgctaccactataacttttgccacttctatattctggagaacctctccaatcgctatagcccttatttgcaacttatgtgctggggacggaatagcagacatagtggggagacgtcttggccaagaaaagcttccatacaaccccaacaagtcatatgcaggcagcatagcaatggcactagctggtttcatggcttcaattgggtatatgcattacttccagtcattcggtttcattgaagaaagctggtccttggcttttggcttccttgttgtttctgtaactgcagcacttgtagagtcccatcccatcagcacacatttggatgacaacttgactgttcctttaacatcattcctagttggtagccttgttttctgatgtttacctttgaaggaaaattactgggagatcttctgacatgtaaggaatatttcaataaggaactttggttccaatggtatgaacaaaattgcccactggtacttttacc

SEQ ID NO: 13413 - DNA, 742 bp, Oryza sativa nipponbare
  Clone ID: JC-OSROLIB3475038D07_FLI
gcagcagcagcttgtggcggcggcggcggcggctggtgggatggcgaagcaggagctggtggatgagagcaacaacaccatcaacagcggcgggagcaacgggagcggcggggaggagcagaggcagcagtccggggaggagcagcaccagcaaggggcggcggcgccggtggtgatccggcgtcccaggggccgccccgccggctccaagaacaagcccaagcctccggtcatcatcacgcgcgacagcgccagcgcgctgcgggcgcacgtcctcgaggtcgcctccgggtgcgacctcgtcgacagcgtcgccacgttcgcgcgccgccgccaggtcggtgtctgcgtgctcagcgccaccggcgccgtcaccaacgtctccgtccggcagcccggcgcgggccccggcgcctccctccgccaccggcctcaccgtctacgtctccggcggccaggggcaggtcgtgggcggcacggtcgccggaccgctcatcgccgtcggccccgtcgtcatcatggccgcctcgttcgggaacgccgcctacgagcgcctcccgctcgaggacgacgagccgccgcagcacatggcgggcggcggccagtcctcgccgccgccgccgccgctgccattaccaccacaccagcagccgattcttcaagaccatctgccacacaacctgatgaacggaatccacctccccggcgacgccgcctacggctggaccagcggcggcggcgg

SEQ ID NO: 13414 - DNA, 841 bp, Oryza sativa nipponbare
  Clone ID: JC-OSROLIB3475040A01_FLI
cggatcggcgctgttcgagatgggcaacaccagggtcattgccgctgtctacggccctcgagaggtccagaacaaaggtcagcaagtcaacagcaaagatgctttggtgcgttgtgagtataggatggcagattttagtactggggatcgaaggagaaagccaaagggtgacaggcgatcaacagaaatttcacttgttatccggcaaacaatggaggcaagcattttaacacatttaatgccacgttcacagattgatatatttgtccaagttcttcaagctgatggtggtacaagggctgcatgcatcaatgctgctacattagcacttgcagatgctgggattcccatgcgagacattgttacatcttgcagtgctggttatctgtgttctactcctttgcttgatctgaattatatagaagacagtgctggaggtccagatgtcactgttggctttcttacaaagatggacaaagttactcttctgcagatggatgcaaaattaccaatggatacatttgaaactgtaatggaccttgcaattgaaggctgcaaagctatcgcaaactacatccgagaggtgctattggagaacacaagacggctggagtgccagcgtggttagttaacgctagtaggtgatgcccttcaattgagccacctttgactggtcttgtgacaagcaaattccctagagattcaaagattaatggtgcgatccaaatacataatgaaagatggtcaacatatcactagaatttagattatgctgattaagaacaatttctctgccagatatttgccatcagattcaaaattatgtggagctggaaactgc

SEQ ID NO: 13415 - DNA, 743 bp, Oryza sativa nipponbare
  Clone ID: JC-OSROLIB3475042F09_FLI
gtatcattcgtgaaggataaagaatcttgggacttgaacaataccgagaagattgagactgctggggcaaagaaagaagaggggaatgcattgttcaagctgggcaaatatgtcagggcttcaaagcgttatgagaaggctgcaaaattcattgagtatgacagctcatttagcgaagatgagaagaaacaatccaagcaactgaaggttacctgcaacttgaacaatgctgcctgcaagctgaagctgaaagattacaagcaagctgagaagctttgcaccaaggttctggaacttgacagccaaaatgtcaaggctttatacaggagggcccaagcttacatgcaacttgctgacctagagttagcagaggtggatattaagaaggcacttgaaattgatcctgataacagggatgtgaagttgacatacaagaacctcaaggaaaaggtcaaggagtacaacaagaaggatgccaaattctacagcaatatgttcgccaagatgaccaagcagccagccgaagacggcaaagctggatctggagctgaatcgaagcaaggatcggaacctgttactgctgcctaaggacaggacactcacgacatatcttagattttgtgtgctggctaatctttgttctagtggtgcactgatgagaaacgttacttcccaagttgtcgggcgatgatgattcttgttgagattttcaaattgcaatccatatttgaaccaatctcgtc

SEQ ID NO: 13416 - DNA, 1523 bp, Oryza sativa nipponbare
  Clone ID: JC-OSROLIB3475049G05_FLI
tctccggcggcggcgtcttccggcggcgttccggcgaggctccggccgcacctcacccggctcaccgtgttcctgatcgtcttctccgccgggtactcggttggcatcatgtcgtcgtccatccggccgcctgcgagcaagccgtcgcagacggtcatacggccgcgcgccgcgcacctctccggcaccgcctcctccacggatgtcccggcgagcaacggcagcgctgcggcggcggcgaactacccgcgctcgccgccgcacgatctgttccggttcagggaggagtgtggcgaggcgatacccagcgacgccgtcgtgcggacgctcctcgacaagctgttcgacggggagagcccgtacgagagcttcccgccgccgcacaccgccgcgctgctgcacccggctgcggcgaggccgcgcgggtggggctcgaccggcgcggtgttcgcggagctgatcgaggaggtgcggcccgacgtcatcgtggagctcggcgccttcctgggcgcgtcggcgctgcacatggcggccgtgtccaagaacctctcgctgtccccggccatcctctgcgtcgacgacttccgcggctggccggcgttccgcgaccgcttccgccgcgacgtcccgccgccgcgccacggcgatgcgctgctgctgccgcagttcatgtcgaacgtggccgcggcgggcgccgacgcgacggcgcgggtgctcccgctccccttctcgacggcgtccgcgctcgccgcgctctgccactggggcgtctacgccgacctcatcgaggtggacgccggccacgacttccactcggcgtgggcggacatcaacctcgcctgggccgtgctccgccccggcggcgtcatgttcggccacgactacttcaccgccgccgacgaccgcggcgtccggcgagccgtgacgctgttcgccagggtgaagggcctcaccgtccggccgcacggccagcactgggtcctctccccgaagccgccgctccgccgcgacggccggtgactcctcgccggcgaaaagctcgccgtcgccggcggggccacgcactcggcgacgtgacgtcggcgcccgacacgtgttcgtctcaaaaactcccaaccaccacccttttttcaaagctccattcttacacaagaatcaattcaagaatttggttcttctactttgtactgtgaatttataccaaattcatacacacgagatcatacgtactacaatgtattcaggtgagcagatgacatgttcttgtcggtattacttgtttcatttttttttgtttataactacctaatttatccattcaagagtacattaatttcaatcaaacaattaggtaagttaaattctagtgagaccaagtatttgccgttggtttccgtctctctgaatacgtgggtattaacgcgtggtgcatgtacatagcggtgcgcgtgcgtatgcgtctttcgtgtaataaaaaaggtttaaatcttttgctatgaatgtatcttgatcagtatgggcac

SEQ ID NO: 13417 - DNA, 1492 bp, Oryza sativa nipponbare
  Clone ID: JC-OSROLIB3475056D05_FLI
aacaaagaaagaaaagcatcacaaatctcacgcactgtctctcgttcgcgcaaagcacgctgcttttctccgctttgcgagcaccatagcctagcccaccatgtgcggcggcgccatcctctccgacctcatcccgccgccgcggcgggtcaccgccggcgacctctggctggagaagaccaagaagcagcagcagcagaagaagaagaacaagggcgcgaggaggctgccactgcgccaagaggaggaggatgatttcgaggccgacttcgaggagttcgaggtggattccggcgagtgggaggtggagtccgacgccgacgaggccaagccgctcgccgcgccccggagcggcttcgctaaaggtggattgaaaaacactactgttgctggtgctgatgggcctgcagcaaggtctgctaaaaggaagagaaagaaccaattcaggggtatccgccagcggccatggggcaaatgggctgcggaaatcagagatcctcgcaaaggtgtccgcgtctggcttggcaccttcaactctcctgaggaagctgccagagcttatgatgctgaagcacgaaggattcgaggcaagaaggccaaggtcaatttcccagatggggctccagtggcttctcagaggagtcatgctgagccctcctccatgaacatgcctgctttcagcatcgaagagaagccggccgtcatgtcagcaggcaacaaaaccatgtacaacacaaatgcttatgcctaccctgctgttgagtacaccttacaggagccatttgtgcagattcagaatgtctcatttgttcctgcaatgaacgcgattgaggatactttcgtgaacctgtcctctgatcaagggagcaactcctttggttgctcggactttagccaggagaatgatatcaagacccctgacataacttccatgcttgcaccgaccatgacaggtgttgatgactccgcattcctccagaacaatgccagtgatgcaatggtacctcctgtgatggggaatgctagcattgatcttgctgacctggagccgtacatgaaatttctgatcgatggtggttcggatgagtcgattgacacccttctgagctctgatggatctcaggatgtggccagtagcatggacctttggagcttcgatgacatgcccgtgtcggccgagttctactgaggggtttggggtgtagcaactggtgcctgtatatataaggacaaatggaataaacattctggacatccaagaagcggcatgtgtctgtcgggcgcttctagttgcgctatatagctatgttagtatgttagtatgtgctgtgtctagcttagatgctgaagtctcaagtactatttggcagtgaaactatctatctgtaactgctatatgaggctggaacaagttacttagcttctaccttatctgtacttgctatagtggctgtgaaccttgtggatctgaactctgaagccaatgtttact

SEQ ID NO: 13418 - DNA, 671 bp, Oryza sativa nipponbare
  Clone ID: JC-OSROLIB3475060H01_FLI
acacaccactccatttctgagctcttctagtttgagtgagagagcagcagaagggagtagtgcaagatgccgatccgcaacatcgccgtggggagccaccaggaggtgtaccacccgggtgcactcaaggcggcgttggccgagttcatctccaccctcatcttcgtcttcgccggccagggctccggcatggccttcagcaagctgaccggcggcggagcgacgacccccgccgggctgatcgcggcggcggtggcccacgccttcgccctgttcgtggcggtgtccgtcggcgccaacatctccggcggccacgtgaacccggccgtgaccttcggcgccttcgtcggcggcaacatcaccctgttccgcggcctcctctactggatcgcccagctcctgggctccaccgtggcgtgcttcctcctccgacgggaactggaggaactgagcggtggggccctcatggccaagttatctatctatctaatcgagctaccatcatcatcatccgatcgttatcatcgttagttttgtgtggaactactatctagtttgtgttactgtgtggttgcccatctgtgtttttgatcgcaagaagaaagctcgtctcgtgtttgctttgatcaaatgaaatgaatgaatgaatcttagtgtgctccgctctcgtc

SEQ ID NO: 13419 - DNA, 1173 bp, Oryza sativa nipponbare
  Clone ID: JC-OSROLIB3475P018D06_FLI
cacgactacatcggcctctccgctgcggcggcgtccccgacgccgagctcgtcgtcctgctcgtcctcgccgaacccaggcggcgaggcccgcggcccacgcctcacgctccgcctcggcctcccggggtcggagtcccccgagcgggaggtcgtcgccgcggggctcaccctcgggcctctgcccccgaccaccaccaaggcggcctccaagcgcgccttccccgactcctccccgcggcacggcgccagctccggctccgtcgccgccgccgcagcttgccaggacaaggcggcccccgccgccgctccgccggctgcaaaggcgcaggtggtgggatggccgcccgtgcggaactaccgaaagaacacgctggcggcgagcgcctccaagggcaaaggggaggacaagggcacggctgaagggggccctctctatgtcaaggtgagcatggatggagccccctacctcaggaaggtcgacctcaagatgtattctagctatgaggacctctccatggctctcgagaagatgttcagctgcttcatcactggtcaaagcggtttgcgtaaatcatcaaacagagataggcttactaatggttcaaaggctgatgccctccaagaccaagagtatgtccttacatatgaagataaggatgctgactggatgcttgttggtgatcttccttgggatttgtttaccactatctgccggaaattgaaaatcatgagaggatctgatgctgctggaatagctccaagatcaatagagcagtcagggcagagcagataagattaaccttcgtccggacgagaaaggcaactgatctagcagctttggaattgttcatcgcaagtatcccaaatatctcaatgtctgtgtagtttaatgtgttcatcagacctgtgcattgtatgtctgtaatttgttcctttcagatcgtgcaattgtgcgttgccccctcttttctttgcattgaaggtcaagtcgggctcttgtccgcttatttctctaaatcctagtcagttcaaaaattatccatcatgacacatgaactgatggtggataatatggcaagaagcttttctaatcattcaagcttgaacctcttgtgtgttctactactatattacatgaaagaaaatgtctaatgtctatatgttaatctcc

SEQ ID NO: 13420 - DNA, 1668 bp, Oryza sativa nipponbare
  Clone ID: JC-OSROLIB3475P047B04_FLI
gggatgtaatggaattgatgatgatgcccttactagtcttgatcaagaatgcagcaaatcactacaggttcttgatatgtcaaactcttacaatgtcactcatgtcggtgttctgtccattgtgaaggcaatgccgaatctgttggaactcaatctatcatactgctctcctgttactccttctatgtcaagcagcttcgaaatgattcataaattgcagaaactgaagctggatggttgccaattcatggatgatggattaaaatccattgggaaatcctgtgtttctttgagggagttaagtctgagcaaatgttctggagtgacagacacagacctttcttttgtcgtgccaagactgaaaaatttgctgaagctggatgttacttgttgtcgcaaaatcactgatgtttcattagctgccatcacaacctcatgcccatccctcatctctctgagaatggagtcctgtagccttgtttccagcaaaggactacagctgattggaaggcgctgcactcacttggaggaattggatcttactgacactgatttggatgatgaaggtttgaaagctctctctggatgcagcaaactttcaagcctaaaaattggcatatgcttgaggataactgatgagggccttagacacgttagcaagtcctgtccagatctccgagatatcgatttgtacaggtctggggcgatcagtgatgaaggggttactcatatagctcaaggatgcccaatgttagagtctatcaatatgtcctactgcacaaaattaacagactgttcactgagatcactttcaaaatgcataaagctgaacacattggagattcgtggctgccccatggtttcatctgctggtctctcggaaattgcaacaggatgcaggctactttctaagcttgatatcaagaaatgctttgagatcaatgacatgggaatgattttcctttcccaattctctcacaacctccggcagataaacttgtcatattgttcggtcaccgacattgggcttatatccctttcaagcatatgtggcttgcagaacatgaccattgtgcatttagcgggtgttacgcctaatggactgatagctgctcttatggtctgtggtttgagaaaagtgaagcttcatgaagcattcaaatccatggtgccatcacatatgctcaaagttgttgaagcccgtggttgtcttttccagtggattaataaaccctaccaggttgcggtagaaccgtgtgacgtatggaagcagcagtcgcaggatttgcttgtacagtgaaatgtttcaaagataaacgttgtggaaactggggcgtgttttgtggtgttgaatttatcttagagcaatatctccagtcctagagaatgagctccaaaagttttgtgccataactggctgaatagtgtattgaattactgacggtagtattgtcagaacaacatactagtactggtattttgcttgtatgccagtggaggcgagggaggttatattcttgatgtgttgtatatagcgcaggtaggaatcaacaatcaaagagagattattggggtaaagcatgtagtaagtgtggagtatgtgatatgccttgttgtgcctttttgatgcacaatttgattaatggaatggaacattgcattcgcact

SEQ ID NO: 13421 - DNA, 1795 bp, Oryza sativa nipponbare
  Clone ID: JC-OSROLIB3475P051A12_FLI
ctttggagctgagctacatagcacatccgtggagtctcttgtgctaagcaatttaccgttccagtgctctactttgtaggccatccatattagacggaagaactttatcagtattattattggaggagaccaattcaagaatgatataatggagctttaccctggctatcttgaagaccattttaacatccacaagcttagtatcagcagcgcctctcctccggagtacatgacctcggcgtcgacgcagttcgcggcaccggtcagaatgggggcgtacgaccggcctccgccagttggcatgtggagtcacgagcagttcaaggttgacaacggccaggccacgagtgcatccacgatcatggaggcagagatgaaatttgagaataggctagaagaaattccccaagtagttctggaggaagggagaaatgttgatcaggaggcaagcaagccgccagacaaggtcctcagaagacttgcacaaaacagagaggctgcacggaaaagccgcctgcggaaaaaggcttatatccaacagctggagacaagccggttgaaactagcgcagttagagcaagagcttcaacgggccaggcagcaggctgtgtatgcaaatgggagccttcgagaaccaaatcttggatttacaggaccgatcgatccaggtgccttaggttttgagattaagtacagccattgggtggacgagcagaatcgcaacactggtgagctgaggaatgcgctgctgcaggggcagacgacggaccaggacctggagctcaagttgctcgtcgaggctgggctcgacaactacaaccgcctcttcgagatgaaagaggaagccgccaactccgacgtgttctacatcatgtcgggcatgtggaagacccccaccgagcggttcttcctgtggatcggtgggttccggccatcggaggttctcaagaatttgagaccgcagctggagcctctgacggacaagcaggtcgtggaagtgggcggcctgcagcaaacctcgatgcaggtcgaggacgccctctcgcagggcatggacaagctgaagcagacgatcgcggactccctgacggcggccgacccgttcgactcccccgaggcctacatggtgcacatggccaacgccgtggagcagctcagatccctcgtccagttcgttacccaggcagatcatctccggcagcagacgctgcaggagatgcacaggatcctgacgacgcggcaggcggcgagggggctcctcgcgctgggggactacttccagcgcttccgagcgctgagctcgctatgggcagctcgcccgcgcgattcagggataagctaaacaccgtaatatggtcacggtagaagctacagatatcagtagcaattcgtcgtgttagttcgctacttcagtgtcaggtcaatggccagtgaaggatgaagagatctttctacctgtgcttcgtcgaagaagaacaactcgtgatcgactttctgcagcgccgctgcaactgcaatccaaggaatggtgtatgttcgcctgctgagatgaagaaataaccaaaattaactttggtctttctgatgtgggcacaagagaagatgtaatataatatgtaaatatatacatgttttgggtatcattgccagaggcctctacagctggttttatagacatgtgatgtaattatctgtaactagtgttgctcggttcctcctccctagtacggcagacataggtgacatactgccattgtattgtatgggagaacaaattagttcacttgagaactag

SEQ ID NO: 13422 - DNA, 1203 bp, Oryza sativa nipponbare
  Clone ID: JC-OSROLIB3475P054F09_FLI
gggaattgcgccccttatgcattagagcccccggagtcccctctgtttcgcagataagtcctttggttcccatctttttattacattcaggtcctcctagtttcttttcctttcgagtctactccttgcattcttgcgaggaagcccctcgggttggtcgaattttagtttccactccctctcctcggggagtcgttgctgttcttgttcttggtcgaggttgaggttggtggcgtagatccgatctgaggaatgtttacctatcctttcctctaacgttcgccgtactccgatgaagttgaacgtgctccgccgccgccgttcccactccttctccgtcgccttcctctactggttctacgtcttctcatgaactcatcgccttcctcccaagaacaccatctccagcctctaattgattatatcttgatttctttttcatcctcctactagtttctttcttgtgttctttggaatttttttgatctcttgaagagatccggttcttggattaagttttggacaagaaccgtactgtgaccatgtcgtcgccttcgcgccggagctccagcccggagagcaacaccagcggcggcggcggtggcgccgacgagcggaagaggaagaggatgctgtcgaacagggagtcggcgaggcgatccagggcgaggaagcagcagaggctggaggagctgatcgccgaggcggcgcgcctccaggccgagaacgcgcgcgtcgaggcgcagatcggggcctacgcgggggagctgagcaaggtcgacggcgagaacgcggtgctccgcgcccgccacggcgagctcgccgggcgcctccaggcgctcggcagcgtcctggagatcctccaggtggccggcgcgcccgtcgacatcccggagatccccgacgacccgctgctccgcccatggcagccgccgttcgcggcccagcccatcgtcgccaccgccatggccgacgccttccagttctgagccaccatggagagctcgcacgccatggccattggcatcaatggcatggttgcagctgcattacaactagtagtactagcctctgtggttgtgtctgatgatgcttattatgtttaattatggtttgcttcatgttgttttcattaatctagaccattaataagcaatgtgtgttgtaatcttgtctagtcttatgtgagatgtgttcatctcc

SEQ ID NO: 13423 - DNA, 475 bp, Oryza sativa nipponbare
  Clone ID: JC-OSROLIB3475P055E12_FLI
ctgggcgtcgtcacgtcctcactccttgtccgtctgcctgtcgccttgtctcgccttgcaggtcgtagacgacagacgagcagtagcagcagcacgaggcggccgggcccgggccacgccatgccggagaaggaggcgcaggccgccgcgttctgcggcgaggcggtgatcgccgagttcgagtccctcacgcgggacgccgccgccgtgcagcgcgacacgctgcgccggatcctggcagacaacgcctgcgccgagtacctccgctgccggggcctcgcgggccgcaccgacgccgccagcttccgcgcctgcgtgccgctcgccacgcacgccgacatcgagccctacattgcgcgcatcgccgacggcgacacgtcccccgtgctcaccgccaagcccatcacctccatctccctcagctccggcacgacgcaggggaagcgcaagtacctgcccttcaaccaggagctcg

SEQ ID NO: 13424 - DNA, 1550 bp, Zea mays
  Clone ID: JC-ZMSHLIB3569P003G12_FLI
tgtcccttgcaagttcaatctcacctccaaccatgggtaaagagaagtcccacatcaacattgtggttattggccatgtcgactctggcaagtcgaccaccacaggacaccttatctacaagcttggaggcattgacaagcgtgtgatcgagaggtttgagaaggaggctgctgaaatgaacaagcggtccttcaagtacgcgtgggtgctcgacaagctcaaggctgagcgtgagagaggtatcaccattgatattgctctgtggaagtttgagaccaccaagtactactgcacggtcattgatgcccctggacaccgtgacttcatcaagaacatgatcactggtacctcccaggctgactgtgctgtccttatcattgactccaccactggtggttttgaggctggtatctccaaggatggccagacccgtgaacatgctctccttgcgttcacccttggagtgaagcagatgatttgctgctgcaacaagatggatgcaaccactcccaaatactccaaggcacgttatgaagagattgtgaaggaagtctcatcctacctcaagaaagttgggtacaaccctgataagattgcctttgttcccatttctggttttgagggcgacaacatgattgagaggtccaccaaccttgactggtacaaaggcccaaccctgcttgaggctcttgaccagatcaccgagcccaagaggccttcagacaagcccctgcgtctgcccctccaggatgtgtacaagattggtggtattggaactgtaccggttggtcgtgtggagactggtgtcatcaagcctggtatggttgtcacctttggtccaactggcctgactaccgaggtgaagtctgttgagatgcaccacgaggcgcttcaggaggctcttcctggtgacaatgttggcttcaacgtgaagaacgttgctgtcaaggatctcaagcgtgggtttgtggcctccaactccaaggatgaccctgccaaggaggctgccagcttcacctcccaggtcatcatcatgaaccaccctgggcagattggcaacggctatgccccagtgctggactgccacacctcccacattgctgtcaagtttgctgagctcattaccaagatcgacaggcggtctggcaaggagcttgagaaggagccaaagttcctgaagaacggtgatgctggtatggtgaagatgataccgaccaagcccatggtggtggagacattctcagcgtatcctccccttggtaggtttgctgtccgtgacatgagacagacggttgctgttggagttatcaagagtgtggagaagaaggacccgaccggcgccaaggtgaccaaggcggctgccaagaagaaatgatgcgatcctgcgcctgctttagcaatacctagttttcatcatcacaagttttgtttgtgatcgttgctgttatcgtgtgaactgttgagatctgttagcatgtgcacttttatctatttatttggtaccatcttgctatttcaccttttgcaatacaagaatgctctaagacct

SEQ ID NO: 13425 - DNA, 934 bp, Zea mays
  Clone ID: JC-ZMSHLIB3569P003H02_FLI
ctaccctactgctgcgtgaagacgatggagtggccaccaccgtcgacgtcaccatcgccgtcgctggtggtgcgcagccccaggcaaacagtcagcctgatccgcaaccggcgaccccatcgtgactgggccccctcatcgaggtctccctctttcgccgcccgtgaccatggccccaagccttcggaggtgtacggcttcgttggatccatcaccaccgtcattgccaccgccgtgtacctcgcctgggcatacacgcccgagcccgtcctccagtcactcggcatcacctactaccctagcaagtactgggcactggcggtgccatcgttcgtggttgtgaccgtggtgctgtccatgggcatctacatgggcctcaacttcgctgccactcctcctccgacttccttcagtactatcttcgatgaaaagagtagggagcacacagccttttcttctgcaactgaggatgagaggcccattgaacccatctcagacatcggtattgatcggatcaacagtcttatgtttggtgatagatgatttcccccggtggaatatgagtttaccatggagcgccggattggaaatagatgcaaacgcgaaggaagatttccatgtcagctgaactttgttgcctgcatatgctattgagaggcccgtcgaacccgttttcagacggtagtattgatcagatcaggaatcttatacttggcggtgatagacgattactcaaaaatggagtgtgagtttacaacagagtgccagattggaaggcgtgaagaaataatccacattgttaagtgaactttcatattaccttcaagcataaccgacaaaggaattcgatccttgagcttttcgtttcacgtgaagggacgccctgtaactggattttttttgtgttgtgtagtaatgtgatgtgtactgtggt

SEQ ID NO: 13426 - DNA, 1071 bp, Zea mays
  Clone ID: JC-ZMSHLIB3569P005C02_FLI
gcggatcgagatggcggcgtcggatgttgagtaccgctgcttcgtcggcggcctcgcctgggccacggacgaccactccctccacaacgccttcagcacctacggcgaggtcctcgagtccaagatcatcctcgatcgggagacgcagaggtcccgcggcttcggcttcgtcaccttctccacggaggaggcgatgcggaacgccatcgagggcatgaacggcaaggagctggacggccgcaacatcaccgtcaacgaggcccagtcccgcggcggccgtggaggcggcggcggcggcgggtacggtggtggccgtggaggcggcggctacggcggtggcgggcgccgcggcgccacaccctgcccccatcggtccgcagccaaggcctccgtctcctacggcagtgagccctgctcctcggcctacgcctacgcttacgccgccgccgccagcagccagccagagtgtagcaccaattagttcgagtgatgtctctctgcccacatcatcattagatctcccagatgttgcagatctctttgctccccctgcagacaatgcatcaaggaagagggaatcaaatgggtctgctcttcatgactcgcgcaataaatttccaaggatgcaatcacaatcccaaggcataggaagtgctgcagggaacgccctaattccaccgcagcttcgtggaaggagcaatgttgttaccgaagacatgagcaaactctttgtggctaaacgaaaagagtagcatcttaaccttttctggacctgaacctctgtttggactccatagactgataaacgcatgtactgagtgcaatggatgtgccggcatgatccaaggttgttgctgaatcctaaagaaccggacgaaggatgctaacggtaggacgacctggtctcttagcctaccgtgggctgttgtcagatgtcaaaaatgccctcttagaagtttagaacatttctttggtgctcactcgcgtttcatgttcaacggtgctacatgactggtgctggatgcatgtaaactctgcaaccctatcatgttatggcagctagatgctact

SEQ ID NO: 13427 - DNA, 1097 bp, Zea mays
  Clone ID: JC-ZMSHLIB3569P007F09_FLI
gtacgccaagctctcctcctccgacggcgccgcctccgtctccggcgtcgcgagggaggaggtggcgaccgtagagacgctcgcgccgccggcgcgggcgccggtggacggcgcggatcgggccgacccgcctccgcacgagcggcagcaggaggccgaggcgggcgcggcgaagcccggtgcctccctgcagcaggacgcgccgctgaccgaggaggtggtggaagggggaagcgggggccacggcggcggcggctcgcaggagcaggagcaggatcaggcccaggggacctgcgacctgtacaagggccgctgggtgtacgacgagtcccgcgcgcctctgtacaaggagtccgagtgcagcttcctcacggagcaggtcacctgcacgcgcaacggccgccgcgacgacgactaccagaagtggcgctggcagcccgacggctgcgacctccccagatttgaggctaagttgcttctggagaagctaaggaacaaaaggctgatgtttgtgggtgattctctgaatcggaaccagtgggagtccatggtgtgcctggtccagtcagaggcaccatgggacaaaaaatctctcgtcaagaatggttctcttaatgtcttccatcttcaggagtacaatgcaacagttgagttctactgggctccgttcctagtggagtcaaactcagacgacccagacattcacagcatcagcgaccgcatgatcaagccgacatcgatcgcgaagcatgcggcaaactgggaaggcgtggactacctgatcttcaacacttacatttggtggatgaacacaccgcagatgaaaaccgcacggtggatctttctcaaggaaacacgtaaagtacgatgaaatagagcgtgtggaggcataccggaaggtcctcaagacgtggtccagatgggtagaggcgcacattgatcccaagagaagcacggtcctattcatgagcgtgtcaccggtacatatgcagagtgaaggctggggcagccccaacgccgtaaaatgcttctccgagacgcagccggcgatcaactacacgaagaaactggaggtgggcacggactgggacctcttc

SEQ ID NO: 13428 - DNA, 1165 bp, Zea mays
  Clone ID: JC-ZMSHLIB3569P007G08_FLI
gggcgagtggctactgtgttgagtgcttccggtggttgcggtagtgagggtcggtgaggagcagaggatggtgcagcgaccgtggcctgctcgtgcggcgtcgtggccttgtttggggctgcggccaccggatctggctcctcagtggtggtgtgtggcgactgcaggtgggcagcaacctgcagtgccctaatggcgtctgcggtggtgcgcgtgccaacggatctggcgcgtcgcagtggctgctgccagggatggccgacaggaggtgcagcgcgaggtgctgccgtcgcttgaccaggtccatgggcccagccagaggtggtggtggtcgacgcaactttgcggcagccggcacgttgatgtccctctagatgggtctgtgtgggttgtctgggcggcgatggcggtggaggtggttgctttgtcctggttcctggccggtcgttttgctggggttttcttgggcgaaagctttggcgacgcccctgggcgccgcttcccctgttgagggtgtcggctccccagcactgtcttacgtgggcgaaagcccggtccatctcggaccgtcgagggtggcatccccgacgtcactcccttcctgaaggcgtcgcttctgaagtttgtctcggccacgtcgtagcctgtggtggttgctttcgtctttcgggtgccggtttgcgtgtggaggtgggagcttgcattatgaagtcgaagctgctatgtcaggggatgtggctcggcaacgatgacgtggggcgaaccccccttcttcgtgggttggtctgcgtcgaagacgaggcatttggcggaggcggggcggtggattaaggttttggaagtctcgctggtgaagaatcggagctgactcgagtggggtgtctcgtggcttggcaacgacgacgcgtcgcagtcttccttctcctgtgccggtgtttgtaatcgtcgtcgtgtttcctttggccttgtgctgcccgtcttgggagtcggagctcgtcacttgtgttgagctcggcaacgatgactcaggatgggtactgtgtgtgtgggttgctgttgtctgggttgtttgtgccccctgtattggttttgggcccggtttcccttaaaactgggtcaattcttttcttcttaattgagaggcagagttcctgccattacgttc

SEQ ID NO: 13429 - DNA, 1668 bp, Zea mays
  Clone ID: JC-ZMSHLIB3569P007G11_FLI
atgtcattgatagagacaggatcaaagctcttagggatgagatgaagcgagccgggtttgaggagagcactgatgtgctggtgtcactgatgagggccttctccaaggaaggagatattaaagaaactgaggcaacatggcattggcttcttcggagtggttgtgagcttcctgcccaagcttatatctgccgaatggagctttatgcacgcactggtgagccaatgaaatccctagaaatgttcaaggaaatgaagaaccggaacatccctcctaatgttgcatcatatcataagattattgagataatgacaaaagctagagagatagagattgcagaaaaactcatggatgagtttgttgaaagtgatatgaaacatctgatgccagcctttcttgacttgatgtatttgtatctggatctggatatgcatgagaaactggaacatactttcaccaaatgccttggccgatgccgtccaaatagaatattatacaccatttatatggaatcacttgtgaggattgggaatgtctcgaaggccgaggagatctttgatgagatgcataaaaatgggatgataggtactaatgctaagtctgccaacatcctgctcagaggctatcttttggcagagaactatcagaaagctgagagcatttatgagttaatgtgtaaaaaaaagtacgatataccagtggaatctttggagaaacttcagagtggcctcctcagtagtaagaaagttgtcaagccaccaaaacctgtgagcatgaagttggatgaagagcagcgtgagattctgattggcttgctccttggaggcactcagatagaatctcatgcacagaaaggggtctacatcgtcaattttaagttccaggaagattctcatgctcactcagctctaagggtgcatattcacgaacgtttcttcgaatggctgccttcagcatgcagatcactgaatagggagagcgagatcccttatcgattttcaaccatacctcatgcacatttcggtttctttgcagatcagttctttcagaaaggccagcctgttctcccaaaacttgtccacaggtggctttccccacgggttctggcatattggttcatgtctgggggcgtcagactgcaatcgggtgatattgttcttaaggtcagtggcggggacactggtggtgttgagagaattgtgaagtccttgcaagcacaacaatctttagcatgtaaagtgaagaggaaagggagattcttttggataggtttccagggatgtaatgccgactctttctggaaaatagtcgaaacttatgtactggacagttttgctagttccaccgaggaaagccacaatgtaggttctgatggcttgcaagactatacatattatgagagtgatacgcagaggcatggtagagaaagtgaggagtgaggatagactttgttcacaagttgtctacattactttcctactaacacctgtcgcccagattgatctatcacctttccagctgatcgtctgtggttgcagtattgtactatagacagtcgtgagcagagagagatatgagtagcttggtggattcccttgttattgtacctggatttgcacagatgttcagtttttgctgcccattagtttgttgggttccatgatttcc

SEQ ID NO: 13430 - DNA, 1336 bp, Zea mays
  Clone ID: JC-ZMSHLIB3569P008H05_FLI
gtgaattagctatagccagccgtgtgtcgaacacgacacgcgataatggcactcatgcaggagagcagccaggacttgctcgaagcgcacgacgaactcttccaccactgcctgtgcttcgccaaatcgctcgcgctcgccgtggcgcaggacctccgcatccccgacgcgatccaccaccacggcggcggcgccaccctcccccagatcctcgccgagaccgcgctccacccaagcaagcttcgcgccctacgccgcctcatgcgcgtgctcaccgtctcgggcgtcttcaccgtccagcaagagcaaccaccagacgcagacggtggtggtggtgctgattcttcaaccgtcgacgcgtcggacggagctgatgtcgtctacaggctgacggcagcctcccgcttcctcgtcagcgatagcgacgaggcgagcacggcgaccttggctccctttgcgaggctggcgctccaccctatcgccatctccccgcacgccgtgggcatctgcgcgtggttccggcaggagcagcacgacccgtccccgtacggcctggcgttccgccagatcccgaccatctgggagcatgctgacaacgtaaacgccctactgaacaaaggcttgctcgcggaaagccgcttcttgatgccaatcgtactcagggagtgcggagacgaggtgttccgtgggatcgactcgttggtcgacgtcggcggtgggcacggtggcgccgccgccaccatcgccgccgcattcccgcacgtcaagtgcagcgtgcttgacctcccgcacgttgtcgccggtgctccatccgatgccggcgtgcacttcgttgcaggcaatatgttccacagtattccacctgcaaccgccgttttcttcaagacaactctatgtgactggggtgacgacgaatgcatcaagatattgaagaattgcaagcaagccatatctccacgggacgcgggtgggaaggtgataatcatggacgtggtagtcgggtatgggcagtcaaacatgaagcgcctagagacacaagttatgtttgatttggttatgatggcggtcaatggagtcgagcgcgacgagcaagagtggaaggagatgttcattgaagctggattcaaagactacaaaatccgacccgtagctggcctcatgtcggtcatcgaggtctatccatgaattctttgtgaacaaaaagccggatgccataatataaactgaagaccacgacgtcgtcatggagctgagcgtgttgttttctttttactactaggcacttgagcctctgagaatttgtaataataaataagctgagcaacagcgttctgtt

SEQ ID NO: 13431 - DNA, 1146 bp, Zea mays
  Clone ID: JC-ZMSHLIB3569P009D02_FLI
ctcgctgccccccttgccgtcctgccgcggcgcccgcgtgacgtgtcggcggcgtacggcgacggcgacatggacgacgacttcggcgacttcgaccccgacgacgcggacggcgtcggcgaggacgacgacgtcgacaacgagcaggactacgacgtcgactacgaccgcctcctagctcccgtcgtcaagccgccgtcgccgtcgggcgcgtcggcgtcgcccggggaggagggcgacatcgccatggtcgccgccgacagcttcgtctccacgcgggattcagcgtccgacaccgtcgtcgactacgccgtggatgaggacgagtttcacaagattaggctgctccactgcgacttccttatccgcaaggtgcccgaccccgacgacgacgtcttcgacttcagagagatgtatgtcacgccaccggacaccgacatctactccattccgagggttcttgccccgatgccgcagaagtacgcgaggtgcacgaagaaaaactttggccgttaccacgtgagcgagccaccagttgagcatttgcgcgatccactgtacaagacagagagggagatcatgaaggttttcttgaccaagcactacagaaacaggcgcgctgacgacccagatttttttcttgatttcgaggagatctatgttatcgactcgagaacaaggtcaatcacaagagctaaagttgtggttagtgttcctgaaggaaagaaaagagaccggcggaacgacctgctactgatccgtgacgggggtgagtctttcagaatcatcgacaagactaaaagggacgacgcaagcactatcatacaaagagaggagtgggccaagtcgagacaagacgtggaaaagcatttcaggaagctcagagacttcgactactcgaattggttctaggaaaggttttcaccgcatctactgttgattctcctggagctagcagctggtttgatccactgagagatgaccatttcgaaattagataggttcggtgtaacactagttatagctcgtagaacatatgccatctagggagcatagtaagctcaaaagtcaaaatattgtgattctgctgaatgtactactcttttttttaattccttcacgaaatgaatgcactgtttgttgaat

SEQ ID NO: 13432 - DNA, 626 bp, Zea mays
  Clone ID: JC-ZMSHLIB3569P010G11_FLI
gcgaggcgacgccgcggcacctcttctccggcgaagggaaatggcaaccgttccaggggatctgatctggcaggttgtgaggaagaacaactccttccttgtgaagcagttcggcaacggcaatgccaaggtgcagttcaccaaggagccgaacaacctctacaacatccactccttcaaacactcgggtttggcgaacaagaagactgtgacgatccagccagctgcaaaggactcggctgtggtcctctctactaccaagaccaagaagcagaacgcacctgcgaagctcagccacaagtctgtgatgcgcaaggagttccgcaagatggccaaggctgtgaaaaaccaggttagtgacaactactacaggcctgatctgaccaagccagctcttgctaggctaagctcggtgtaccgcagcctccaggttgccaagtccggtgtcaagaagaagaacaggcagtcctaagcgctaagtttgtgttctgtcagggggcatgttggtgctcgtagtcccagcttatatttatctatgttccaacagttttgagacttgttagaactgagcaaaccatgttaagatgctgctgtgtgtcattccttaaaaaaattgccttgcactt

SEQ ID NO: 13433 - DNA, 1260 bp, Zea mays
  Clone ID: JC-ZMSHLIB3569P011A11_FLI
gtgagcagccagccgtggaggaagagatgtacccataccgcatgagcaacgtgatgatcgggtacctgaacctggccacgctcctggcctcgctccccatcatcggggcggggctgtggctggcaaggggtagctcctcctcctcctccaccacgtgctcgtcgatcctgcagacgccgctcctcgccgtgggcttcgcggcgctgctggtctcgctcgccggcttcgtgggcgcctgcttccacgtggcctgggcgctgcggctgtacctcgccgccgtcgcactgctcgtcgccttcctcctcggcctcaccgcgttcggcttcgcggtcaccgcgggcggcggcggcgcgcaggtgtacggccggccgtaccgggagtaccgcgtcacggactactcggcgtggctccagaagcgcatgcaggacgacaggtactggcgccccgccctcgcctgcgtcgtcgggtccaaggcctgccccaagatccagaactggacgcccatggactacctccagcacgatctcacgccaatacagtccggctgctgcaagccgccgacggcgtgccagtacagcggaggcatgccagtcggggcgcaggacgaggactgctaccggtggaacaacgccccggacatcctctgctaccggtgcgactcgtgcagggccggcgtgatggagcaggtgcgccaggactggcacaagatctttgtgctcgacgtcgccgtgctcgccgctctcgtctgcatctgctcatgcgggtgctgcgccttcaggaacgctcgccgctcccggtcccagtacccatacggggtaaaccaaacgtccaagataaacccacgctgggactactggtggcgatgatggggtggtagaagagaacagatctactaggctagctgtagcttctcaatgcctgtatgatattttgatccagtcttctgtggaaaaagataaaataacacttgggatctgtatgtgttattagcccctgtggtactctgtttgtttccaggtccgcagagtttagtttctgtagatatttgagttaagaggagactaagccatgaagtaaaagagatgcctagtttttttccccttcaatatggtagccagcattgtatcatgtagaattttaatccaggacagaagtggttccatgtatatgggggaaaccaaaccacaccagaagctatcagctatgcctgttctactgttggcgtggcttccttatgatgtgattacactggattccttt

SEQ ID NO: 13434 - DNA, 921 bp, Zea mays
  Clone ID: JC-ZMSHLIB3569P012H04_FLI
tctgcggcggcggggagtgagcacattgaggacggtctactcctcgttcgcgtgcggttcgtcccgagcgatccggcaaccatgaacatcttcaagaagaaggtcgaccccaaagaggctctcaggaccagcaaacgtgaaatggcggtcgccacgcggggagttgagagagagattggttccctgcaaatggaggagaaaaggctggttgcagagataaagaagactgccaagactggaaatgaggctgcaaccaaaatattagctcggcaacttgtcaggctgaggcaacaaatcctcaatttgcaaggcacacgggcacagattcgtggagtagctactcacacacaggcaatgtatgctggcacttcaatctctgctggaatgaaaggtgcaagcaaagctatgtcagcaatgaacaagcaaatggaaccggcaaaacagataaaggtcatgaaagaattccagaaacaatcaacacagttggacatgacgcttgagatgatgtctgatgctattgatgaaacacttgacaaagatgaggcggaggaggaaacagaagagcttacaaaccaggtccttgacgagattggcgtcgatgtggcttctcagctctcttcggctcctaaagggcgcatcggagctactaacaagaaagtcgataacggtcaagcacgtcctgcaaggaacgtggcggctcctgctctagaaccctcctctgctgaagttgaggatctggagaggcgactggcatctctgcgccgtatctgagtctgagctgttgaagaaagaacttgtttgtaatactagcagttattcatctatatatgtaaagttggtttatatgtgtagggaaaacagcgagctgcacatgatacggttgaacctacctaatgttttatttaatttggaagttgactg

SEQ ID NO: 13435 - DNA, 1308 bp, Zea mays
  Clone ID: JC-ZMSHLIB3569P013H09_FLI
catcgacaacgtcaaggccaagatccaggaaggagggcatccctccagaccagcagcggctcatttttgccggcaagcagctcgaggacgggcgcacgctggccgactacaacattcagaaggagagcaccctccacttggtgctgcgtctcaggggcggcatgcagatcttcgtgaagactctgaccggcaagactatcacccttgaggtcgagtcttctgataccattgataatgtcaaggccaagatccaggacaaggagggcatccctccggaccagcagcggctcatttttgccggcaagcagctcgaggacgggcgcacgctggccgactacaacattcagaaggagagcaccctccacttggtgctgcgtctcagaggtggcatgcagatcttcgtgaagacacttactggcaagacgatcacccttgaggtggagtcctcagacaccattgacaacgtcaaggccaagatccaggacaaggagggcattccaccggaccagcagcggctgatcttcgccggcaagcagctggaggatggtcgcaccttggctgactacaacatccagaaggagagcaccctccacctggtgctccgcctcaggggtggtatgcagatttttgtgaagacattgactggcaagaccatcaccttggaggtggagtcgtctgacacaatcgataatgtcaaagccaagatccaggacaaggagggcattccaccggaccagcagcgcctgatctttgctggcaagcagctggaggatggccgtaccctcgccgactacaacatccagaaggagagcaccctccacctggtgctccgcttgcgaggtggtatgcagatctttgtgaagaccttgactggcaagaccataaccctggaggttgagagctccgacaccatcgacaacgtgaaggcaaagatccaggacaaagagggcatccccccagaccagcagcgtctgatcttcgctggcaagcagctggaggatggccgcaccctagcagactacaacatccagaaggagagcactctccacctggtgctccgcctccgtggtggtcagtaagccatggttcatttaagctgctgctgtacctgggtatctgcgtcgtctggtgccctctggtgtacctctatatggatgtcgtcgtctaataaacatctgtggtttgtgtgtcatgaatcgtggttgtggcttcgttggtttaatggacctgttgtgtcctctgtgttgtacccaaaactcttctgcagcagtatggcttgaatccttatgaagtttgatgtttgaactt

SEQ ID NO: 13436 - DNA, 1260 bp, Zea mays
  Clone ID: JC-ZMSHLIB3569P016A12_FLI
ctctgcttcttcggctccaaggagcggcgaccattgctcattgatggcgatggagggacctgttttctgccgtcctgcaatgcaagcgaaactgcctgctgctgcgctgatcaacaactccctgaccaaatccgggcagcttgggactgcattgtttggtgccatttcaaaatacagaaacatttcaagattcatttctcccatctctcaaacatctacgaagaacataggtccatgctgtagcttcagctcgtcttctgatggtaatggatacatggctggaaactctagcgagagtgatgaagactatgttaattctactgtgctagaagcagttgaggtgagaagtggatcagaaggatatgtgataaagatgcgagatggaaagaacttgcgttgtgtccatagtaattttcaagggagaaatattccagagaatacaccacaacctgctattgttttgaggattgaagatggaagcggaactttactcccgatcattgttttggagatgccaagcgttcttctgatggcagctattcgtaatgtccacattgcacgaccgaccatatatcaagttgtcaaggaaatgattgataaaatgggttatgaggtaaaacttgttagggtaaacaaaagaattcaagaagcctactgtgctgaactttatttaacaaaggtcaatgatcctacagacaacatcaccttcgatcttcggccttcagatgccataaacattgctgttcgttgcaaggttcctgtacaagtccatagaagtcttgcatacagtgatgggattagaccagtcgagccagcaagaatggcagtaacagctggcctatcagatgggttgttatttacagagcttgacagacctgatggacagccatgtgtggaggctcaagagtttggactggtgaggaacatgctcattgcagctatcgaagagagatacaaggatgctgcatcatggaaggacaaactgattcggctcaggtctaagcgggagaactgggcctgagagcgtcgcatgtctggatggtgtaaataaagatgacgctcagctgaattccagtatgcactccagacaattgatactgtttatggctctatgtaactagctgtacatattgtaactagctgtacatattgtacgtactatgctcaggtctcagctaaattcagactaagatttgaagtgaaaaactaatccttttgtaatcttggccgtattaatttgtatgttagtctgttaggttg

SEQ ID NO: 13437 - DNA, 971 bp, Zea mays
  Clone ID: JC-ZMSHLIB3569P016B03_FLI
cgctgcttcaagaaaccaccgagagcccaaccgcacaggcaggagagagagcagggagccagggacagtagcgtggggccggggagcaaagatggaggggaaggaggaggacgtgcgcctgggcgccaacaagttctcggagcggcagcccatcggcacggcggcgcagggcgccggggccggggacgacgacaaggactacaaggagcccccgccggcgccgctgttcgagcccggggagctcaagtcctggtccttctaccgcgcgggcatcgccgagttcgtcgccaccttcctcttcctctacatcaccgtcctcaccgtcatgggcgtctccaagtccacctccaagtgcgccaccgtcggcatccagggcatcgcctggtccttcggagggatgatcttcgcgctcgtctactgcaccgccggcatctccgatccttgccccactgccaattgggttcgcggtgttcctggtccaccttgccaccatccccatcaccggcaccggcatcaacccggctaggagccttggcgccgccatcatctacaaccgggatcatgcgtggagcgaccattggatcttctgggtcggccccttcatcggcgccgccctggctgccatctaccaccaggtgatcatcagggccatcccgttcaagagcaggtcttaagctgccgcgggtgtgctgagacatgtggggaatgtattgtctgcccacgcctagtttctctgctgaatcttccatctctcttcccttcaagactgctcactgctgcactgctctgttatctgaacccagaacttcgtgtactcctgtaccgagctgtgtgtatgtttttttttcttccatcgtgtttgttgcaagggttcccgtctccttttatgcgttgggatcgtggcaagaaagggcagatatcatgtggaaacgtgggtttataactatcagctggatttttcatccaagtgg

SEQ ID NO: 13438 - DNA, 1274 bp, Zea mays
  Clone ID: JC-ZMSHLIB3569P016B08_FLI
gtcagcgcgtgggtcagcagcatcgaaagcgagcctccgttcgatatcgccgaggaggatgacgacaactacgacggagaggacgatgaggagaatggcgagtgtgcggcgtcgcagccgcgccatctcgagctcggggagccatcgtccgggaagggcggaaacagcaaatccaagcgctgcgcaacgacggccgacgaggtcgtccaggccaacaccgtggtgcagtccctgaacgccttctcgtcggtggcgcacatctcagggatgggcctcaaggtggtgccgatgatcgcgcccttctcaaccctccgggccgtcaacctctccagcaacctcatcgttcatatctcccctggatcgctgcccaagggcctccactctcttgatctgtccaggaacaagattgccagcgtcgagggcctccgggagctcacaaagctacgcgtgctcaacctcagctacaacaggatttcgcggattgggcatggtctgtcgaactgcacggccatccgggagctgtacctggcgggcaacaagatcagcgacgtggagggtctgcaccggctgctgaagctggcggtgctggacctgagcttcaacaagattacgacggccaaggcgctggggcagctggtggccaactaccactccctcctggcgctcaacctcgtaggcaacccggtgcaggccaacatcggcgacgacgccctgcgccgggcggtcacgggcctcctcccgagccttgcctacctcaacaagcagcccgtgaagccgcagcgcatcgcgcgggaggtggccacggacagcatcgcgcgcgccgcgctcagcggctcggacagccggagcatccggaagaggacgtcgcggcggctcacgcagagcccccgctcgtcgtcgttgaccagggcccgtggcggcggcggcggcggttcacccacaccaagaaacacctctcgtcgtcgttgaccagaagaaccaactgcgtgattcgcgttgctctttggagacgggagacggtggcgtgactgcgtgcaggcagactcagacgacaccatgattcggcacggcgccagcatgatatgagacaaaccaagtatataaagcaagtatgatgtgagagaattgcgatgcaacacataatgtacatacttgttagggagatattgcttagattaatactacgaccgatgcatctttgtacctgaaaatatcaatttgagcctggttgaagatgaacatccatccaacatcgcagtactgccgcttcatgg

SEQ ID NO: 13439 - DNA, 1816 bp, Zea mays
  Clone ID: JC-ZMSHLIB3569P016D04_FLI
gttcaagctgaaatgaaggctgctaatgttcagcatccaatagtttgcattgatgttattaaagaaggaataatctctggccctcgtgcaggcctcatgaaggaagtgctctctgggaaaatgcttgagcagtctcaaacaagcaaaagcttaaggcactttttttttgctcagcgtgccacttcaaagattccaaatattaccaacataggtttgacagcacggaaaattaaaaaggcagctatcgttgggggtggtctaatgggatccggaattgcaacaatactgatattgaacaactttaatgttgtcttgaaagaagtaaatgaacagttcttatctgctggcattaacagaattaaagtgaatttgcaaagtcttgtcagaaagggtcaacttactgaagaagattatgaaaagaagctttctctgctatgtggtgctcttgactatgaacagttcagagatacagatgtagtaattgaggcggtaattgaggatatggtgctgaagcagcaaatattttctgaccttgagaagtattgccatcataattgcatatttgcaacaaacacttcaacaatagacctgaacataattggtcagaagacagcttctcaggaccgcattgttggtgcacacttctttagtccagctcatgtcatgtcactgttggaaatagtttgtactcatcatacttcctctcaagttattgtggacctgattgatttggcaaagaaaatacagaaaacaccaatagttgttggcaactgcacaggtttcgctgtcaaccggatgttctttccttacgctcaggcagcttcttttcttgttgattatggtctggatgtgtatcacatagatcatgtgatcacacaatttggaatgccaatggggcccttccgattagccgatcttgttggttttggtgttgctattgctacaagaaagcaatattaccaaagttatcctgagcgaagttacaaatcaatgcttcttcagattcttgttgaggataataggacaggtgaatcttcttgtaagggcttctatgtatatgatgataaacgcaaagcctctcgagatcctgattttgggaagtacattgaaaaatcaaggaacatggcaggtgttatgcaagatcctaagctgatgaaactaacagataatgacatcgtggagatgatcttctttcctgtggtgaatgaagcctgccgagtgcttgatgagggaattgctctcaaagcatctgaccttgatgtagcttccattatggggatgggtttcccttcttacaggggtggagtaatgttttgggctgactcgcttggtgcgaaatatgtgtatgacaaactggatgcatggtcgaaggattatggggagttcttcagaccctgtgaatatttagctgtgagagctcgtcagggtgcatccctggctgccaaggttgatggtgtcaaatcgcgactctagggttttgttgttcatttgtccggacatgcttatacggactttggcctcaatgacattgagatgttgtgaaaacccttgagcaccaactgttacaatcatgcagttgcaaaacctgcacaagtgaattatacggaggcctagcgaagtggaaattgcatgtgccttcgtgggattgctgaggatctgcagcaggaatttctctgaaatattatgtgcagttttctgaagtgatgctgacaactttgcatagaatagttacagggagtttctcctagacgttttgcgggaatatactttgttgcagtggattcttatttttttaaaaataaaactcgtgaaatcc

SEQ ID NO: 13440 - DNA, 664 bp, Zea mays
  Clone ID: JC-ZMSHLIB3569P017C02_FLI
tcggacctcaagaagattgaccgcggtgttcgccgccacttccacgacgacataacagtcatagtagtgttccttgactccggcctcgtaagccaggcgagcacacaccgaggtccaactctttccttgcgaggcggtggcggcagcgctggcctgcgcagcaacacacttgcacctacgtgactataaagtgcctggtggagtggaggctactgactgaaggtggttttctttccttgtgtcgaatgtgttatatatgtacttgtaccagccaagatcattcatccccccccccccctaaaatggtgtaaagaagtaggagaggcgccgaagttcctcaccagcgtatctgaatgccctcaatggtgtcaagttgtggactcaagtggatagcttcgctgaatcttctgatgatgctctgtggaaagctcgaatcctttccacctgaaaaagcaagtaatatgtcttccagtgctggaattaacccctagtgcatatatatatgtatgaaataataataaggcaaaaggaggagtaacttatttaactaatgctgtgaggtgtatttatgttttgtatgtgtactgcttttgactgctactgcatctactgttgttaattgaccactggtgaagtgaaatcactggtttcgtcttgctgtctc

SEQ ID NO: 13441 - DNA, 605 bp, Zea mays
  Clone ID: JC-ZMSHLIB3569P018A08_FLI
acttaaaacgcgtgccacgataatattgttcaccaacaaaaggttctaacgcggatacaccgcgacgacgacgataaatcgagcagcgactgggccagccagccactgcagcagacacacgagacctgacacaaaccgcttagtccacctcctcgatcttggggccagggtcgacttcgtctggtactacgaggaagtcgccaccggccgccccgtccgctggaatttcttcaatgggatgcagcagcatgtgatgagctttgaggtgggaggagtgctggaagactccaagtggcaggcgcccgctcgctgcttcagtggcggcaatgccgacaccgccaaggcggctgcggatggagttcatggcgaggaagccggtagtgttgatgtgatggacagcatgatcaggttcgccggggctccggctgcagcagtagctgcatcatttgaccaacggtgatccacgcgtcctggtgattctgctacgctctgttgatcacattgtgctttgtataaccctggctgatttgtggtaacactgaaagtaactgtacatttactggaactggaaatttgatgagtcagtgtcgatcgtagctgctact

SEQ ID NO: 13442 - DNA, 439 bp, Zea mays
  Clone ID: JC-ZMSHLIB3569P019D06_FLI
aataactttggacagtacagtgtacacttgctttatttgatattttccttggcactgattcacattggatataataagatcagttggtaacaaaaatatctctttatgctaatgcagctcaatctgaggaacttggaatgcagcacattgagtttctcaacaagctttgatgcctgaatatgctctgatgtttggaagtgcagaagacttcaatgtacaatgttgagcggcatgaccacgagggtgtatttgtactagagcagttctttattagatgtatgatgatgaccttaggttttgccaagtagatcttttagaatgcagatgctgtaacttgtaaccacaaccgaaactgaggctggaccgagtgtagcgtttaacaatcgagttggtgctcatgcctcgttttgcaatcacaatcagcaggcacgtttgtcag

SEQ ID NO: 13443 - DNA, 1364 bp, Zea mays
  Clone ID: JC-ZMSHLIB3569P019E05_FLI
cgccgcgcagacctcccagacgagcacgcccctgccgccgtcccctgaagccgcttctgcgtcgcccccggcggaagatgcgccgctcctccccgacgccggcgtgcggcgccgggcggcgtgcgggcggttcgcgcagcgcagcggctccttccgccgcgaagtcggccgggccgccgccgagaccttcctcctcacgaggctcaccctgatcctcctccgctacctcgggataggctacagatggattcggcagttcctagccctctgctgttataccctcttgctgatgccaggttttattcaagttgtatattattatttcttctctagccaagttcatagaagtgttgtatatggagatcagccaagaaacagattggacctttatatgcccactagtacaacagggttaaagccggttgttgcgtttgtgactggtggagcgtggatcataggttacaaagggtggggagcccttttaggcagacgcttagcagaaaggggcatcatagttgcatgcattgattacagaaactttcctcaagggactattggtgacatggtagaagatgcttctcaaggaatagcttttgtctgcaagaatataacaagttatggaggtgatcctagcaggatatatcttgttggacaatcagctggtgcacatattgctgcttgtgctctcttaaatcaggccattagagaatccggtgaaggagatacttcctcttggagtgtatcacagctaaaagcttactttggtatttctggcgggtacaacctccttaacttggttgatcattttcatagacgtggcctttaccggtctatctttctcagtatcatggaaggtgaagtatcactccagaaattctctccacaaatgatgattatggagtcatctgctaggtctgcagtttctttattgcctcgcatcatccttttccacggaacaagtgattattcaatacctccagctgaaagccaagcatttgctgatgctttacaacagcaaggcgcaagggcagatctatttctgtacgaagggaagacgcatactgatttgttccttcaggatcctcttcggggcggcagagataaaatgctggaagagatcgctcgtgtgatacacagtgaggatccagacgctgctgcccagcacctcgtcgttgtgcctgttgcaaggcgccttgtacccgagttcatgctgaagcttgctgggagagtaagccctttctagaggtgcttctagtttgattgcgaccacgactgactagtatttgtgaattttctttttatctaagacaaacatggttgtacatgtacttgtgatcggagaaagtactcataattttctagac

SEQ ID NO: 13444 - DNA, 1628 bp, Zea mays
  Clone ID: JC-ZMSHLIB3569P021D02_FLI
ctcctcgcgagcctcgtcgatcccccactcccctcccctcgcttcaagatgcagatctttgtgaagaccctcaccggcaagactatcaccctcgaggtggagtcttctgacaccattgacaatgtcaaggctaagatccaggacaaggagggcatccctcctgaccagcagcggcttatcttcgccggcaagcagcttgaggacggccgcacacttgctgactacaacatccagaaggagtcaacccttcatttggtgctgcgccttaggggaggcatgcagatctttgtcaagaccttgactggcaagacaatcacccttgaggtggagtcttcagacaccattgataatgtcaaggctaagatccaggacaaggagggcatccctcctgaccagcagcggcttatcttcgccggcaagcagcttgaggacggacgcacacttgctgactacaacatccagaaggagtcaaccctccacttggtgctgcgccttaggggaggcatgcagatctttgtcaagaccttgactggcaagacaatcacccttgaggtggagtcctcagacaccattgacaatgtcaaggcaaagatccaggacaaggagggcatcccacctgaccagcaacgtctcatctttgccggcaagcagttggaggatgggaggacccttgctgactacaacatccagaaggagagcaccctccacttggtgctgcgtcttaggggtggtatgcagatctttgtgaaaacccttactggcaagaccatcactcttgaggtggagtcttcagataccattgacaatgtcaaggccaagatccaggacaaggagggcatcccgccggaccagcagcgtcttatctttgccggcaagcagctggaggatggacgcacccttgcggattacaacattcagaaggagagcaccctccacctggtgctgcgcctcaggggaggaatgcagatcttcgtgaagacattgaccggcaagaccatcaccttggaggttgagagctccgacaccattgataatgtgaaggccaagatccaggacaaggagggtatccccccggaccagcagcggctgatcttcgccggcaagcagctggaggatggtcgcaccttggctgactacaacatccagaaggagagcaccctccatctggtgctccgcctgaggggcggtatgcagatctttgtgaagaccttgactggcaagaccataaccctggaggttgagagctctgacaccatcgacaacgtgaaggctaagatccaggacaaggaggggattcccccagaccagcagcgtctgatcttcgccggcaagcagctggaggatggtcgcacccttgcagactacaatatccagaaggagagcaccctccacctggtgctccgtcttcgcggtggttattaagccatcagtcgttgaagctgctgctgtatctgggttatctagtgtctctgccattgcccatggatggtgctgtctttcaaagtatttgtatggtttgtgtcgtgagtcgtgactgagctggtttcatggaccagttgtgttctcgttacccaaaactatcgtgcgaccgcatatggcttaatcatgaataaatgttgtttgaattt

SEQ ID NO: 13445 - DNA, 741 bp, Zea mays
  Clone ID: JC-ZMSHLIB3569P021H08_FLI
ttcgaaacaccctcgcacccacactctcccttcgtccccagcctaaatccccgcaaagatggctcgcacgaagcagacggcgcgcaagtccacgggcggcaaggccccgaggaagcagctggcgaccaaggcggcgcgcaagtcggcccctgcgaccggcggcgtgaagaagccgcaccgcttccgcccgggcaccgtggcgctgcgcgagatccgcaagtaccagaagagcacggagctgctcatccgcaagctgcccttccagcgcctggtccgcgagatcgcgcaggacttcaagaccgacctccgcttccagtcctccgccgtcgccgcgctgcaggaggctgccgaggcctacctcgtcggcctgtttgaggacaccaacctctgcgccatccacgccaagcgcgtcaccatcatgcccaaggacatccagctcgcccgccgcatccgcggggagcgcgcataggcggcccgccggataggccggtggcccgttgcgcagtctcttctcggaagtttgtactagtggtcgggtcgtgtggaaggagtggtgtactgatctgcaatgtctcaaaccatgtcaacctctttgttgtcatcaatggaaatcgctacttatgtgtgctaatcttcgtgctgcgtttgtttcgtagtaacacaattcgatggattcgtacctgtgaacaatcgattcatatcgtcaccagatgcgaaattggcagtttgtgttcaaatttc

SEQ ID NO: 13446 - DNA, 1924 bp, Zea mays
  Clone ID: JC-ZMSHLIB3569P022D01_FLI
gccccgccccgccatggaggacttcgcgcgcgcggtggaggacggactcaagctctcgaagaggctcgtgctcccgggaggggtgccgccgccgcgcccgccggcggggatggagcgcaccgtgtcggccgcctcggcgtcgggtcccgacccgcggctgctccctaccgcgccgatggcctacgcgctcgtcaccgacccggccgccgtcgacacccccgacgtgcccagctaccagccctacgtctacggcgacctcgacccgcccgcgctcatcccgctgcagatgaaggaggtcgacctggccgtcgactgcgcgctcgacgccgcgcacgtcaccctgcgcgcgcgctggtggctgcactgcatcacgcgaagccgcgactccgacgtgcgcctcgtcgtgcccttgggcgagcaggcgctgaggttactgttggaagaagatcatataatacccaagtaatcgaagtagaagaccacactttggagaaacatgcaaaaattgagagtggtggccttttgcagccacatctgtttttcttgacaatacctcaggttgagggaggagcagatatttgtgctacatttcaatggtctcagaagttactttatgatagcgggcgtttctctgttgacatacctttccgttttccatactttgtgaatccattaccaaaagtgttcatgaagaaggaaaaaattcagttgactgtgcacagtggtttcagtaaagagattttgctgcaaggaacaagccacccgttgaaggaaaagagtaggcaaggagataaattgtttttccatcatgaagccattgttgagaattggtcgatcaaagatttcaatttttcatacaatgtttactcgggtgatttgtctggtggtgtgcttgtgcaaccagcaacattatgtgactatgatgatagagatatgttctgcatttttcttctacctggaagtggcaacagaaaggccttacaattggagtttgctatgaaagatttgggtgacctacatcacttcctggggatgcaagttcaacggcgagatggcggcctctttctctcgcaacgtcaatatatgctggatattctggatcgggctggtatggcagattgcaagccttgttctacgcctgtcgacacaaacccaaaggtttctgcaactactgatttgtcttcacatgcatgatcctcgcgagcctcaccttgctgctttgaagcgcattcttcgttatgttcgtggcactctgcatttgggtcttcaatgactgtgtctcgctccagtgctgaagccgagtaccgggccgtcgccaacactgttgctgaatccacctggctgcgccagcttctggccgagcttcgtcacccgttacgtcgtgccacgttggtctattgtgacaacatcagtgcagtctatatgtcttcaaacctggtccagcatcagcgcaccaagcacattgagattgatttgcactttgttcgggatcgggtggctctcggcgatgtccgcgttctccatgtgcctactacctcccagtatgcagacatcttcaccaaggggcttccctctacagtcttcacagagttcagatccagcctgaacgtctgcggtaccgacgatcagactgcgggggcgtgttagctgatatatcagacttgtgtctcctaccatataggcgcaggataccctaccatacatgtgcaggcatccttgcctttctagctacagccgcatataggaagatatggattcaatcctcccatttaggggcagtgattgtttccttccattccaggagatctcagggtactgtttctataaacctgagatctcccacctctctgtctctctatatatatgtgcgcctgtactactctattaatcaatcaatatagacagcaattatcttgctatcact

SEQ ID NO: 13447 - DNA, 1402 bp, Zea mays
  Clone ID: JC-ZMSHLIB3569P023C06_FLI
gactctggcccgacccgagaacctcaaccaaaacctcaccttggcaccgccgcgtcgctcggcgcctcgtcgggaactctccgccgccacccagtgacccgccggccgccgcgccttgcagcggcgacggagggaccagccagccagccatgacgacccgcatagcgccgggcgtgggcgcgaacctactcgggcagcactcggcggagcgcaaccaggacgccactacctacgtcggcaacctcgaccctcaggtttctgaggagcttctatgggaattgtttgtccaagcaggccctgttgtgaatgtgtatgtcccaaaagacagagttacaaacttacaccagggatatggatttgtagaattcaggagcgaggaagatgcagattatgctattaagactttgaacatgatcaaactatatgggaagcccataagagtaaacaaggcttcccaggataagaagagcttggacgttggagcaaatctgtttattggcaaccttgatccggatgttgatgagaagctcctctatgataccttcagtgcatttggagtgattgtaactaatcctaagataatgcgagatcctgaaacaggaaattctagaggctttggctttgtgagctatgagtcctttgaatcatctgatcaagcaatagaggccatgaacaaccaacatttatgcaaccgcccaatcactgtctcttatgcttacaagaaagacacgaaaggagaacgccatggcacaccagcagagagactgctggcagcaaacaatccaggatctcaaaagaataggccacacacaatgtttgcaagtggtccgccgacccaaggtcatccaaatggtggtccgcctgtgccacggccttatggcaatggcacaattcctggacagattcaacacattcggcaaccacctccaccacccgttggacaatttccccctccaatgcagatgcacgggcaaccaacttggcccgctcaacattctatgccgcctcccatgccatcgcaactccagtacaggctcccaatgaggccaccaccaccaaatatgatgccccctccggttggcatggtaaggccgccacctcctcccactggtatgtcagcaccacctatgtggatgccacccccacccccaccacatcaaggtggtggaatgcctccgcctcccatgtctatgccaccaccgcctccaccaccatctagttaaacacatgcaaaggacagtaccatctggtcaatgtgtaagctgtaactgtagactaaggatgctggttcctttcaggtctccatgtaacttcgtcaacactaggttaagaggaggtttgagagttaacctgacagatacactcaagattaacagctatttattcatgttctgttgaagat

SEQ ID NO: 13448 - DNA, 799 bp, Zea mays
  Clone ID: JC-ZMSHLIB3569P023C07_FLI
gccccccaattcgcaacacaatcgtcctccgccaccctccattaaccctagcggcagcagcgctcgtttgatccccgcggcggtccggcgtccgggtaggggagcgaggatgacggagtccctggtgcggaacaagccggggatggccagcatcaaggagatgccggtgctgcaggacgggccgccgccgggcggtttcgcgcccgtgcgctacgcgcgccggattcccacctcgggccccagcgccactgccatcttcctcacggccttcggcgccttcgcgtatggcatgtaccaggtcggtcaggggaacaaggtgcgccgggcactcaaagaagagaaaattgctgctcgtagtgctatactgccgatgctccaagctgaagaggatgaaagatttgtcaaagagtggaagaagtatcttgaggaggaggcgaggattatgaaagatgttccagggtggaaggttggcgagagtgtgtacaattccgggaaatggatgcccccggccaccggtgagctccgccctgaggtgtggtaagggcctgttgtaggcattgagaatgcaatcatgtcatgagggcatgaataaggctatcagacatgggcatccttctttgttcactaaggatcagctgttcaaatacctgtatctattttactcttatgaaatctggctggttaataatatgaagccgacgctttgcctcatctatgctcgtgcattgatgtaacgtgtccttgtttgatattaagaaactactatggaatataagaaagaaaacagcctgcttcttgc

SEQ ID NO: 13449 - DNA, 1134 bp, Zea mays
  Clone ID: JC-ZMSHLIB3569P023D09_FLI
cgctctcgcatcgtctccagagcgcacgtcagatcaggtgcgccgcgcccccctcgcctaagctgcgacgaccatccatcgaacaggaaggatgacgggctccatggatctcccggccaagggcgggttcagcttcgacctgtgtcgccggaacaacatgctggagaagaacggactcaaggtcccgggattcaggaagaccgggacaaccatcgtcggcctcgtctttcaggatggggttgttcttggggcagacacaagggcaactgagggccccatagttgctgataagaactgtgagaaaatccactttatggcaccgaatatatactgctgtggagcaggaactgctgcggacacggaggccgttacagatatggtgagctcccagctacagcttcaccgttatgcaacgggccgcgaatcaagagttgtaactgctcttacactactgaagtcacacctcttcaagtatcaaggccatgtcagtgctgcccttgttcttggtggagtggattgtactgggccacatttacacactgtttatccacacgggtccactgatactcttccttttgccaccatgggctctggttctcttgctgcaatgtcagtgtttgaatcgaagtacaaagaaggccttactagggaggaggaatacagattgtgtgcgaagcaatctgtgctggtattttcaatgacttgggtagtgggagcaacgtggacgtctgcgtgataaccaaggggaagacagaatacttgagaaaccaccagttgccgaatcccaggacttatgctagttcaaagggatacagtttcacaaaggggcagactgaggtactgtcttcaaaggtcacacttctaaagcagaaggttgaggtcgccgagggtggtgatgctatggaggagtgatcttgcatgcctgcattcatacaagcatattctgaatctgtgtaacttttcttagtggagcagctagaacaagaaaaaagaaaatttggagatctttgctgtactcgctggaccgaagccagggctcttatgctaaatgtgtttctaatgtttggcacattttaaattgcttgttgtttctgaatgtttaaaaccggtgaagggtatttgcttggagatgtt

SEQ ID NO: 13450 - DNA, 1497 bp, Zea mays
  Clone ID: JC-ZMSHLIB3569P023F06_FLI
caagatccaggacaaggagggcatccctccagaccagcagcggctcatctttgctgggaagcagcttgaggacgggcgcacgcttgccgactacaacatccagaaggagagcaccctccacttggtgctgcgcctcaggggaggcatgcagatcttcgtgaagaccctgaccggcaagactatcaccctcgaggtggagtcttcagacaccatcgacaacgtcaaggccaagatccaggacaaggagggcattcccccagaccagcagcggctcatctttgctggaaagcagcttgaggacgggcgcacgcttgccgactacaacatccagaaggagagcaccctccacttggtgctgcgcctcaggggaggcatgcagatcttcgtgaagaccctgaccggcaagactatcaccctcgaggtggagtcttcagacaccatcgacaatgtcaaggccaagatccaggacaaggagggcatcccaccggaccagcagcgtttgatcttcgctggcaagcagctggaggatggccgcacccttgcggattacaacatccagaaggagagcaccctccacctggtgctccgtctcaggggtggtatgcagatctttgtgaagacactcactggcaagacaatcacccttgaggtggagtcttcggataccattgacaatgtcaaggccaagatccaggacaaggagggcatcccacccgaccagcagcgcctcatcttcgccggcaagcagctggaggatggccgcaccctggcggattacaacatccagaaggagagcactctccacctggtgctccgcctcaggggtggcatgcagatttttgtgaagacattgactggcaagaccatcaccttggaggtggagagctctgacaccattgacaatgtgaaggccaagatccaggacaaggagggcattcccccagaccagcagcgtctgatctttgcgggcaagcagctggaggatggccgcactctcgcggactacaacatccagaaggagagcacccttcaccttgttctccgcctcagaggtggtatgcagatctttgtaaagaccctgactggaaaaaccataaccctggaggttgagagctcggacaccatcgacaatgtgaaggcgaagatccaggacaaggagggcatccccccggaccagcagcgtctgatcttcgccggcaaacagctggaggatggccgcaccctagcagactacaacatccaaaaggagagcaccctccaccttgtgctccgtctccgtggtggtcagtaagtcatgggtcgtttaagctgccgatgtgcctgcgtcgtctggtgccctctctccatatggaggttgtcaaagtatctgctgttcgtgtcatgagtcgtgtcagtgttggtttaataatggaccggttgtgttgtgtgtgcgtactacccagaactatgacaaatcatgaataagtttgatgtttgaaattaaagcctgtgctcatt

SEQ ID NO: 13451 - DNA, 1055 bp, Zea mays
  Clone ID: JC-ZMSHLIB3569P024B05_FLI
ggacaaggagggcatccctccggaccagcagcggctcatttttgccggcaagcagctcgaggacgggcgcacgctggccgactacaacattcagaaggagagcaccctccacttggtgctgcgtctcagaggtggcatgcagatcttcgtgaagacacttactggcaagacgatcacccttgaggtggagtcctcagacaccattgacaacgtcaaggccaagatccaggacaaggagggcattccaccggaccagcagcggctgatcttcgccggcaagcagctggaggatggtcgcaccttggctgactacaacatccagaaggagagcaccctccacctggtgctccgcctcaggggtggtatgcagatttttgtgaagacattgactggcaagaccatcaccttggaggtggagtcgtctgacacaatcgataatgtcaaagccaagatccaggacaaggagggcattccaccggaccagcagcgcctgatctttgctggcaagcagctggaggatggccgtaccctcgccgactacaacatccagaaggagagcaccctccacctggtgctccgcttgcgaggtggtatgcagatctttgtgaagaccttgactggcaagaccataaccctggaggttgagagctccgacaccatcgacaacgtgaaggcaaagatccaggacaaagagggcatccccccagaccagcagcgtctgatcttcgctggcaagcagctggaggatggccgcaccctagcagactacaacatccagaaggagagcactctccacctggtgctccgcctccgtggtggtcagtaagccatggttcatttaagctgctgctgtacctgggtatctgcgtcgtctggtgccctctggtgtacctctatatggatgtcgtcgtctaataaacatctgtggtttgtgtgtcatgaatcgtggttgtggcttcgttggtttaatggacctgttgtgtcctctgtgttgtacccaaaactcttctgcagcagtatggcttgaatccttatgaagtttgatgtttgaactt

SEQ ID NO: 13452 - DNA, 840 bp, Zea mays
  Clone ID: JC-ZMSHLIB3569P024D06_FLI
gccaagatccaggacaaggagggcatcccaccggaccaacagcgcctgatcttcgccggcaagcagctggaggatggtcgcactcttgcggattacaacatccagaaggagagcaccctccacctggtgctccgcctcaggggtggcatgcagatctttgtgaagacattgactggcaagaccatcaccttggaggtggagtcgtctgacacaatcgataatgtcaaagccaagatccaggacaaggagggcattccaccggaccagcagcgcctgatctttgctggcaagcagctggaggatggccgtaccctcgccgactacaacatccagaaggagagcaccctccacctggtgctccgcttgcgaggtggtatgcagatctttgtgaagaccttgactggcaagaccataaccctggaggttgagagctccgacaccatcgacaacgtgaaggcgaagatccaggacaaagagggcatccccccagaccagcagcgtctgatcttcgctggcaagcagctggaggatggccgcaccctagcagactacaacatccagaaggagagcactctccacctggtgctccgcctccgcggtggtcagtaagccatgggtcatttaagctgctgctgtacctgggtatctgcgtcgtctggtgccctctggtgtacctctatatggatgtcgtcgtctaataaacatctgtggtttgtgtgtcatgaatcgtggttgtggcttcgttggtttaatggacctgttgtgtcctctgtgtgttgtacccaaaactcttctgcagcagtatggctcgaatccttatgaagtttgatgtttgaactt

SEQ ID NO: 13453 - DNA, 968 bp, Zea mays
  Clone ID: JC-ZMSHLIB3569P024E10_FLI
caaaaccacgcgctactacaccagcctagctagccctttcgccgtcgctgcggctcctgcccactgactcgtaggtttcgttgtttcgacaatgtgcggcggagccatcatcgccgacttcgtccccgccggcgcccggcgcccggcaacagacgacaccatgtccgcctccatcctctccggtagcgaggaccatccggagctgccgctgccgctgccggcgccggcgccggggcgcaagacggcgtaccgcgggatccggcgccgcccgtggggccggtgggcggcggagatccgcgacccgcggaagggcgcccgcgtgtggctcggcacctacgccaccccggaggacgcggcgcgcgcctacgacgtggcggcgcgcgagatccgcgggcccaaggccaagctcaacttcccgcccgccgtgggcggcggcggcggcgcgcgcgcgccggcgccggctgcggccaagaggcgccgcaagtccgcggcggccgaggagagctcggcctcgtctcctccggcggccgtcgtcgtggcgggcggcggggaggaggcgctgcgcgactgcatgtccgggctcgaggcgttcctggggctgcaggacgccgatgagggtggcggcgtcgaggcgtgggacgccgtggacctcatgttggcgtaggccggagtacgccgtagcagggctgcaggggggcccagccccagccccagcgcgcgcgtgccgtcgctgtgaacggccgccgcagctgttttggatcgagtaataatattattagtagtataatgtttctccaagcagctaagctaattgcatgccttgctgggtgggtggtattactagcactgctatctaggagtatgtactagcaggatgggtttatctagcttgttgctaaacagataattaatctaagaaaacagagatatggtctgttaattgccggctctaactaatgcccggcgat

SEQ ID NO: 13454 - DNA, 1140 bp, Zea mays
  Clone ID: JC-ZMSHLIB3569P027A02_FLI
ctagcttcttctagctctagctaggctcgtctgctgcaagaaggtaacagcgcaggcatggaggggaaggaggaggacgtccgcctgggcgccaacaagttctcggagcgccagcccatcggcacggcggcgcagggcacggacgacaaggactacaaggagcccccgccggcgccgctcttcgagcccggggagctcaagtcctggtccttctaccgcgccggcatcgccgagttcgtcgccaccttcctcttcctctacatctccatcctcaccgtcatgggcgtctccaagtccacctccaagtgcgccaccgtcggcatccagggcatcgcctggtccttcggcggcatgatcttcgccctcgtctactgcaccgccggcatctccggcgggcacatcaacccggcggtgaccttcgggctgttcctggcgaggaagttgtccctcaccagggcggtgttttacatcatcatgcagtgcctgggcgccatctgcggcgcgggcgtcgtcaaggggttccagcaggggctgtacatgggcaacggcggcggcgccaacgtcgtcgcgcccggctacaccaagggcgacggcctcggcgccgagatcgtcggcaccttcatcctcgtctacaccgtcttctccgccaccgacgccaagaggaacgccagggactcccatgtgccgatcctcgcccctcttccaatcgggtttgccgtgttcctcgtccacctggccaccatccctatcaccggcaccggcatcaaccccgcgcggagccttggcgccgccgtaatttacaaccagcaccatgcgtgggctgaccactggatcttctgggtcggccccttcatcggcgctgcgctggctgccatctaccaccaggtgatcatcagggcgatcccgttcaagagtaggtcttaaaggagccgatgctgctgcttcgagatgctgccggtcttgaaaggatggattcgtggctgtttcaaatgatcccctactatgttacgtggagttccattcctctttcaaagttcggagctgcttttatccgaacccagacttgtaattcatctgtaccaattgtgtaatatgccgcgcctctgttatgtgcaattcaaaattatgagacagcgagtc

SEQ ID NO: 13455 - DNA, 1667 bp, Zea mays
  Clone ID: JC-ZMSHLIB3569P029F09_FLI
cggactgccaaagcccggaggcctgaggcccgagttacgcgaggagcagccgaaccagcggcccggcgcctcatccctcagcggccccgcccctggggccgtgtagtcagcaagcggccacgcgagtgcgcggtcggcgcggagtgagcaggagcaacccgtggctggcggtcagtcggtggctagctggagcctggagttgcgacttgcgagcggcgttagaactcgctccacctataatttttgtgtggctccgtcactgattccacccgttctgtggccggcgacagaggcacagagaagcgccaatccgccggcttgatctgaagcatggacaggtttgaggcttggccatgcctttaaatatagatattgatctgttcaagctggatattgatgagctgatagctgattattccaaggagaactgtacgtcactctttgaattcaaacgagtatggatgggcaagaaattttcttatatctatgaaggcagacctaagacaaactcgggtttattcatgcagtccctctttctgcattgtattggtcatttgacttctcaaagttcactgcaccaaagattggctgggctatactgcctttactgtctgtatgagtgccagccatacaagccgcagttcaagatttacttgtctcttgaggagtgcaggcaactgaaagatgtcgttgttatggcgaagcaaaatggactgcagctcgtgcctgcacttgtcaaaaggatgctggataaagacatgtttttgtttggctacatgaatttgatcgacgacaacggggacaagcaggtcgaggaaatgaccgcattgcagaacaagcgagtaaaatttgcatgtgacaagttatttgcaaatacccaagcagaaagatatttgcacatggacttgggtgctgagttcgagcttgatagcatcaagaaattgtcaaaggagtatgcagaagcaaaggaactggcccttgcagaggcaagccaaactgtcgaagttgacgatgctaagcacctccttcagagtgagaggctgttgggcgacaagatagatgaagtcgtcaaagaatgggatgtccagaaggaggggttctacgagaggacaggattatcctcatcccctggcgaccagctcatggccatcgacaacgatgaatcaggagctcaatgtcacgaggatggatcccgttgcgatcagctcatggcggttgacaatgatgaattgggagtacaggatcacgaggacctcgacgacgacgacggctttgccgagttagaactgctgctagagtgaagaacatatacaagtctgtaaactcttactaccggcgtataaccgtgtaatcagaacaccgagagatgtactggcttgtttggtttgtggctaaatgtgccacactttgcctaaggttagtcgttcgaattgaataactaaccttaggcagaaaagttaggcaaagtgtggcaactgaggtagtgaaccaaacaggcctgtaatcctcgctcgtctttactagcctctcctttttaggtgccagaccttctgttcatctacactggctgcagtaactgtacattgaaataatccagtgcgccagcctatgcaggggagaaaagaaagaggtgagcttaagtaaaaatgtacatgaacagtgacaag

SEQ ID NO: 13456 - DNA, 1818 bp, Zea mays
  Clone ID: JC-ZMSHLIB3569P029G11_FLI
ttgaaagaaaaaagaaatagtttaaggaggtttctagaagcaacggtaaaagaaagtttattgctttcaatattaggttaggtgtagaattgattaattgcatgagtagggtttctcactcagcttggtgattgcatgcagggtttcataactgaccatgagagggcattggaagaactttttagtgaaaatgcagaaggatctcacaagtataatgcttgtctgaacacaatggctactcgtatatccacagtatttgcatcaatgagggaattccctcgtgtacactaccgtattgccaagacgattgatgcttctacaatgacaacactacgagacttagtccccacaaagcttgctgccagtgtatggaattgtcttgcgaaatataaaacgacaatacctgaatttcctcaaacagaaacttgtgagctacttatagtagaccgttcaatagatcagattgcaccaattattcatgaatggacttatgatgctatgtgtcatgatctgctttgtatggatggcaacaagtatgttcatgaggttccaactaaaaatgggtcggcaactgaaaaaaaggaggtcctgttggaggatcatgaccctgtctggcttgagcttaggcatgcacatatagcagatgcaagtgagaggctacatgataagatgaccaacttcatttcaaagaacaaagctgcacaattgcatcaagcacgaaccgatggagaattatcgacaagagatttacaaaaaatggttcaggctcttccacagtacagtgatcaaattgataagctttccctgcatgttgagattgcaggaaaactcaataacataataagggaacaatgtcttcgggatgttggacagctagagcaagatcttgtgtttggcgatgctggaaccaaagaactaatcaactttttgagaacacaattggttgtaagtcgtgaaaataaattacgcttgctgatgatttatgcagcacttaacccagagaagtttgaaagcgacaagggtgcaaaattaatgcagttggcaggattatctgctgatgacatgattgctgtaaataatatgcgttgcttatgtgggcctgataccaaaaagtcttcagtagggggttttacactgaaatttgatgttcacaagaagaaacacacaaatcgaaaagagcgaacaggggaagaatcaacatgggcactctctcgattttaccctattttggagcaattgattgaaaatcttagcaaaggtgagctgccaaaagatgaatataactgtatgaatgaccctagtcctactgttcatggactgccaaccagtagctctgcccgaacaagccccgctcactcaatgcgatccagacgaacaggtggcacatgggcaagacctcgtggctctgatgatggatattcaagtgattctgtgttgaagcatgcctccagtgacttcaggaaacttggtcagcgtatatttgtttttgtaataggcggtgctactcgatcagagttacgtgctgcacacaagctttcatccaagctgaagcgagacatcatccttggttcatctagccttgatgatcctccccagttcatcacaaaattaaagttgatgtcagtagaagaattgacacttgatgaccttcagctgtaaatggtgtccgcccacacggagtgtaaccttttattttctctgttctgtcagctcttatttgtgggggcctgtcatattcattcggtgaaatgcattcttaataccacttttactggtgaatgtaagaaaaaaactgttatgcaattaatcttttcatgc

SEQ ID NO: 13457 - DNA, 1168 bp, Zea mays
  Clone ID: JC-ZMSHLIB3569P030B12_FLI
ccccagaccagcagcggctcatctttgctgggaagcagcttgaggacgggcgcacgcttgccgactacaacatccagaaggagagcaccctccacttggtgctgcgcctcaggggaggcatgcagatcttcgtgaagaccctgaccggcaagactatcacccttgaggtggagtcttcagacaccatcgacaacgtcaaggccaagatccaggacaaggagggcatcccaccggaccagcagcgtttgatcttcgctggcaagcagctggaggatggccgcacccttgcggattacaacatccagaaggagagcaccctccacctggtgctccgtctcaggggtggcatgcagatctttgtgaagacactcactggcaagacaatcacccttgaggtggagtcttcggataccattgacaatgtcaaggccaagatccaggacaaggagggcatcccaccggaccagcagcgcctcatcttcgccggcaagcagctggaggatggccgcaccctggcggattacaacatccagaaggagagcactctccacctggtgctccgcctcaggggtggcatgcagatttttgtgaagacattgactggcaagactatcaccttggaggtggagagctctgacaccattgacaatgtgaaggccaagatccaggacaaggagggcattcccccagaccagcagcgtctgatctttgcgggcaagcagctggaggatggccgcactctcgcggactacaacatccagaaggagagcacccttcaccttgttctccgcctcaggggtggtatgcagatctttgtgaagaccctgactggaaaaaccataaccctggaggttgagagctcggacaccatcgacaatgtgaaggcgaagatccaggacaaggagggcatccccccggaccagcagcgtctgatcttcgccggcaaacagctggaggatggccgcaccctagcagactacaacatccaaaaggagagcaccctccaccttgtgctccgtctccgtggtggtcagtaagtcatgggtcgtttaagctgccgatgtgcctgcgtcgtctggtgccctctccatatggaggttgtcgaagtatctgctgttcgtgtcagtgttggtttaataatggaccggttgtgttgtgtgtgcgtact

SEQ ID NO: 13458 - DNA, 1866 bp, Zea mays
  Clone ID: JC-ZMSHLIB3569P033C06_FLI
gcccttcaccacaatcaggcccacctcccaccaccacatttcttctcatccaaccgccccgtaggatcacagagaagggggatggcgagcggcggggcggtgagggatgtgggctcgccggcggagctggaggcggcggtggccggggcgcgggcggtggccgtgcacttctgggcgtcctggtgcgaggcgtccaagcagatggacgaggtcttcgcgcacctcgccgtcgacttcccccacgcggccttcctgcgggttgaagctgaagaacaacctgaaatatcagaggcatatggagttacagcggttccatattttgttttttgcaaggaaggaaaaattgttgatactttggagggagcaaacccagccagcctggccaataaggttgcaaaagtagctgggcctgctagtgttgctgagtctgctgtacctgctagccttggagtcgctgctgggcctgctgtacttgaaaacatccaaaagatggcacagcaaaatggatcctctgctgctgaaagcacaaactctggcagtactcaagatgcattgaataagcgattggagcagcttgtcaattcccatcctgtgtttttatttatgaagggaaccccagaacaaccaaggtgtggtttcagccgtaaagtggtgaacattttgaagcaagaaggggtcacatttgggagctttgacattcttacagataatgatgttcgggaaggtatgaagaagttctccaactggcccacttttcctcaactgtactgcaaaggcgagctgcttggtggatgtgatattgttattgctatgcatgacagtggtgaattgaaggatgtttttgaggagcacaatattccccttaaaccacagggtagcaaaaatgaagaagcaggtcagcccgagtctgcaactgagaagggtggtgcagctgctgaaccaatcgggcttactgatgctcagaaagctcgtttggaaagccttactaattccagcccagtgatggtattcatcaaaggtacaccagaggaaccaaagtgtgggttcagtgggaagttggtccacatacttaagcaagagaatattcctttctcaagttttgacatcctttcagatgatgaggttagacaggggctgaaggtgctctcaaactggcccagttaccctcaactgtacataaaaggtgagctggttggcggctcagacatagtgatggagatgcacaagagtggtgagctgaagaaggttctgtctgagaaaggggttattccaaaggaaagcctggaggacagattgaagtccctggtttcctctgcaccggtgatgcttttcatgaagggcactccagatgctcctcgttgcggcttcagttcgaaggttgtgaacgccttgaagaaggaaggggtcagctttgggtccttcgacatcttatctgacgaggaagttaggcaaggtttgaagacgtactccaactggcctaccttcccccagctctactacaaatcggagctgattgggggatgtgatatcgttcttgagatggagaagagcggagagctgaagtcgaccctgtcagagtagacacctagctagcattcttgcttcgctggcgtttttatcacattgcctgcattggatcactctactctggtattcatgtcattgtattcatagatccacgttggtacttgtctgcagtgccacattgctagaattgtgacacatctgcagaaggaataacttcttacgcttgttcggtactgattgcattgttcttatatcaccagttctatttagcggatggaagcttttttgttcgggtattgtcacgatttatagacggatgaagtaaaatatttatagagt

SEQ ID NO: 13459 - DNA, 712 bp, Zea mays
  Clone ID: JC-ZMSHLIB3569P033E05_FLI
ctcgggttagggttccttagggttttgtggaggggcgatggcggcggctgatgtggagtaccgttgcttcgtcggcgggcttgcctgggccaccagcaacgagtcgctggagaatgccttcgcctcctacggcgagatcctcgactccaaggtcatcaccgaccgggagacggggaggtctcgcggcttcggcttcgttaccttctcctccgagaactccatgctcgacgctatcgagaacatgaacggcaaggagctcgacggccgtaacatcaccgttaaccaggcccagtcccgtggcggtggcggtggcggcggtggctacggcggcggtcgcggcggcggcggctatggtggcgggcgccgtgacggcggttatggcggcggtggcggctacggcggtcggcgcgagggtggtggcggcggctacggaggcggtggcggctacggcggtcggcgcgagggtggtggtggcggctacggcggcggcggcggcggctggagggactgatgtgtgggcccatcctggcttcggccgagttatcttatctatctatagtatcgtgttaccgttcgcttctgtcaccgtgttagtgtccgttctacctttggattaggtgttggtacccctgttgttccctttgtttgctcccgctatgaaacgagacgagagaagaatgagcaaggtttttgttcgcagctatttttgtcc

SEQ ID NO: 13460 - DNA, 1284 bp, Zea mays
  Clone ID: JC-ZMSHLIB3569P035C07_FLI
tttcccaaattgaatcctcctcctcctcctcctcctccccgcctagggttccgattccgcaccgtccgagaaccacccaagcggcggcaactgtcccttctcgtcggccaccgccgcacaactcagttgcttgttcagccgctccgctgccgacccgcctatcgcctgaggttcttacggtgccacggagttgcaactgcacaaaggccttttgtggtcacaaagggtgctattgtgttacaacaacagttctagttgaagtaataagacattttttaaactgtctgctacattgcttccatggcaaccaatgagaacctcccaccaaatgtcatcaggcaattggctaaagaactgaagaatcttaatgagtcacctgcagaaggaattaatgtgactgtcaatgatgatgacttcactactatttttgctgatattgaaggccctgctggaactccatatgagaatggagtgttcaggatgaagctattattgtctcatgattttcctcaatctcccccaaaaggattcttcttgacaaaaattttccatccaaacatagctactagtggtgagatatgtgtaaacacactgaagaaggattggaatcctagccttggattaagacatgttcttctggtagtgagatgccttctgatcgaaccatttcctgaatctgcacttaatgaacaagctgggaagatgctactcgaaaattatgaggaatatgcacggcatgcaaggttatacactggcatccatgccctcaagaataagtccaagactggagctatatctgagtcgaccacagctctgaatgtcgacaagtcaagtactgctcccaacgagagcgcaccatcatcgatgccaccggcaatacctacctccgctgcatccagagcacttggcacgaatttgcaggatcagagccctactgtatctgatcctactgtaggagcggcggcaccagcgcgaaggaaggatggcccaatgccttccaaagtacctgttgataggaaaaagatggatgcacggaagaagagcttgaagagattataggcggaaccttcctgggaagaagaggagggttcatagtccagcatttaaatctgtcggaaatttagcagttgcctagcgaagctgggagagagacaattagttgggaggcatctgatgacctggcttccgggagtaggggtcctgggctgggacaaaagtgaataatgtggcctgggtgggtcgggtccttcgggacaactttatgtgcaatgtccaatcatttgg

SEQ ID NO: 13461 - DNA, 805 bp, Zea mays
  Clone ID: JC-ZMSHLIB3569P037H04_FLI
cccagcattgccttaccttgccttgccttgccctgccctccattccacctccacctcgccgcccaaatccccccacccaacaatcccccatggggtcgcaggccatcgaggcgcaccgcgcgggcgcggaggtgtaccgcggcgcggcgctgtgcgcggagaagtcgacggagctgctggcagaggcgcacctcccgctgggcctgctgccgctggccgacatggaggaggtcggctacaaccgcgccacgggcttcgtgtggctgcgccagaggaagtcgctcacgcacacgttccgcccgatcgcgcgccaggtctcgtacgccgccgaggtcaccgccttcgtggaggaccggcggatgaggcgcatgaccggggtcaagaccaaggagctcctcatctgggtcaccctctccgacatgttcgtcgacagggacgacccctccaagatcaccttcaagacgcccaccgggctcggcaggacctaccccgtctccgccttcgccaaggaaggcgccggtgacgacggcgcggcggccaagcacaaggatgatgcccccgccccggccgccgccggtaaggctgctgccagccagtgaggtggcggcgttcggagcttttaccttgccgtagtcgccatacttgcctcctcaataatggcgtttgtaccccctctacctgcttcaaattagtgtgctttatgaatggaaacgactatcgaactttccatccgtccttgcaatgtgtcacggggtgtttttactacacatcagctttaccagtttcaagattgtttttccccgct

SEQ ID NO: 13462 - DNA, 1076 bp, Zea mays
  Clone ID: JC-ZMSHLIB3569P038F11_FLI
cggcgaaccctgaccgctgcttcggggccggcgctgccgaaggaggcggcgggggcgggggcgcgggtgagggcggcggcgcccgggcgcagggggcgggatcaggaggacgggaggcgcgtgcagtgggtgttcctcgggtgccccggggtggggaagggcacctacgccagccgcctctcgcagctgctcggcgtcccgcacatcgccaccggcgacctcgtccgcgacgccctggccacccctggccccttctccaacaagcttgctgagattgtcaatcatggaaaactggtgtctgatgagatcatcataaatctgctgtcaagacgtctggaagagggagaggaaaagggtgaattggggttcatccttgatggctttcctcgaaccataggacaagcggagatacttgaaggagtcacagacattgatttggtgatcaatctcaaactccgagaagaagctctgcttgcgaaatgccttggcaggaggatgtgcagccagtgtggagggaacttcaatgtggcctccattgatattgagggtgaagacggcggacctcgaatgtacatgcccccactgttgcctcctccacagtgtgaatcgaagctgattgctagagcagacgatactgaagaagtggtaaaagagcggctgcgtgtgtaccatgatttgactgaaccagtggaggagttctacagagcacgtgggaaactgctggagttcaatctgcctggtgggatacccgaatcatggccgaagttattgcaggccctgaacatagaagaccccgacaataagcgatctgcagcagcatgattcttgttttgttataggaatgcacattctaaattgaacatctgtagactatgtcaaagctagtcaaattggtgggcattccttacatctttgggaagcctactccattctggatccagattattgtggcatggcactcaactgtacagtagattgatcatcgattggcaaggtcgatcgatggatgtgctgactgtgatcctcgaacgtaaggtgtgtaaaaaggcaagaaaataattgttgggcgtcgagac

SEQ ID NO: 13463 - DNA, 978 bp, Zea mays
  Clone ID: JC-ZMSHLIB3569P038G05_FLI
ctcatccgaattcccaggcaggcaggtcggcgaggagggcaggaagaccgaagaccgagccgtgcgggggctcgggacgggaacgggacaggacctcaaaatctcagatccttcctgcccgcccgcccgtgcccgtcgacgcgtcgttcttgccggccgcgccccacctccgccctctcctcctccagggggatcggatacgccacaggctgcgcgatggtgctgtgggtcttcggctacggctccctcatctggaaccccggcttcgacttcgacgacaaaatcctcggcttcatcaagggctacaagcgcacctttaatctcgcttgcattgaccacagaggcacaccggagcatccggcgaggacctgcacgcttgaaaccgacgacgaggccatatgctggggaattgcatattgtgtcaagggtggtccagaaaaagagctaaaagcaatgcagtacttggagagaagagagtgtgagtacgaccagaagatatccattgatttctacaaggaaggagatcccttgaaaccagctgtgacaggcgtcttagtgttcgtttccactccagatccaattggcaacaagtactatcttggccctgctcctttgcaggatatggcaatgcaaattgctacagccaatggccctactggctataatagggattacctgttctcaatggagaaggcattagccagcattagccacgaagatgattcgatcatagagcttgcaaacgaggtgaggaaggtgctcaacagaacaaaggagaccaagatcactggtgccaatgcttccctgaaatcacatgcccctcttgtgcacctgtccgcgcttccagaaggcaccgttgtggactcgagatagctcgccttggacgttggacctctactcggaatctacttccagctcttgcatgtttgtggccatcatgtactgattttcccttttcaacagttgtcgtgaggctgt

SEQ ID NO: 13464 - DNA, 1221 bp, Zea mays
  Clone ID: JC-ZMSHLIB3569P038G11_FLI
gctcggcgcctcgcctcctgcccgccatagctcccaaccccaataccgccgctctgacctgctgttgcatcgccgccgtcggcaaatcgcttccactcttccccgccatctccaccgacaaggctgtctagtgagtgcgcggccctgctcggtggagccagccaccaccatgcccattgtgtgggcggaaggcgcagcacaggggcctgctacttggtggagaggaggacaaatctgcgaccttttcatcgagtagaagcatcggcgctgtggcggccctcctccttgcccattcctctctttcgattcttcgatgcccatcgtccccaatccagtgagctgtaccaatccccatcgccccagaccagaccaacagtgagtacagcagcagctaagagcgtcagcgtgagagcgtgcgaagcaggagggaggacaacaagaagccgatggcggttgtgagcggcagcggcgggaggctgaacccctgggcggagcccttcgtgccttccggggcacggtaccgcgtgctgcggaccgtggaggcgacgccagagcaggaggtggaggacttctcccccgagtggtggcgcctggtgtccgcctccccggccttccgtgaccgctggctccgcgagtacggcgcgcttggcctactcgacgccgaggacgacctggacgacgacgtcgacagcttactccccgacgacttcttctcgcctccggcccagcgccacgttaaagctacctcgcaagagcgagcgggaggacgccgcgggcaggagggcgggccgagggcttgaggtggcggcgtggggcatcgacaggtggtggagggcgcacggtgggccgccggagaccacgaggtaagcggagaaggcgccgcggagggtggccgccgccgccagggtgagcccccgccccatctagcagccgcgctgaaggaccagatccgttcatccaccgacggctgctcagtcagtgtcacatcttggcacaggggaaaataggcatgaaaaaaagttctctttcttgaatcgatgcagtttgctttggtgttcgtcttgcgcagtttttggatctgtgctcctcttcagctcgagatcctctgctgcgttgctcattcctgtactgtgtaaatatgaagatgtaataacaataacacgatgtgtgactttttagccttcagttttgccttttcgggctttgacaggcgcaatcatc

SEQ ID NO: 13465 - DNA, 1085 bp, Zea mays
  Clone ID: JC-ZMSHLIB3569P041A08_FLI
ccctcaaggcgaggaagaaggtggccggagctcttcgggaggtggtaaggaagaggatggacgacaaggcggaggacgactgtggcgccagtaagaagaacggggagaagaaggacatggtggaggagctcctagaagcggagggcgggagcttctccgtggaggagatggtggacttctgcctgtccctgctggtggctgggtacgagaccacctccgtgctcatgacgctcgccgtcaagttcctcaccgagacacccaccgcactggcgcagctcaaggaagagcacgacagcatcagaggggtaaaaggcaaaggccaagctctggaatggagcgattacaagtcgatgccgtttacacaatgcgtgataagcgaaacgctgcgcgtggccaacctgatcagcggggtgttcaggcgtgcgaacaccgacatccacttcaaaggccacgtgatcccaaagggctgcaagatcttcgcgtcgttccgagccgtgcaccttagcctggaccactacgagaacgcccggaccttcgacccttggagatggcagcagggcaagagcaagctgcagagcgcggaaggggccagtctgttcacgccgttcggcggcgggccgcgcctgtgcccgggctacgagctcgcccgggtggtggtttccgtcttcctccaccacctcgtcacgcgctttagctgggaggaagccgaggaggacaggattgtcttcttccccaccacccggaccctcaagggataccccatcatcctacggcggcgaccggattgcgatgatctctgacctcatggctaggttccccccttatcttcttcggatcaaggctgaaggctaagcattagatagagtaaggtggatgtcgtcgtggctagtaggtgcatggtggtttctgccactcactcactcactcactctgttgtctgtttgttcctgttcctctctgttttctcttgctctgtaacctggacctggtacgagtcagcactcagcagccagcagcaaactcgcgttttgcttgtaaaatctaaaatctgatatgagatgcagatgcccccgcgactgagacgg

SEQ ID NO: 13466 - DNA, 1150 bp, Zea mays
  Clone ID: JC-ZMSHLIB3569P042D06_FLI
ggcgctgctggcggagtgggcgacggcggcggcgcctcggaagcccgtggacgtgccgttccagaagaactacgtgccgacgtgggcgcaggaccacatccactacatcgacggcgggcgggaggtgcagctgtacctggacaagtccaccggcacgggcttccagacgcggggctcctacctcttcggccacttcagcatgcacatgaagctcgtcggcggcgactccgcgggcaccgtcacggccttctacctgtcgtcgcagaactcggagcacgacgagatcgacttcgagttcctgggcaaccggacggggcagccctacatcctgcagaccaacgtgttcaccggcggcaagggcgaccgcgagcagcggatctacctctggttcgaccccaccaaggagtaccactcctactccgtcctctggaacctctacatgatcgcgttcttcgtggacgacgtgccgatccgggtgttcaagaacacgagcgccgacctgggcgtgcggtacccgttcagccagccgatgaagctctactccagcctgtggaacgccgacgactgggcgacccgcggcgggcgcgagaagacggactggtccaacgcgcccttcgtcgcctcctaccgcggcttccacgtcgacggctgcgaggcctccgcggaggcgcgcttctgcgccacccagggcgcgcgctggtgggaccagccggagttcagggacctcgacgccgcgcagtaccgccgcctggccgaggtcaggcgccgctacaccatctacaactactgcaccgatcgcgaccgctacggcgccgccgtgccgcccgagtgcgcccgcgaccgcgacgtctgatgatgatgcgttgggccggcaagctgcttgatcgagagcagcctgtaatgtatgtatggtatggtattgttgtgtgtcaggttcgtcgtcgtgggtctgcagagacagagagagtccgatccggcgcgtacgtgtgcccgcgtgggcacatgcatacgtacatgcttgtgttgtactgtacgctcgtatctcctcacaccgaaatgaattgcgattaagtatcgaaatttcggcagcttatccatcatgtaatgagttcctctgcagtacttaaaactctcatcgtctcttgtctgt

SEQ ID NO: 13467 - DNA, 805 bp, Zea mays
  Clone ID: JC-ZMSHLIB3569P045E07_FLI
ccctgcatggttttccttcaactcaaaagatggagtgcatattgtgagcggtgactcgttaatcgaatgcactactattgctgacaagtgtgcaaaggttggtgcggtcgggataaactgcacacctccaagatttatccatggactgatactctccattcgaaaggtcacggacaagcccattctgatatatcccaacagtggcgaaagatacgatggtgaaaaaaaggagtgggtggaatccactggtgtgtcagatggtgattttgtttcttatgtgaacgagtggtgcaaagacggggctgtgcttatcggtggctgctgcaggacaactccaaacactatcagggccatacacagaactctgaacaaaagccccaacaagcagcagttacctgctgtagaataagagctgtgctctactctgatgcgcccgccttcctcctagcagtacctcgaggctataactccatgattccgtaaccgtacgtgttcgttctcttgcaaacgagatgtttgtaaataacgctgtatttctgggttctgagatatgcaacttggatggaggtacaaccggtgaaggggggtgaggaagcagcaacaatggtaagagttctactactgagtgggggaaaaacaacttgcggctgggttagtgaagcttagtagctaccactattcaagagttaaagggagttcgtatgacagttcctctggagatgttatcttcaaagtcttatatcactgctacttgtgagctgtgttaaaacctatatatataagttttgtttgacgtgactgcatt

SEQ ID NO: 13468 - DNA, 247 bp, Zea mays
  Clone ID: JC-ZMSHLIB3569P045E12_FLI
caggctcatctcgctttggatcgattggtttcgtaactggtgagggactgagggtctcggagtggattgatttgggattctgttcgaagatttgcggaggggggcaatggcgaccgcggggaaggtgatcaagtgcaaagctgcggtggcatgggaggccggcaagccactgtcgatcgaggagggtgttattaccagttggttttttttttaaaaaaaatactgtactattacgcattttcgcatg

SEQ ID NO: 13469 - DNA, 829 bp, Zea mays
  Clone ID: JC-ZMSHLIB3569P046D11_FLI
ctcggccttcagtggccacctccggacggcggcatctgtcatgtagggcgcgacgaggcgccggcgcgcggcttcgacgtgaaccgggcgccgtcggtggcggggagcgccctggcgctggaggatgacgaggaggagccgggcgccgcggcactgtcgtcgtcgcccaacgacagcgcgggctccttcccgctggacctgggaggcccacgcgcccacgccgagggcgccgcggcgcgggccggcggcgagcggtcctcgtctcgcgccagcgatgaggacgagggcgcgtccgcgcgcaagaagctgcgcctctccaaggagcagtctgcgttcctggaggagagcttcaaggagcacagcaccctcaaccctaagcagaaggcggcgctggcgaagcagctcaacctccggccgcgacaggtagaagtctggttccagaaccgccgagccaggacgaagctgaagcagacggaggtggactgcgagtacctgaagcgctgctgcgagacgctgacggaggagaaccggcggctgcacaaggagctcgcggagctgcgcgcgctcaagacggcgccgcccttcttcatgcgcctcccggccaccaccctctccatgtgcccctcctgcgagcgcgtcgcctccggccccagccctgcctccacctcggcacctgcgtcgtccacgccgcctgccacagccgccaccaccgccatctcgtacgctgcagcagccgccgcacccgtgcgagccgaccaccggccctcgtcgttcgccgcgctgttcgcggcgacccgcagcttcccgctggcgtcccagccgcggccgc

SEQ ID NO: 13470 - DNA, 1677 bp, Zea mays
  Clone ID: JC-ZMSHLIB3569P050F04_FLI
ggctagagccattttgaaaaactcttgagccttatcaaatggttcggtagaaatagttatttacggccctttttcattaaaaagggaggagctagagccattttgaaaaaactcttgagggcctgtttggccctttttcattaaaaagggaggagctagagccattttgaaaaactctgagggcctgtttggcaacaatgttttacacatgataataccgtagttttggtagctccaaaaataacatggttttgagaaacattgtttggagacaatattataaaccatggtattaggcaaaagctagtcatgccataaaaactttaggttgtagtggaatctccaatactctaaaaatatcatggtatctataaacaatggttttgaaaacatagttttcaggagtgcaactaaacacctcatgacataaaatactacggtattgtccaaaaccatggtattgcatagaaactataaaaaaaatattttgctctcacacagacctaaactcttccagctcctaaagtttctccaggttgaaatgacaatcttatactgtctgtcatgttgtactataaatgccttggtttttccattgtttggtattttactgtcctgccaatagacaatttcactttgaattttaaaaagttttgacataaaaatttaaaatggacactttgccatagcaggtgttatcactgtgcatactctaaagcatggcggtttaagatagttaacaagcttggtgatattcaattaatcattgctgacgtattttgttgttaacaggattcaatcaattatttctggggtggtctacagccaatgcatagtctctatctgtgtgtgtgttttgtgtttcccgtgcactctattcctttcgagaggcactctatgtcaggtgcctgaaatatggtttagcttcaggcaatgaagtggacgtcggatggagatccgagtgtccacgatgacagagaccgggttttgaatctctcgtctctccatctctcatgcgttcccaacttccaactccaatgccgtctccgctggctgatcagtgatcacctctgaccctctctggtgatgtgtacccattgttaatctctccaatgaagctaccctgcctgaccaggcccacaggctgtctcctgcatacggtggcaacacaccaacactgctggcctgccctaagacacatcttcgcgttgcgtccactggatacctgctttcttagtcagcagcatgccgaaaccctccatttgtgaaacctcagcggtgataggcggtggttgtcgaacgctggcatgaaggtgtgagctcccaactgctgaatcgtgttcctcttttacatgcacgtgtccaacaagaaccaaggtggaactgtaaagccttgtgtctttgaactttgcagccacgtattcagatttttttttgagttattgtaatttatttacattccctctagaaccgagattagcgctacctcagtacactgccggtgcaagataaacgaaggaagctgggattgcatggcactgcggtctgttatgtagccgtggaacagcaagacaaaaagacatggatattccttgtttggattggggtgtttgatccagaaacagtctcattgctaattgtttcattattactacaaatcttggtcgaggcgtgaat

SEQ ID NO: 13471 - DNA, 1604 bp, Zea mays
  Clone ID: JC-ZMSHLIB3569P056A04_FLI
cctctgtcccttgcaagttcaatctcacctccaaccatgggtaaagagaagtcccacatcaacattgtggttattggccacgttgactctggcaagtcgaccaccacaggacacctgatctacaagcttggaggcattgacaagcgtgtgatcgagaggtttgagaaggaggctgctgaaatgaacaagcggtccttcaagtacgcatgggtgctcgacaagctcaaggctgagcgtgagagaggtatcaccattgatatcgctctgtggaagtttgagaccaccaagtactactgcacggtcattgatgcccctggacaccgtgacttcatcaagaacatgatcactggtacctcccaggctgactgtgctgtccttatcattgactccaccactggtggttttgaggctggtatctccaaggatggccagacccgtgaacatgctctccttgcgttcacccttggagtgaagcagatgatttgctgctgcaacaagatggatgcaaccactccgaaatactccaaggcacgttatgatgagattgtgaaggaagtctcatcctacctcaagaaagttgggtacaaccctgataagattgccttcgttcccatttctggttttgagggcgacaacatgattgagaggtccaccaaccttgattggtacaaaggcccaaccctgcttgaggctcttgaccagatcaccgagcccaagaggcctttggacaagcccctgcgtctgcccctccaggatgtgtacaagattggtggtattggaactgtaccggttggtcgtgtggagactggtgtcatcaagcctggtatggtagtcacctttggtccaactggcctgactactgaggtgaagtctgttgagatgcaccacgaggcgcttcaggaggctcttccgggcgacaatgttggcttcaacgtgaagaacgttgctgtcaaggatctcaagcgtgggttcgtggcctccaactccaaggatgaccctgccaaggaggctgccagcttcacctcccaggtcatcatcatgaaccaccctgggcagattggcaacggctatgccccagtgctggactgccacacctcccacatcgccgtcaagtttgctgagctcattaccaagatcgacaggcgatctggcaaggagctcgagaaggagcccaagttcctgaagaacggcgatgctggtatggtgaagatgattcccaccaagcctatggtggtggagacattctccgcgtatcctcccctgggtagatttgccgtccgtgacatgaggcagacggttgctgttggagtcatcaagagtgtggagaagaaggacccaaccggcgccaaggtgaccaaggcggctgccaagaagaaatgatgcgataccgtgtctgcttttgcagtgcctggataacttgccactaaagttgtgtatgcggttgttgctgttattgcgtggactgtttgctgcggtgtctcctgtttgtttgggtagcgcagcgtcggcctcttcaggttactgttgtctgttgtctttactatcagtaatgctcctgagacttgtatttctccttttggcgccgctaaatggaattttcgaac

SEQ ID NO: 13472 - DNA, 731 bp, Zea mays
  Clone ID: JC-ZMSHLIB3569P056D05_FLI
gaaaggtatcaagaatatatgacctaaagggttctttgcgttcccgctacaaccctgatacttcagggaacaacaaggttctcttggatcttaatctgttagagacacttcacacaaagcccatttttcttggaagcaaagcaaaaagaaggctagaacgagctgtctggaatgatacttcttttctggcatcggtggatgtgatggactactctctcctagtcggcattgatgaagaaaggaaagagcttgtgatggggattatcgactatcttcggcaatacacttgggacaaacaactagagacttgggtgaaggcgacaggatttcttggtggctccaaggatgttctgccgaccattatatctcctgaccagtacaagaagaggttcaggaaggccatgtccaagtacttcttggctcttcctgaccaatggtcaccgtaacgccaacaatgcatccaggccattccaagcgcggcgacagggaagaccactccggttttctttttctttttctctcccttctgtttcttttaggacgatctatccatctgtgcctattgtatgctgtttttgttcacaacaggcaggatgaactctgtggaagattgtggcgattgttgtccagccaagcagaggttaggcgtcaatacgtgtacataccctacactgtaacatgaaattgcaaaggaaatgaaaatacgcgaactcgcgagttccttaccagtg

SEQ ID NO: 13473 - DNA, 1102 bp, Zea mays
  Clone ID: JC-ZMSHLIB3569P056D11_FLI
cacaaagtttctcctcgatcctcatctccctctctcgagtcaagagcagagcagctaccaaacaagctctcctttcgcttccgatccatggagctcgatgccgacaacctgagcgccaccgagctccgcctcggcctgcctgggaccagcagcagcagcagagacgactggcagaagaagccgtcgccctccgtcggggccaagcgcgttctggacgacggcaccaagagcgaggcctcggggaccagcacggccgccggagacctcgacttcgaccacgacaccgccgcgcctcccaagtaagaactagacccccatgtacacgccacgctcccttcgtaggcaccgcctgcatcaagattcaagagacaggggtgcatgggctaattaacctgcctttttcgcttcgtcagggcgcaagtggtcgggtggccgccggtgagggcgtacaggaagaacaccttccaggcggcggcggccaaaaaggtcgagcagaagcagcagcagggaggcctgtacgtgaaggtgagcatggacggcgcgccgtacctcaggaaggtggacctccggatgtacaaggggtacagggagctcagggaggctctggacgcgctcttcaccaactccttctccgcggcggcggcagagggcggcggcgaccaccagcacgccatcgcctacgaggacaaggacggcgacctcatgctcgccggagacgtgccctgggatatgttcatctcttcgtgcaagaagctgaggataatgaagggctctgcctctgaggccaggtgatcgctgatccatacataaacagaggctacagacacgccacctgggaacgcggatccaagagcacacacggatcgtacgtgacgaggaaggagggaggagctgtgtggcttgagctctccagtgttgtacaaaggcatgtttctttctgaacccaaaagggagaaagatgtatgaagcgtgtatataaaatcttagctagcagtttgttttcaaactgtgttttgtatgagcgatcgaaggctgcaaaaatatgaaaaaaaaaaatgaaaagggaatgagaaattgactaaagctggtcattttcctctcc

SEQ ID NO: 13474 - DNA, 1352 bp, Zea mays
  Clone ID: JC-ZMSHLIB3569P058B09_FLI
tcacactcgagagccatctcccagcacacgagcgcgatggcttccaccaccaccaccttcctcgccatcttgctggtcgtggcagcgtccgcggcgccggcacggtcctgctcaccgcgcgacatccacgcgctgctgagcgtgaagcaggcgctgggcaacccggcgtcgctgtcgacgtggacgccggcgtcgcccaactgctgcgcgtgggaccacctccgatgcaacgacgccgggcgcgtgaacaacgtcttcatcgacggcgcggacgacgtgcgcggccagatcccgtcggcggtgggcgggctgacggagctcatgtcgctgacgctgttccggctgccggggctgacgggcgccatcccggcctgcctcacggcgctgtcgaacctccagttcctcaccgtctcccacaccaacgtgtccggcgccatcccggagtcgctggcgcggctgcgcggcctcgactccgtcgacctctccagcaaccggctgacgggcggcatcccggcggcgttcgccgacctgcccagcctccggtcgctggacctccggcacaaccagctgacggggcccatcccggcggggctggtgcaggggcagttccggtcgctggtcctgtcctacaaccagctcacgggccccatcccgcgcgacgacgcgcgcgacgagatcaacaccgtcgacctctcccacaacaggctcaccggcgacccctcccacctgttcgccgccggccggcccatcggcaaggtggacctgtcgtggaactacctcgacttcgacctcagcaggctggtgttcccgccggagctcacgtacctggacctgtcccacaacctcatccgcggcaccgtgccgctgtcgctggagcgcctgtccacgctgcagaagctggacctcagctacaaccgcctgtgcggcccgctccccaagggccacggcgtcatcaagcacgggtgcaagccgtacgcgcacaaccagtgcagcaaagggaccccgctcgcgggatgccaggacctggagtgagtgagccggtggccatggttttctatactctgctctgctctccctcgccggcgttcttttcgtgtcccaatcttgaaggacgacggtacggtgcctggtttagctatagacaaaaaaaggtacggccgcgtggtggcggtgctaatatgcttagccacgcccacgcgcggttgatctttgagcagttaagcgtgtacgaaatgacagctgtgtacgtgtactgtctggtggagtgtgctgtgtatctggtctcgatccgatcggcctaatgtatgaaaaaaaaggatgtttacgtactaaatggaaaatcattttttccc

SEQ ID NO: 13475 - DNA, 410 bp, Zea mays
  Clone ID: JC-ZMSHLIB3587P008D08_FLI
agggaaataaaatttctttgaaaaatgggttgccaaactaatttcgggcctgtatatgcatatctttcgaagacatttcgtcatatgtgtatatcctctgaaatccgaaccatatcccaaccaaattacatatcaacatctctgtcgtgtatatgtacatgagaaagaatccccttcgccaataatcccaacggcaaatgcatatttatcaccagcgtagcgtttagttggaaaaaaatttgaagaacctgtggcctgcctttctagcttagctactccgtgtcgcagtctcacgcttaccaggcaaccagagcagtaaggccagccaagccgagcagcagcacggcgctccaagatgaagctgaaggacccgccctggcggcgggcgacgccggctttccggtgagctc

SEQ ID NO: 13476 - DNA, 1850 bp, Zea mays
  Clone ID: JC-ZMSHLIB3587P008D10_FLI
cggactcaccaagcccaacgccgtcgagccgcctcaggtcaccttttccgcgaaagacatcgaattctccgagtggaagggcgatattctcgctgtcgccgtcacggagaaggatctgtccaaggacgcggactccaaattcgagaatgccgtcttgaagaagctggacggccagctcggcggcctcctgtcggaggctgcggcggaggaagatttcaccgggaagacggggcagtcggtggtcctccgcctcgcggggcagggcttcaagagggtgggcctgatcggtcttggccagagcgccccgtccaccgccgccgctagccgaggcctcggcgagtctgtcgcgtctgttgccaaggccgctcaagctagcagcgctgcaatcgttcttgcctcccccagtgggatccaggaagagttcaagctgactgctgcagcagcagttgcttctggaaccgtgctggggttgtatgaggacagcagatacaagtctgaatcgaaaaaggtgcacctgaaacaggttgatattattggactgggttctggtgcggaggtggatcagaaacttaagtatgctaatgatctttcgtcgggtgtgatattcggaagagagcttgtgaactctcctgcaaatgtccttacccctgctgtgcttgcggaggaggcgtcaaagatcgcttctacttacagtgatgtgttcactgccacagtactagatgtagagaaatgcaaagaactaaagatgggttcctacttgggagttgctgcagcttctgctaaccctcctcacttcatccatttgtgctacaaacccactgatgggaacgtcaagagaaagctggctattgttgggaagggtttaacttttgacagtggtggctacaacattaagaccgggccaggctgcagcatcgagctgatgaaatttgacatgggaggctctgcagctgtatttggtgcagctaaagctttgggacaaatcaagcctcctggagtagaggttcactttatagtcgctgcctgtgaaaatatgatcagtggcacaggcatgagacctggtgacattgtaactgcttccaatgggaagacaattgaggtaaataacactgacgcagaaggaaggctaacacttgctgatgctttggtctatgcttgcaaccaaggtgttgaaaagattattgatttggcaacgctgaccggcgcttgcgttgtcgcactcgggcctagcattgccgggattttcacgccgagcgacgagcttgccaaggaggttgccgctgcttccgaggtatccggcgagaagttctggagactcccgctggaagagagctactgggagtctatgaagtctggcgtggctgatatggtcaacactggcggcaggcagggaggttctattaccgccgcgctgttcctgaaacagttcgtcgacgacaaggtccagtggatgcacatcgacatggccgggccagtgtggagcgacaagaagcgggccgccaccgggttcggcgtttccaccctggtggagtgggttctcaacaactcgtcctcgtcgtgaacaaaacccatacccccctcgtatcacaatgcctttccatgcgttttttttgttccctcctcttttgtgctaccattccatagttgcaaactgcagagcgcctcttggcatgccaagtgtgcgtgtgataccgttgcgatagaataatcagcatgggtagtgaaagaaagcagcggcgtgctggtcgtggtcaagccgtgcctgtcgccttccggctgccgctgtggtcatgtgtaacgcgtctctgccggagtgaaataacgtttgttccttgtgtttgtgcccgcac

SEQ ID NO: 13477 - DNA, 807 bp, Zea mays
  Clone ID: JC-ZMSHLIB3587P009E06_FLI
cttgcctccgatccccaattcctccttcggatctcgcattcagcgcagcgcaggtgtgaaggaagggggacgcggaggaagatggggctcgcgttcgggaagctcttcagccggctcttcgccaagaaggagatgcggatcctcatggtcggcctcgacgccgccggtaaaaccaccatcctctacaagctcaagctcggcgagatcgtcaccaccatccccaccatcggtttcaatgttgaaactgttgagtacaagaacattagcttcactgtctgggatgtcgggggtcaggacaagatcagacctctttggaggcattacttccagaacacccagggtcttatctttgttgtggacagcaatgaccgtgaccgtgttgttgaagccagagatgagctccacaggatgctgaacgaggatgagctacgtgatgctgtgctgcttgtttttgccaacaagcaagatcttcccaatgccatgaatgctgctgagattactgacaagcttggattacactccctgcgccagcgacactggtacatccagagcacttgtgccacaactggcgagggtctgtatgaaggcctggactggctgtccagcaacattgcgagcaaggcttgaggcctaccttgaatgtcaaccgcgaactgactaggagctccggatgtatcatggaaactcaggacagaatcgcagttgcaacctgttagatgtcttctaccggcactatatatattttttgtttgatgtgtaatgatgttactgttcaacgtttattaccctactatactgttggatgtt

SEQ ID NO: 13478 - DNA, 1042 bp, Zea mays
  Clone ID: JC-ZMSHLIB3587P010B01_FLI
cgcatcgagagcggggctgtaccgtgcgagactctactgctcgatcgccatggccgccgcgctcaggtgcccggcatccgtcagggtctcgggccccgccgccgcggggctcgccaaggtgcgccaggcgtccagagtcgtagcggtgagcggggcccggcagagccgcggcggcggcgtcgccgtgcgggcgtcgctgttctcgcccaagcccgcggcggccaaggacgcgcggccgaccaaggtgcaggagctgtacgtgtacgagatcaacgagcgggaccgcgagagccccgcgtacctgcgcctcagcgccaagcagacggagaacgcgctgggcgacctcgtccccttcaccaacaaggtgtacaacggcagcctggacaagcggctgggcgtcaccgcgggcatctgcgtgctcatccagcacgtccccgaccgcaacggcgaccgctacgaggccatctacagcttctacttcggcgactacggccacatctcggtgcagggcccgtacctcacctacgaggagtcgtacctggcggtcaccggcggctccggcgtcttcgagggcgtatacggccaggtcaagctcaaccagatcgtcttccccttcaagatcttctacaccttctacctccggggaatcccggacctgccaagggacctgctctgcacgcccgtcccgccgtcgcccaccgtcgagcccacccccgccgccagggccgccgagccgcacgcctccctcgacaactacaccaactgatgattgatgaatccattatcatccatctctgctctgtctgtcgcggctgtcagaacttgacgagacaagctcccctgctactcatcagtactcctcactcgtagcccaagggtttttcatttttccatgggaaattagttcatttttccttgggaaattgaaaatcccatagaaaaatgtggttgacaaactagcctttatgtgtgtatggctagtttcttcaattcgtgagtgcgtggtagtaccaataagcaataagacgcagagggatcgatc

SEQ ID NO: 13479 - DNA, 1333 bp, Zea mays
  Clone ID: JC-ZMSHLIB3587P012G09_FLI
cctcaccagccgccatcactcgcggcagtacacggccgctgggactgggagagtgggagtgagacgctgctgttgccgagtgcgaggagacactactactcactctcaagactcgagagcagcaggggcgaccgagctctgcgtgcgtggggagaaccggagaaggcagcagaggagggagggagcgcgtggacgggctaggcgcagcagcatgggcgccgggatcagggtcctggcggcgctcttggcggcgctcgcggcagccaccgccggcgtgacggcgcagctgcggcaggactactacgcggcggtgtgcccggacctggagagcatcgtgcgcgccgcggtgtccaagaaggtgcaggcgcagcccgtcgccgtgggcgccaccatccgcctcttcttccacgactgcttcgtcgagggctgcgacgcgtcggtgatcctggtgtccacggggaacaacacggcggagaaggaccacccgagcaacctctccctggccggcgacggcttcgacaccgtcatccaggccaaggcggccgtggacgccgtgccggcgtgcgccaaccaggtgtcgtgcgccgacatcctggcgctggccacccgggacgtcattgagctggctggcgggccgtcgtacgcggtggagctggggaggctggacgggctggtgtccatgtccaccaacgtcgacggcaagctgccgccgccgtccttcaacctggaccagctcacgagcattttcgccctcaacaacctgtcgcaggccgacatgattgctttatctgcggcgcacacggtggggttcgcgcactgcagcacgttctcggaccggatccagccgcagtcggtggacccgacgatgaacgcgacgtacgcggaggacctgcaggcggcgtgcccggcgggggtggaccccaacatcgcgctgcagctggaccccgtgacgccgcaggccttcgacaaccagtacttcgccaacctggtggacggccgggggctgttcgcctccgaccaggtgctcttctccgacgcgcggtcgcagcccaccgtggtggcgtgggcgcagaacgccaccgccttcgagcaggccttcgtcgacgccatcaccaggctcggccgcgtcggcgtcaagaccgacccgtcgctgggggacgtccgccgcgactgcgccttcctcaactgaaaaggatggacatggagagctggtttatatctcacacaagtgttcatacacaatctagagtaaagtttttttgttgttgttattattatcatgtcaggtatgagcacaaggttgaattaatggttaatgcgattgatatactgt

SEQ ID NO: 13480 - DNA, 1771 bp, Zea mays
  Clone ID: JC-ZMSHLIB3587P016C03_FLI
aaaatcttgacccactatggcctgattccagttggagatacttgaaggtgcgttgggatgagccttctactatcccgcggccagatagggtctctccttggaagatagagcctgcttcatcgcctcctgttaatccactcgtgcattcttctagagcaaaaagacctagacaaaacgttcctccaccttcacttgaatcatctgttctcacaaaagaaggtgcaaccaaggtcgaaatcgattcagctcaaacacaacaccaaaattcggtcttgcaaggtcaggagcagatgaccttgaggaacaacctgactgaaagcgctgattctgattccactgttcagaagccgatgatgtggtccccatcactcaatgggaaagcccacactcattttcagcagagacctgctatggataattggatgccattgggaaggcgtgaaaatgacttcaaggacacccgttctgccttcaaggatgcccgcaccgcctctcaatcatttggagatacacagggtttttttgtgcaagcttatgatgacaatcatcaccgtctctctttcaaaaatcagggttcaactcatcgcttcgcagatccgtacttctatatgcctcaacaatcgtcagtgacggttgaatcaagcacaaggacacaaacagcaaacaatgacttgtgtttctggggtgaccagaatgctatgtacggcaatccaagtgaccaacaacagggtttcaactttggacaaaacccatcaagttggttgaaccagccatttccccaggttgaacagccacgagtggtcaggcctcatgcaacggttgctccatttgatctggagaagactagagaaggaagtggcttcaagatttttgggttccaagttgatacaaccagtccatctcctgtccaattgagctctccattgcccgctatccaggagcatgtgttacaaactcgaccatcggcaccggtgaatgaattgcaacctgtgcaaattgagtgcttgcctgagggatctgtaagcacagctggaactgcaacggagaacattcagcaagccccgcagagttcaaaagatatccaaagcaagtcccagggtgcttcaacaaggagctgtacaaaggttcataagcaaggagtcgcacttggcaggtcggtggacctctctaaattcaccgactacggcgaactccaagcagagctggacaagatgtttgacttcgagggtgaattggtatctggcagccaaaactggcagatcgtctataccgacgacgagggcgatatgatgcttgtgggagacgacccgtgggaagagttctgcagcatagtgcgcaagatctacatctacacgaaggaggaggtccagaagatgaactcgaaatcagctgcgccaaggaaggaggaatctccggcagcgggcggcggaggaggttgcgccgccgccacaaacgagtagtatggtggtttgctcttggtggcaagttgaggccaaggttttactactgctattgttattgctgatttgctctccccgccttccggtgtaaatatctgtgtgtacccagtcccggccttgtgctagtaagtagcaagcagtgttaccttttggtattttaaccagcagctaagttcgcggcattttagtccctgtaagcggtaagcagctctgtagcgtgagatagatggccaagcgccggtacgtacgtgtagtgtctggtcttctcactgagtgtactataaagagttaatataggagctgaccctgtg

SEQ ID NO: 13481 - DNA, 1022 bp, Zea mays
  Clone ID: JC-ZMSHLIB3587P019G01_FLI
cccacctcccgccccggcgcccctctctctctctctcttctgccgcacagagcccaaatcgcggcggatccctcgctctccagggagccgctgcggcgccgggttttgtacaccgacttgtttgcctacctccagctcctcctcggcgacccatggctctcctcgcccccgccatctccggcgaggttggtctgcggctcttattggcaccgctaagctctaacatagtcatgcgtacagccagttgtgctgttgggattggtctacctgtatactccactttcagagctatagagaagaaggatgaacaagagaaagagcggatgcttttgtattgggcagcatatggatcttttagcattgctgaagtgtttgcagataagcttctttcaagtgttcctctctattatcatgtgaagtttgctatccttgtgtggctccagttcccttcaaacagtggatcaaagcatgtatacaaaagatacctgcgcccatttttcctgaaacatcaagcaaaaattgataggtttctgaatattctgtcaaaggaacttacgaagtttgtgagcagccatgaagatgaaattcgttttatagaaaatatggctatcagaggggctacaacagcaaaccacatcgtaaatggcctcgaccaacctgaagaaacacaagcggttaatacaattgaaggtccaaatacaactgtgacagaagaagctggtgtgtcgggaactgaaacttaagcaaaactttctatctctgctcatgatcccagacgctgcttcaaaattgttgttgaggtcacccagcttgtttggattgtgaatactactgttcctgaaaggctagatctagaggcaatgttttagctttaactagatattcatatagcaagtaaaatcggtgttggacaaatttattacagtgtaaaaatgacccggtgtggaatgcagttcccagcaatgttgtcatttttcacgtgggaataatttgaagtctgcgatgaagaatctttctaaagc

SEQ ID NO: 13482 - DNA, 1153 bp, Zea mays
  Clone ID: JC-ZMSHLIB3587P020B05_FLI
cgatcccgtggactcccgattgcctcctcagcaacttccatacccccagcgcggcggtgccggagcgagcagagcagccggagggcctgtcggatccgccgccgtcaagatgaatgacgccgatgtatccaagcagatccagcagatggtgcggttcatccgccaggaggccgacgagaaggccaacgagatctccgtctccgccgaggaggaattcaacattgagaagttgcagcttgttgaagctgagaaaaagaagatcaggcaagagtatgaacgcaaagagaagcaggttgaagtacgcaagaaaattgagtactctatgcagttgaatgcttctcgcatcaaagttcttcaagctcaggatgatctagttaacaaaatgaaagacgatgccatgaaggaacttctccttgtcagccacaaccaccatgaatacaagaaccttttgaaagacctaatcattcagggtttgctccgtttgaaagagccagcagtattgctccgttgccgcaaggatgatcaccatcatgtggaatcagtgctgcattcagcaaagcatgagtatgcatcaaaagcagatgtccatgaaccagagatatttgttgatcatgatgtatacctgccacctgccccaagccatcatgatgctcatggccagttttgctctggaggtattgtattggcttctcgagatggaaagattgtgtttgagagtacacttgacgcaagactagaagttgttttccgcaagaaattgccagagatccggaagcttctttttggccagactgcagcctaatcgactcatctgccgatggtacggctgcttctatgtaatggttgccggctgcacgcctgcactgcagccataaggaactccgcctgtttttgtcaaattgattgtttaaggtattcatcccctatgtacaaactacctattggttcattattgtcgccgagagcaccgactgtttgtactctgtttgctccgaggaataagaataaagcaccgccagactttccatcgcgaagctgaataaacgttgtaaatgcatttgttgcgctgaacattccgtttatggtttctccatgtgtatatttagttaatgtcggatgtggttcttatggaaaatagtttgtttgggctgtc

SEQ ID NO: 13483 - DNA, 1050 bp, Zea mays
  Clone ID: JC-ZMSHLIB3587P020D10_FLI
cgacgccagccgcggcaaccgccacacggacggccatctcaaccgccacactagctacaagcgagctttccaaatcccgcggacgggacaccaatggggctgtgcatgtcgcgcggcgagaccacgccgacgcgggcggccccgccgcccagcaaggacacggcgctggtgctgatgccgagcggcgagatgcgggagtacccgccgcacacggccacggccgcgcgggtgctgcaggacgcctccgcctccgcctccgcagactggttcctgtgcgacgcggacagggtggggttcgagggccccgtcccggcgctgggcggcgcggaggcgctgcgcgcggggcagatctacttcgtgctcccggccgccgcgcgccgccgcggcctgcggcgcgaggacgtcgcggcgctcgccgtccgggcctccgccgcgctctccgctcgccactcctgcgcgcgcggcaagcggagcaggcgctgcggcgccgtcgcgcccctcgtcttcgcgccgccgcctccgccggaggcggaggaggagcacgggcggtgggagacattcgtcgcggcgcgcaaggctcctccggtgcgccggccctcgcgctccggcaggcggctccagcggttcgcgtccgacctcacggcgatccccgagtgcgagatggcgagcgagtagcgagggctcagactggcggggatgatggaacagtcacttggccgtgtgtttgttggcaagacttggactcttctggaagcagaggacgctagcaggaagtcgggaacgcaggaaggaagaactccacgagacacatcttcaacatctccacgctggccatgttcagcggcaaaaccaacgaaggaaacgcgacaccaatccgcaccatgtttgtaacacgcacgcatttatttttgttataaaatattgtatttgtgatcaatccaaggggtgcgacagattattcccaagggacacccccttgagaacgcaacccttcacctgtatataaacagagttctccctgcaataaagaacacaactgtcatttgcact

SEQ ID NO: 13484 - DNA, 1396 bp, Zea mays
  Clone ID: JC-ZMSHLIB3587P021F10_FLI
cgtcgccgtctgcccacacccgcaccgcacccaaccgcagcggagccgggagccgaaggccgagggtattcttccttcgccgctaagcacgcctcctctccacaggcagccgacccaggggaagcgtcgccgtctgcccccaccccgaatctgatgcttcatcgattggttctaatcctcactacctccatattcatgcacgagattgcgcgtgattaggagcagggaccaatcatattgaactcagatttggagcggagcaggagggggagtcattgccggtgttctgattgctgctggaggtcgagggatggtaggggtgctgtcgaatcgcgtggatcgggacgacctcaaggccggggatcacatctacacttggcgggccgcctacatctacgcccaccacggaatatatgctggagatggcatggttatccattttacaagggcagctggacatgagattggaacaggaacattcttggactggttcctttatagctcctctccggcagcaactgagggtcctccctgccagaaatgtgggcacctagtcaagtccgatggggtcatcacctcttgcctcgattgcttcttagatgggggcagcctgtacctctttgactacgctgtgtcgcctgctttcttcctcgccaaagcacggggaggaacgtgcaccctggctgcctctgaccccagtgacgttgtgatccaccgtgcacggtacctcctggacaatgggtttggcatgtactccctgttcaagaacaactgcgaggacttcgccatatactgcaagactgggctgcttgtggagaccgctttcagtgttggccgtagcgggcaacttgcgtctctgactgctgccttcagcgccgtggcctcgtcccccttgcgtttcctgacaaccagtgctggtggcctggcaattgtgaccagcggcatgtactgtgtcgggcggtatgtgtcggatattggtgtccggcgtgatgttgtcaaggtccctgtcgaaaggcttgtggagcagaatgttacttggattcctcagtgtgtggctacagagacagatatcgcggcaggagcaccgcagcagcagttggaggttccttgtgcggttgccgaggaagcatccgttatacagcccgcggcaccgtgatccattgctgaaatgtcatcatgtaccaggtgttggcatgagacaggacaactggaactacgtacttgtgtggaagtacatgtaatgatgtatctggtggtgttatgcaatccattgctgctgctgctaatgttgcaagcaatgatgatgatgatggatgtggttccatgaccgctattattacagaattgagaagacctgtatttgcccttgatgattaatgatttctgttatacagtt

SEQ ID NO: 13485 - DNA, 2247 bp, Zea mays
  Clone ID: JC-ZMSHLIB3587P023D07_FLI
gccaacttgtcataaaagatatagagaaaggagacgagcaagttaaggcggatgctcttcggattgggcagtataaagatggggcaattcctatggatagcagggaactggctaaacgtttgttttatactgtttacatgggaactgaaaatagttctgaagatacccgatcacgtgccaaaaggctagctgaggagattggttcattccacttgaatgtacccattgatagtatagtatctgcttttctttccttgtttgaaacattgactgggaagcgaccacgctacaaggtatttcttcaacatgacatcactttactagattactgcaatgcagcgaacataaaaaaactagaccaaccaaggaggaactaggtggcatttcattaagaagaaaatagtcacccaaatttggacttgaacagctttctgtgcaagaacaatagatttgaatttatgtttattcaccttttcatagtattttagtttgtggccaacaaagattgttgaactggaaatttttcttaataccccttaacagtatgccatgcatttttttgctataattatgaaatgtggcctcgggactgggtagttaggcaggcacttaggcttaggtggtgttgccgtgttggtcactctcagccttttctcttatgggttatgttctcttgtctcactggcattttgggcttctgcgaggaaatactaaccctgacctcaagatacaaggagtcaatgaaaaagggtatcatgaatataagttaccacccctacatctaagaccatccatataaagttaccagtcctagatctatatgcttttaaatatttccagattagtatcataagtacaaagggtttcgatgatattgttgtggccaaaagttctcattagcaatggtaatagattaaaatattggtggtagccagccatttgtcatctggctagccttcagcagtaaacattatcagaccaatggtacatatgagttttttttcttgaacaatgcaggagagctgcatgtaatttcattaagaatatgatttttaatttacggaggaagtccattttactactcgaaaacatttcttgtttgcttcaggttgatggggggtcaaatactgagaatctgggattgcaaaatattcaagcccgaatcaggatggtgttagcctttatgatggcttctctaatgccatgggtccacaacaaatctgggttttatcttgttcttggaagctcgaacgtcgatgaagggttacgtggttatttgacaaagtatgactgcagttcagctgatgtaaaccccattggaagtgtaagtaagcaagatctgagagcttttttacgatgggcagcaattcatcttaagtattcttccttggccgaggttgaagctgcaccacctactgccgagcttgagccaatacgagcaaattacaatcagttggatgaaatagacatgggaatgacatatgaggagctgtctatatatggaaggttaaggaaaattttccgatgtggtcctgtttcaatgtttcagaacctgtgccacagttggtgtggaagattatctccgtctgaagtggctgacaaagtaaagcacttcttcaagtactacgccataaaccggcacaagatgactgttttgaccccatcttatcatgctgagagctattcaccagaagataataggttcgaccttcgccagtttctttacaactcaaggtggccctaccagtttcggaagatcaatgagcttgtgcaagagatggacaaagatggcaaatgggaaacttctgcagaagagaagctgggagcgcagacaggtgcacagggaactggaatgggagtggtggcagcggggtctgccaatcccagtgccggcttctgaagagaaccatactaacgcgtggaagctagttcctccagaataatgcaccagctcccaggacacgggcagctaatgttaatttgtctgcttggttcccttgtacatcacttctccctgctagagagctggaatccctacaaaattttaggctaccagttctctttcttccattttgcattatgcatagtacgatctacaaagtagcaaccaaagaacatgtgaaaaataagatggaatccctttaatcagattgtttgtccgaagtggcatggcgatgaaaaggaaaacatcagtataaagaactagttactcataattctttgttctgtaaagagtcctttctaaat

SEQ ID NO: 13486 - DNA, 813 bp, Zea mays
  Clone ID: jC-zmshLIB3587P024f01_FLI
ctatagctagccagccatcctactgtcacacacacacacacacacagacaagtggtttccaaagccaagtgtgtgtactagcaaccagctagctcgggcggcagcaggcagccatcatgtcggaggagaagcaccaccacttcttcaaccaccacaagaaggacgaggagcagcccgccggcgagtacgggtactccgagaccgaggtggtcaccgccaccggcgagggcgagtacgagaggtacaagaaggaggagaaggagcacaagcacaagcagcacctcggcgaggccggcgccatcgccgccggcgccttcgcactctacgagaagcacgaggcgaagaaggaccccgagcacgcgcacaggcacaagatcacggaggaggtcgctgccgcggcggccgtcggcgccggcggctacgtattccacgagcaccacgagaagaagaaggaccacaaggacgccgaggaggccagcggcgagaagaagcaccaccacctcttcggctgaccgtagtaccggccggcgcgcgaccgagctagctagctccggcgcacacaaccacacacctgtttaattctgtactgcatgcgtgtgtaatttgatggttcacaataatgagtccctctccggaccttggtagctgcttgcttgtggtgagtgagagtgtgagactgagggagaagaggtggtgggcgtggggctacgtcgagagaggcgtgttcctgtaatcctgtactcgcttcgttttctctgcatgcgtctataattgtgttcaataataagtgagagcggtgtgatgtgtggctcc

SEQ ID NO: 13487 - DNA, 1227 bp, Zea mays
  Clone ID: JC-ZMSHLIB3587P024H06_FLI
gcgcgcgcagccctcgtccggccgcccgggtccgagcgcgctcgctcctcctccccacgtcggacagtttaagtgtggcttcattgcatgagtagttgcagttagcgtggcttttctccgtgcttgctcctggtcgtgctttgccttgcaaaggaaggaatcatgacatctgttgttcacagtgtttcaggtgaccacagggctgaggatcaaaatcaacagaagaagcaagctgaacctggggaccagcaagaagccccagttactagttcagatagccaaccaacagtaggcacaccatcaacagattatgtggcaccctatgcccctcatgacatgagccatgcaatgggtcaatacgcttatccaaatattgacccatactatggaagcctttatgcagcagcttacggtggacagccattgatgcatccaccgttagttggaatgcatccggctggcttacctttgcctaccgatgcaattgaagagcctgtgtatgtaaatgcaaagcaatacaatgccatattaagacggcgtcaatctcgggctaaagctgaatcagaacgaaagcttatcaaggggcgtaagccctatctccatgagtcacgtcatcagcatgccttgaaaagggccaggggagctggaggtcggtttctcaactcaaagtcagatgacaaggaagagaactccgactcgagtcacaaagagaatcagaacggagttgcgccccacaggagcggccaaccgtcaacccctccgtctcccaacggtgcatcgtcagctaatcagggcaggcagtcgtgaatgatggatgattcaaaactcacagctgaagagatttcagcccctgagctagatatggcagcagttttgtacagaaaacgctagcaacatggtgtcggtcggtcggtcggttgttgtaggacatgttccatagaaaaagcatagacgagtctacaggttttggagccttggtttggtcctctgtgtattcacctttctgtacaatcttagtagcgttgtgtaccttcccctggaaggaaggatagcttcagttagcgcttcagaaagtcaagtgtgtagcatattggcttattgtttgctttgcttggacaatggagatttgggagtggagttcataaccctgctgaataaatactcttagctggctatgtgtatgttggacgacaatatgatccctaatgtagtacacgtgaccacctc

SEQ ID NO: 13488 - DNA, 1194 bp, Zea mays
  Clone ID: JC-ZMSHLIB3587P025A12_FLI
gcctccatggctgccgcttcgcagctcctctctctgttcttcctcctcctcctccctgcttgtgatgccatctactgcgacgaagacgactgctacgacctcctaggggttaagcaggacgcgaacgcgtcagacatcaagaaagcgtactacaagctctctctcaaacaccacccggacaagaatcccgatccggagtcgcggaagctcttcgtcaagatcgccaatgcttacgagattctgaaggatgaatccactagggcgcagtatgactttgccattgaacatccggaggagtttggattataggagattttaaaagctagcttatagaatcagcttggaccccaaacacacaaagcttctggttttctataacacagctcagtactatagggcatactatggacataaaacggatcctcgtgcagtgttgattggtcttcttctaattgtttcagcatttcaatacattaatcagctaacgaggtataaccaggccatgaaaagtgtcaagcaaactcctgcttacaaaaataggttaaaagctttggagtatgagcgaacaggaggaattgctagcaaaaagaagggcatcaagcaggtggataagaaagttgaagaagagctaagtaatgaagttgaattgcaaattcatggggttgaaaaaccgtctgtttggaggctgtttggtgtccaatttatactttggccttactctgttggcaaggcgcttacttggaagatttgttggttttggagataccgggtaaagaaattaccatatacatgggaggatgcttgctacttgacctggatttcactccaaatacctgcgaatgcatggaaaaatatggatgagtccaggaaggaggaccttgtgagaagacacctctgggaaaagagcaacatggagaggtatacttcagggacgaggaaggaaccaaagcgtaggaggtagctgtgcaacatttttgacctgagactacagcaactttaaacaatacaacatactcctatattggagtgaaaagttattgaccaggcttgagttcaccgatagctaattgctaggatccccgggaagtggcatggctaaggaatcatgtttggaggacaattcatgtaataaagtgatcaaggcgacttttgtaggtgtttcttaatcttaatttctgagtagctaataactgt

SEQ ID NO: 13489 - DNA, 1284 bp, Zea mays
  Clone ID: JC-ZMSHLIB3587P025D03_FLI
gcggcaggatttgaaaaatctcgcgagagggccttgtccttgtccacttcctccgcttcgccgtccctcaaagcagcggaaggggagaggccagggtgcagcagcaggaccccaacggcaacctccgccacgcaccacggagcaaccaagcagcaggtaaggcaaggcaaggtaagtgacgagacaaagatggtgcaggaggagctgccgcaggcatggtggttcgacagccacaacctcgcgaggccgtcgccatggctgaacagcacgctctcagagctggatgacaagaccaagcaaatgctgaagctgatcgaccaagacgcggactcgttcgcccagcgcgccgaaatgtactacaagaagcggccggtgctggtggacatgctcggcgacctgtaccgcacgcaccgctcgctggcggagcagtacgacctgctgaagcacggcagcggcacacggcacacggtgttcggcctgtcttcctgcacacagagccggtcgtcgacgaacggcaggaccactcctcgctcctcctgctcggcctctacgtacgactcggagtccgaagtggacgaccccgggcaggaagaatacgaggcagagcagctggcgcgtgcggggatggccaagacggagtcgccgccgccgccgccggagcagcagcagcaagaacagcgtgagcaggcggagcagcagatgcgcgcggagatcgagaggctcaaggcgcagaacgcggcgctgcagaaggcggccgaggagagcgcggcggcgctcagggcggagctggccgggaaggacgaggagaagcgggaggtgatcaggcagctggcgtcgtccatggacgtgatgaggcaggagaacctcacgctgcgcgagcacatcagcaggggatcgtcgaagcgttcctctgcgccccgcgcgggagctgcgttcgatctcaggaaggtggccaggggcctcttctccgcgaggctgttcaccgcgcactgcaggcctacgggccccatcgtcgcgctctgagcaggatgccaggatcgtgaagagagacagcgtagatatgcatttgttgtaggcgagtgatgtgcatattataggatggcatcgatcgatattccctccgctgtctgtttctcaggttcaactaaactagagggagcactcgttttttactatgatggcgtagtagtagtagttaactgtagttaaatatttactagtcatatggatgcatgtttgtatgatggcgttaattattgttaagtattattttgtcagttcctc

SEQ ID NO: 13490 - DNA, 1492 bp, Zea mays
  Clone ID: JC-ZMSHLIB3587P027B09_FLI
ggcgcggaggaatctgcttacttcggcggagcaggagcagcagcagcagccccggcaatggactggtccttcgctagcaagcccggcgccgccccggcgttgatgtcgttccggtcagcttcgttcccccagttctcctccttcgacggcgccaagaacccggcccctcgtatcctcacgcaccagaggtcgttcggccccgacagcacgcactacgccgccgcgcaccgcacgcagcatgcgctgaacggggctagagtcactccggtctcgtcgccgttcaaccagaacagtccgatgttcagggtccagagctcgcctagccttccgaacggtactgcgttcaagcagccgccttttgccatcaacaacaacgctgcggccagttctactgttggtttctatggaacaagggatgtggtgaggccaaagacagcacaattgacgatcttctatgctggttctgtcaacgtattcgacaacgtctcagctgagaaggctcaggagctcatgctcttagccagcagagggtctcttccaagctcagcccccgtggcccgtaagccagaagctcctattctcgctccagcaaaagtcacagcgcctgaggttttgcatgcaacacagatgctgtttcaaaaaccacaacacgtttctccaccttcgtctgccatctccaaaccaatccctggcatcttgcaagctgcaagtctccccaggagcgcctcgagctctaaccttgactccccatttccaaaatcttcagtgccatttcctgtttctcctgtaagtcaggctccgagagctcagcctgcaaccattgccgctacaactgcagcagcaataatgcctagagctgtccctcaagctagaaaggcgtcccttgctcgattcttggagaaaagaaaggaaagggtgacaactgctgcaccttacccatcagccaagagcccgatggagagcagtgacacgtttggcagtgggagcgccaacgacaagtcatcatgcacagacattgccctctcaagcaaccacgaagagtccctatgtttagggcagcccaggaacatcagcttcatccaagagtcccccagtacaaaactacagatctgatctgaatatctgatcatgcccaatgttcatagatttgtccaggctgactgatgcaaggaccatacaatacttttgcattcaggcaaggactcgagaggaagagattacgtatgttatcggtgccgctagctgttgtttatgatgatgttttgttgtgctagtttactgtgatgctggtggtgcccccacctaactaacaagagagctgtcacttgcagactcttgaattttttttgtcctagcgccatttctttagcggtatcaagtcaatttatataggcttacaaattctgcgccttttgtatggccaaagtgtaatattcttgttcttgtattatgaacctccatgctgcagaatgcaagagcaaatcttattgtc

SEQ ID NO: 13491 - DNA, 1807 bp, Zea mays
  Clone ID: JC-ZMSHLIB3587P027G09_FLI
tggccacagcggcggcagctcggcacgtggtcgcagtgccgtaccccggccgaggtcacgtcaaccccatgctcgtcgtgtgccgcctgctcgccgccgcggacgctgccttgagcgtgaccgtcgtcgtcacagaggagtggcacgcgctgctggccgcagcgggggtgcccggcacgctccccgaccgcgtccgcctcgccaccatccccaacgtcatcccctccgagagggtccgcggcgccgacttcgcaggcttcgtcgaggccgtgcatatcaagatggtggcgcccgtcgagcggctgctggaccggctgtccctggagcggaagccggacgccatcgtggccgacacattcctggcttggggcgttggggttggatctgcgcgggggataccggtgtgctcgctgtggacgcaaccggccacgttcttcttggcgctctggcacctggaccgttggccgccggtggatggtcatcaaggggaagaaggcctaagctgcaggtccctggatcaatatctcccgttcccagccctcgcgccggtaaaatgttctgatatgaagaccctccgctccatggtgctgccaatgaaacggctagcgcaggtgttctccaacctgcgcaaggcacagtgtgtcctcttcacctccttctacgagctcgaaaccggcgccatcgatggaacatcgcaagtggttccatgccctatatatgcagttggcccttcaattccatatatgccactggaaggtgattcgggcgagtttcaccatgaagaagactacttcggttggctggatgcccagccaagaagctcggtactgtacgtctcatttggcacccatgtctcgatgccttcgtctcagctggaagaggtcgccctggggttgcatgaaagcacggttaggttcttctgggtggcccgggacagagctagcaccgccacccttgagcagatctctgctggtggcaagggcttggtggtgccgtggtgtgaccaactgaaggtcctgtgccacccctccgtcggtggcttcctgagccattgtgggtggaactcgaccctggaggccgtgttcgctggagtgccgatgcttgcctttcccgttgcttgggatcagctggtgattggccatctcgtggctgatgagtggaagatcggcgtcgacttgagggaacggagaagggaggatggtgttgtcggaagggccgcgatctgcgatactgtaacgaagcttatggatttgactgacgatgatagcctagagatgagaagaagggctgcggagctgagagaggcttcacgccgcgcagttcaggaaggtggatcttctcggtgttctttgaacagtttcgttagagatgtcatcgaaggaagactgaatgttgcagaaacttcacggtaggtttttgcttgaatttgtagtttcagggggacagaactgttgctcgtaggcagaaacgttgtgctcctgcaagtaaagtgcaggagtatagctgcacattttctgaagctgaaaacagaagacttgatgctgtctgtagcaaagatgggggacagcgatagtgatggcacaaaaaattctgtgctcctggacttgtgtaggttatgcacgtgatgagcaagcgtgtatatagccataaaaaatattgttttacatcgtatattatttatatagtaaagtttggataagaagtgtgatggggaaggataagaaagacttctagagcagcctaaaaatattaatatcgtggaataatcaagagctttgtatcgtaacagagtttatatgtacttctt

SEQ ID NO: 13492 - DNA, 763 bp, Zea mays
  Clone ID: JC-ZMSHLIB3587P027H06_FLI
cccgagatttggtgcttaacaacattcggaagatgcgacctgacattttcatccagattgtcaatagtggcacatatggtgctccattcttcctcacacggttccgggaggcactgttctactactcagcactatttgacatgctggatgcaaccattccccgggataatgatgaacggctgctgatcgagcgggatattgttgggcgatctgccctgaatgttattgcttgtgagggtgcagacaggttggatcgccctgagacttataagcaatggcaggtgcggaaccaccgggctgggctcaagcagctaccgttgaatccagaggttgtaaagcttgccagggataaggtcaagaaatattaccacaaagactttctcatcgatgaggatcgccaatggttgttgcagggatggaaagggcgggtcctctttgccatgtcaacttgggttgctgaggataataactccaccttttagctgcttcactttgtcttgttttggattatgagtgatattgatgtttgatggatggtctgtgtctttattttaccaccaaactacgacccagcatctgtggcccgctggacttctgtttctagagggttttagtgctgaaactttgtaagctagtagaaaaataagtagatgcttagaggtacataggatgctgatatatttctggatatgttgcagaattgtgatgtgtacatcatctgtaactgataaaagcaattttattgattacttaatcgaccttt

SEQ ID NO: 13493 - DNA, 802 bp, Zea mays
  Clone ID: JC-ZMSHLIB3587P031A05_FLI
ccgatgtaatgtcggttgtatctcgttatatgtcaatggtcataatgaggttgaagagaggcataatcatgactggatgctgcggagaacaaacttctctgggggctatgtttgtgtgaaatttgagattaggattagaaaatccaaggactatcttttgagttcaaacggtcagataagtcatgggtccaaaccaaacaattctgagatggggcttagcttcaatatgtgcaagaagattgtgcagatgatgaacggcaacatttggtcagtatcagattctaaaagcgttggagaaaccatcatgctggtcctccagttccagctgcagcctctgactgcggtctcctccgcggcgtcttcagacttgagccgatcgtccgcaatccccaacttcaacgggctcagagtcctcctggcggacagcgacgacaccaacagagcagtaacacacaggctcctggagaagctcggctgccgggtcctttcggtcgcctccggtgtccaatgcacgagctccttcgccgccgagccgtccttccagctggtggttctggacctcgccttgcagaggacggacgggctcgaagtggcccgcgcgatcaggaagttcagtagcaatagctggctgccgctgatcgtcgccctagctgcgaggatcgatgacaaggtccgagacggatgccagaggtcggggataagcggcctgatccagaaaccggccacgttagctgcgctgggagatgagctgtatagggtccttcagaacagttgaaagtgccgcctgatggttctcattgct

SEQ ID NO: 13494 - DNA, 816 bp, Zea mays
  Clone ID: JC-ZMSHLIB3587P031G09_FLI
gtgccgcgcatttcaacgggtctcgcatggggtgcaacggaataagaatggcgtcgccgtcagcgtcaggagagaagaagactacgatcctggtggcgaggaagggccggctgcggcagcgctacgacggcgagtaccgcctggtggccgggtgcgtgccgtaccgcgtggacgcggacggccagacgcagctgctcatggtgtccacgcccaacagggacgacctcgtcttccccaagggcgggtgggaggacgacgaggacgtgcacgaggcggcgtgccgcgaggcgctggaggaggccggcgtcaggggcgccatcaaccgaagtgcgctcgggatgtgggtgttcaggagcaagagcagcccggtgagcagcgacagcccccggggcgcctgcaagggctacatcttcgcgctggaggtggcggaggagctggagcagtggccggagcaggacacccacggcaggcagtgggtctccccggcggacgcgtaccgcctctgccgctacgactggatgcgcgaggcgctgtcggcactgctcgaccgcctcacggaggagcccgagccccccaagtcccccgccgcggagggcctcggcgatcacgcaggcgtgtgcatgatggtcaaggcgaccacagccgctgcggatcgagcggtggcgctctgctagtggcatcattctgaatatgtgcaaatcctcatcatctgggtcgtctggcacggcagttcgttcgaacttggtgtgatgcagtgtatggaaacttgtctcgtcaatccagggcttataaatgatgtcggttacgccacgtttt

SEQ ID NO: 13495 - DNA, 1500 bp, Zea mays
  Clone ID: JC-ZMSHLIB3587P033F12_FLI
cctaatagtcgtcgatcgttccatcgaccggccggccggccagcctagctcttggctcttgctccgatcggatcgagcgccggacaaggcaaggcagccgtacacgtacgacgatggcgcagggcagccgcagcgctaccgtgcccgccgcagcgtccttcttcgcccttgtcgccgtggccccgctgctcctgtgctgcgcgccggccgccgcggagctggcccggctggagcacccggccaaggacggcggctcgctcagcctgctcgtcgtcggcgactggggccgaaagggcacgttcaaccagtccagggtcgcccatcagatgggcagggttggggagcagctcagcatcgacttcgtcatatccaccggcgacaacttctacgagaacggcctcacgggcacggatgacgaggcgttcgagcagtctttcaccgatatctacacggcgaagagcctgcagaagccgtggtacctggtgctgggaaaccatgactacaggggtgacgcgctcgcgcagctgagcccggtcctgcggaagatcgacagccggttcatttgcatcaaatcattcgtcgtcaacgcagaaatcgtggagttcttcttcgttgacaccaccccgtttcaactcaagtactggactcaccctaaggacgatcactacgactggagaggggtggcgcctcgggaaaactacataaacaatctgctcaaggatttggacggggccatgaagacatcgactgcggcgtggaaggttgccgtgggccaccataccatgaggagtgtcagtgatcatggtgacaccaaggagctactgcagctactgcttccagtcctccaggccaacggcgtcgatttctacatcaacgggcatgaccactgcctggaacacatcagcagcagagacagcccaatccagtacttcacaagcggaggcggttccaaggcatggagaggagtgcagaaccccaccgaagatgacctcaagttcttctacgacgggcaaggcttcatgtccctccagctagaccgtagccaagccaagttcaccttttacgatgtcgacgggaaggcgctgtacagttacacacggtcgagcctgatggaaacaggccaccacctccaagcctccggctacatcaacgaggaatgaagcaggggcgagtcagcatgcagcgctggagaactgagatcgatatatgcagttcaagcgtacgtataaattctcgagtgcttgatgtggttcatctgtaggtcatgccatcgattcgaaaacatgacatggtaggggcagccataatgcagccaaaaaaaattagtgcaaatattcattatcgaggagttaaagcattgtgtggacagcggccgagcataggaccaaaatcagcagggggcaatcaacagattatgtaaaaattacatggttcagtggtgcaacaataaagacacagtatatatatggaaatatatcgaatgcaatcaagtgatgtgct

SEQ ID NO: 13496 - DNA, 2136 bp, Zea mays
  Clone ID: JC-ZMSHLIB3587P034E04_FLI
gcagtcgaaacaatactgtggcatatgcaagaaaatttggcaccacacagatggtggaaactgggtttgttgtgatgagtgccagatttgggttcacgttgaatgtgatctaacatgcaacaacgtcgaggatttggaaaatgcagattatttctgtccggattgcaaatcaaaaagtaaaacagttccagcaactgaaaatttgaatacttccacttcagaatgtgctagcacttctaagggaaaactgaccgcaatgatagctgtttgctgcaatggcgaggatgcactgtatgtacctgagaagcacatgatactatgtcaatgtaagtcttgcaaggaaaggatgatgagtctgaatgagtgggagaagcatactggctcaaggaaaaagaattggaagatgagtattagacaaaagagtacaggggaactactcattaatttgctggatgatattccttgtgggacatcgaagtattctaacccaggcattaagaaagaagagctgctacaattgcaagctaatccttacagtcctgtctgtgctaaatggacaactgaacgatgtgctgtttgtcgatgggttgaggattgggactacaataaaattataatttgcaacagatgccaaatagctgttcatcaagagtgctatggagcatgtgctgtacaagatcttacaacatggctttgtcgagcatgtgaatccccccaacagaaaagagaatgttgtctatgccctgtcaaagggggcgctctcaagccaacagacattgatggactgtgggttcatgttacatgtgcctggtttcagcctaaagtatcatttccggttgatgagacgatggagccagctatgggaataatgagcatccctgtagaatactttaagaagacttgcgtcatatgcaagcaaatgcatggtgcctgcacacaatgctacaaatgctctacctattaccacgcaatatgtgcgtcaagagctggatattgcatggagttgcaatgctctgaaagaagtggcaggcacattacaaaaatggtttcatactgtgattttcatagtactcctgacccagacaatgtgttgatagtgaagacaccggaaggtgttttctctaccaaattttttctccaaaatggtgagaaacagacagctgcaagactcgtcaggaaggaaaatcaccaggagaaagtgcttcctcctataatttctgactgtctagtcgcaaagtgcctgacctatgaaatgtcgaaatacaagaaacaaccaggagaggctattgcccaccggattatgggacctcgtcaccactctcaggattttattgatggtcttaatgcatgcatggatcgtaaggatgaccaatctttttcaacatttaaagagcgacttcggtatttacagaaaactgaaaatttgagggtctcgtgtggtcgatctggaattcatggatgggggctcttcgccgcaaggaatattcaggagggtcaaatggttattgagtaccgtggcgaacaagttagacggtgtgttgctgacttgagggaagcacagtaccatagagaaaaaaaggattgctatttgttcaagataagcgaagatgttgtcatcgatgctaccgacaaaggaaacatagcgcgcctaattaatcactcgtgtatgccaaactgctatgctaggatcatgaccgtcagcgatgacaggagcgagatcattctgattgccaagagagacgtctctgccggagaagagctgacgtacgactacttgtttgaccctgacgagtccgaagactgcagggttccatgcctgtgcaaggctcctaactgccgtgggtacatgaactagaagactaaccaacctcagaaatagggactaaagactaacgtgacctcagaaacagggaccaaaggctggccatttttcccggaattctaccgttagcttctcggtttatatttactggaaagtttattagttctcgtggctgcccaagttttgaaccattttgtttagatattgcgattgagggcagccacaccattgtatattctttcattgttgtaataagacaccagtataatcaagaatgctgactttgaaatggaaagaagaagaaactcaacttg

SEQ ID NO: 13497 - DNA, 1292 bp, Zea mays
  Clone ID: JC-ZMSHLIB3587P034F10_FLI
gtcgacggccgtggacatgagcgaggtgctggcggcgtacaccaacgacgtggtgagccggtcggtgctgggctcgacgcaccggaagaaaggccggaacacgctgttcagggagatgaccatgaccaacgtggacctcctggtggggttcaacctggagtactacatcccgcggtggccgctgacggacctgctcttcaggctcgtgtgctggaaggtcacgcgccacctcaagcgctgggacgccctgctggaggaggtgatccacgagcacgtggagatgaggaagctgtccggcgacaaggagaaggagtcggacgacttcatcgacatcttcctctccagatacgaggagtacggcttcaccatggataacgtcaagtccctcctcatggtaatcgattccatcgtcgtcctcctcattattattttgggctagaatccatgcatatatataggctgaggctctcaacgtaattaacttcctttccatgtggccggccggcttgacaaaacagaacgtgttcgaggcagccatcgagacctcatatctggtgctggagtccgccatggccgagctcatgaaccacaggcgcgtcatgaagaagctgcaagcggaggtacgggcgtacggagcggagaagaagctggacatgatcagggaggacgacctgagcagcctgccgtacctaaaggcgtccatgaaggaagcgctgcggctgcacccaccggggcccctgctgctgccgcactactccaccgccgactgccagatcgacgggtaccacatccccgccaacacgcgcgtcctcgtgaacggctgggccatcggcagagacccggcggtctgggagaagcccgaggagttcatgccggagaggttcatgcgggacggctgggacaagtccaacagctacagcggccaggacttcaggtacctgccgttcgggtctgggcgccggatctgccccggggccaacttcgcgctcgcgaccatggagatcatgctcgccaacctcatgtaccatttcgactgggaggtccccaatgagaaggaagacggtggcgggaaggtgagcatggacgagacgttcgggctgatgcttcgcaggaacgagccgctctaccttgttcctagggccgtctagctagctagttactgtgccgccgccgcctcctatccaagaatgcatgagtcttagacgtgtggcagtaataattgcgtggggtgtagtaaaataataagcacgtttgttgagttgtaatggattcacattatgtgcattcgagac

SEQ ID NO: 13498 - DNA, 715 bp, Zea mays
  Clone ID: JC-ZMSHLIB3587P034H03_FLI
ggttgctctagatccgttcatcctggtggttttgtgaggtcgaaagcggcgagcgaattagaagatgctggacaagctgtgggacgacgtggtggccgggcctcgcccggagacgggcctcgagaagctccgcaaggccaccaccgcccgcccgctcgtcatcaacaaagacgcggacggcggcagctacaagcgggcgcagtcgacgccgtcgaccccgacgacgccggtgacgccgtcgtcgtcgacgacgccgcgcggcgccggcaacgtgtggcgcagcgtcttccacccggggagcaacctggccaccaagggcatgggcgccaacctcttcgaccggccgcagcccaactcccccaccgtctacgactggctctacagcgacgagaccaggagcaaccaccgctagatcgggcgagatggatggacagtgaagaggccatgtttgctggtccttgtggttatctaaaacgcacgcatgctctattatagctagtcatcactatatatatacttgtgtttgtgtattgttgttcttgttctgctggtgtctccgccgtttaatttgacctatgttatggagtgagtgatatatgtgccgtcactcctagtatatagtagtgagtgactagttggtatgtgtagtactgtactatcttttctccatatgcatgttttgccagcgcgtaatgaatgtaatgtcagtactgct

SEQ ID NO: 13499 - DNA, 879 bp, Zea mays
  Clone ID: JC-ZMSHLIB3587P035D12_FLI
gcggcggcgcgggcggacaaggagcaggcggaggaggagctgtgccaagccacaatgggtatctcgcgtgactcgatgcacaagcgccgggccaccggtggaaagcagaaggcctggaggaagaagcgaaagtatgagcttggtcgccagccagccaacaccaagttgtcaagcaataagacagtgaggagggtccgtgttcgtggaggtaatgtgaaatggagggctcttcgccttgatactggtaactactcatggggaagtgaagctgttacccgcaagacccgtatcctcgacgtggtctacaatgcatcaaacaatgagcttgtgaggacacaaacccttgtgaagagtgccattgtgcaagttgatgctgccccattcaagcagtggtacctcactcactatggagttgacattggtaggaagaagaaaacccctgctgcaaagaaggataatgctgagggacaagaggttgaggcagcagctgaggaaacgaaaaagagcaaccatgtcacgaggaagcttgagaagcgcaaggagggacgtacccttgacccacacattgaggagcaatttggcagtggacggttgctggcatgcatttcttcccgccctggacagtgtggccgagctgatgggtacatccttgagggtaaagagcttgagttctacatgaagaagctacagaggaagaagggcaagagcgctgtagcttagagcattctcatggattgtcttgcaccgaaatgtgtgtcctgatgagtacactttttttggttaatcgtctcaagttcagagcgttatgccatgttttcagacctgattagtacactgttttctaaaagcgattgagctctagtccaatgtattgataat

SEQ ID NO: 13500 - DNA, 1905 bp, Zea mays
  Clone ID: JC-ZMSHLIB3587P036C07_FLI
ggggtagggccgccgccgccgccagcgccgccgtgcagatcgcggccggatctacggcgctggggcacgggggtccccggatcgacgacgcctcccccgcgggttcggatggctatgcgaaaagaaaaccctgtgcttaatgcttgtcaagcatccaatggccggatcacgcgagctcaagctgctgcaaatcgccgaagctttggagctttcccttctgttccattgcctgcaaaaaccgaacgaaaacagactgcacaagggaaggcaaaacgaggttcttcatatgacaacaccagtgcaagtgttgcactttcaggcccccagcctaaaaggcgcacagtactcagggatgtgaccaatttgagcaatgctaactctaacaaaagttttgctgctgcaccgaagcttcagacaaagccctctctaaggactggaagaaccgtgagcaaaagcaagccgtgcgcaaaaaagattcctaaaaaaccaccaccagctggtaatggaagtgcattgactaatgttttgaacattgctgaagaaacacaagcggagaagattttggcagagagagtggaacccgttctgttgcttgagaacagggggccactgtcattgcagaatgttgaaaggaacagggacagtgcttgtcatgaggtattctttgaggaaagaaacctcagggataaatgtgaaccttctgtgtcaaagaatggggactcttatgtgttagacattgtagatatcgacaaagataatggcaatcctcaaatgtgtgcttcctacgttgtggagatatactcaaacctaatggcttcagagcttatgagaagaccaagtccaaattacatggagggtttgcaacgggacatcacaaagggcatgagagaaatactcattgattggcttgtggaggtttctgaagaatacaagcttgttccagacacgctgtacctaactgtataccttattgaccggtttctttctcggaactacattgaaagacagagactacaacttgtgggaataacaagcatgcttgttgcctcgaaatatgaagagatatgtgctcctcgagtagaagagttctgtttcataaccgacaatacatacacaaaagcagaggtgctgaaaatggagagccagctgctgaatgacctgggatttaacctttctgttccaacaacaaaaacatttctcaggagattccttagagcggcacaagcatctcgtaaaactccttctatgactttaggatttctggccaattatctcgcggagttgactttgaccgaatatgagttcttgaaatttcttccgtcgttggtggcagcatcggccgtgtttcttgctagatggacgcttgaccaatccgatctcccatggaaccagactctagagcactacacgtcttacaaatgctctgacattcaattgtgtgtctgtgctctacgggaactccagcataacaccagtaactgccctcttaacgccatccgcgagaagtacaggcatcaaaagtttgaatgcgtagcgaacctaacttcaccggagttccctcggtcgttcttcagctgacacgccaatggcaccgattgatgagcaacgttagcagcagccgtagcgcaggttgcgttaacattattgtagcatccccttttaccccccaatgtctgatttggatgtgtgttgttatcgagctgctgtgtcccggcctggcctttttcgagtcgcaagtgagatgaagaaggacagagagatggctccttggcttttcttttgtttgtttgacgtaaaaggttcacccggttgtaaacaacactgtgtgtagggctctttgcttgggctgttgttaattaactgtaaggggagatggtccggctggcttgtatgacgacaaacgac

SEQ ID NO: 13501 - DNA, 898 bp, Zea mays
  Clone ID: JC-ZMSHLIB3587P036G10_FLI
cgctacccggcgcccccttgcccttggggccggctattttaccgcacccgttctcccctctctaccgcagatcagatcacactcgtagagagaaggaaaaatatccccaaaccctagctcccgatctcgatggcgaaccctcgcgtcttcttcgacatgaccgtcggcggcgccccggcgggccggatcgtgatggagctgtacgccaacgaggtgcccaagaccgcggagaacttccgcgcgctgtgcacgggcgagaagggcgtgggcaagtccgggaagccgctccactacaagggctccaccttccaccgcgtcatccccgagttcatgtgccagggcggcgacttcacccgcggcaacggcaccggcggcgagtccatctacggcgagaagttccccgacgagaagttcgtgcgcaagcacaccgcccccggtgtgctctccatggccaacgccgggcccaacaccaacggctcccagttcttcatctgcaccgtcgcgaccccttggctcgacggcaagcacgtcgtcttcggccaggtcgtcgagggcatggacgtcgtcaaggccatcgagaaggtgggcacccgcaacggctccacctccaaggtggtcaaggtcgctgactgcggacagctctcctagatctctctgatctggtctgttcggccgccctccctccgtcatcgtcgactccccctgcgtccgttcctttggatctgaataagatggtggtgatctgagtggtggtcttagtttatcatgtatcgctcgcagtttaatttagcggtttaggtgtggatctgtgaaccccatggcgcctctgcttgattcgtgtttcacctgttatgttctgagattcatgataatgctatgagaactgaaattcccgttt

SEQ ID NO: 13502 - DNA, 1831 bp, Zea mays
  Clone ID: JC-ZMSHLIB3587P037C01_FLI
ctttcttcccgccggattgacgaaatcgatcgctccgctcccaccggccaccaccagtccaccacacctcgatccccgcaccgcccagccggccgcccgcatccaccgcacaaaaccctaggcatggccccaccctaaaccccttgctccccacctcgtatggtcgtcgtccccttctccctccgcattgcgcgaaaccccatccgcctccgccttcttccggtctccgctgctcgcttcacccgtctcgccatgtcgaccacgccgccggcggcggctaccatatccgtcgagtatgccaagtccgggcgctcaatctgcaaggggtgcagcggggtcatcgcctccggggcgctccgcctcggcgcctctgcgcgcgacccccgtggcttcggcgccaccaagtggtaccacgtctcctgcttaccctcctcgtcgtacccgctcggccccatcgggagtatcaaggggttcgactccattaaggaccatgatcgtgcggaattgcgagaactagagaagaatcataaaagagacaatactgcagtcagccctccggaggaacaacgtccaaagaaagcaaggattcagatgttttcccctgcggagggggtgccagataatgtaacagtctctgttgagtatgcgaagtctggtcgctctacctgcaagggctgcagtgagaatattgccaaaggtgccctccgccttggtgcctcttttcctgatccccgtggctacgaaaatactaagtggtaccatgttgtgtgcttccctacatcatcatacccattatttccaatgtcaaatctgaaggggtttgattcaattgaggatcatgaccgtgacaagttgcacaaattggtggagaatcacaagagcgatggaaaagcggctgatgtattgaatgagtcaaatctgaagagagaaatggctcacagcatggatgactcgaatgaaggtgctgaaaaggatctggaaggaataaagattcactgcatgggggagtttgaagaaggtgctgaaaagaacctggaagaagcaaagttacctgcagggaacaaaatgattggtccatcgatatccttttcactttctgatataaaaaaagaatacaagaatgctacccttcctgctcattggaaggtttttgatacagttatcttccgtgagaaggaagatggccttcatgcttcatctaagattgctgcatttgattttgatgggtgccttgccaataccagtatgaagagggttggtgcagaccagtggtctttacagcataaatcaattccagaaaaattgcaaagactgtacgatgatggttacaagctggtcatattcaccaatgagtcaaacattgagcgctggaagaacaagcgacaacaagctgttgactccaaagttggccgccttgataactttattgaatgtgttaaagcccctattcaggttttcattgcttgtggtttagggaaaggaaaaggtattccagatgatccataccgcaaaccaaatcctggaatgtggtggttgatggctcagcatttcaattctggaatcaaaattgacatggatcaatctttctatgtcggtgatgctgctgggagagagaacgatcatagtgacgcagatatagaatttgctaaggccatcggtctcaagttccatgttcccgaggagtacttcggtttctaattacctgtgaccagctagtaagatggttacactacgtcgtttagtgtttggatattatcaatactgtggctattctggtatggtgatctacatgtctgtttaaaccgtcaaataatatcccagttattcactt

SEQ ID NO: 13503 - DNA, 1016 bp, Zea mays
  Clone ID: JC-ZMSHLIB3587P041C08_FLI
cttgagatctccagggtacgagcgcattcgcgattttggccgcctccgccgccgtccgggaagatggcgggtctgggaaaggcgatgtacgcggtggggttctggatccgggagactggccaggccctcgaccgcctgggctgccgcctgcagggcaagtacttcttccacgagcagatttcaaggcatcgcaccatcatgaatatctttgacaaaacccctcatgtgcataaagacgcatttgttgctccaagtgcatcccttattggtgatgttcaagtcgggtcaggagcttccatttggtatgggtgcgtcttaagaggggatgcaaacatcatacaaattggatctgggaccaatatacaagacaattctcttatacatgtggctaaatctaatctaagtgggaaggtctttccaacaaccattggtaataacgtcacagtaggtcatagtgctgtgttacaaggatgcacggttgaggatgaggcttttgttggcattggggcaaccctattagatggtgttgttgttgaaaagcacggaatggtggctgctggagccctcgtacggcagaatactaggatcccttgtggagaggtatggggagggaaccctgccaaatttctgaggaagctcacagatgacgagatcagtttcattgcggaatcagctgccaactattccaatctgtccaaggtccatgctgctgagaatgccaaacctcttgaaaagattgagtttgagaaggtgttgggcaagaagtttgctcaccaggatgagtatgattcctcgattggcgtcactgaaggggcaccaccagagctcacgtccccaaatccagcccaatgaacctctgtttctgttttctctttggcgccttaatcattttctgttggacagtgctggatcgttgatcggggtactgttccatgacactggtggtttatgtttacttttcctccccaataatcttggatcgagcgatgttataaagctggccatgcacttcttcc

SEQ ID NO: 13504 - DNA, 829 bp, Zea mays
  Clone ID: JC-ZMSHLIB3587P042E07_FLI
gccctcagtccagctcgccagcagctctctgccctcctccctcaagccctagccgagtttttccatggtgccctggatgccagcccctttactcgatgcccctgctaggttccatggccgtcgctgccccagccatctccttggtggccgacctcgcccctacaacctcgcctcgctggatctcctcagggcgccgggatgctgcttcctacacgtcgtgtggctccctggtgcttgctctcgccctaggccatggagcagcagcggtcacgacactccttcgtgtcgcgccctcgacgtgttcgatgaaataccgcagcgagctccaactcgatctgcacagcccctgcgcgacgtcacaaattccgctcgttatcgatgtcgtgcttcgtgcatcgtgtgttcgacgaaaatcccaagtccatggacagcacatgcacaactcaaatccgatcggccaggtacgctagatgattatgtgaattggagggcatggatcaggatggatcacaaggtggctttgatggacccatctcgatatggacggcttgatcaagtgtcaggattgttgatgctcaccaagcggacgtcatctaaccacactaacctagtgtatcccaggcaagctccggtgcatttgccacctccttgttgttttaaaaacttttatcacttatatgctgcattaggtgataggagttgagtgatgaaacaattgatgcattaccattccttggaatttgattatcctccttgccacctgttttataaagagaactaatgaggcttagccctgcctagagaactaaaacttgattctttttaaaag

SEQ ID NO: 13505 - DNA, 1250 bp, Zea mays
  Clone ID: JC-ZMSHLIB3587P044D08_FLI
ccgccgaggaggaggaggaggacctcctcctgctcgagggcgaggagggctacatcgttggcgatggagggtactactaccctgagctccgctgcaacgacgaggagtactactacgaggacgggcgggaggaagaggacgcggttgccctcgatttggagcgccggatctgccttctcgagcacgatcaggaacctcgcctgcttgagccaccacatgagaaagaggaaggtacccacctttacacagatgaagtgctgccggacatgtctgaacatgaactgggtggcctctatgccgacgagatgttatctaaggaggatgtggaaacaatgaacaacctccacaatgatgatgaagaactgccagagtcgcctactgctggaaatgatgacagggaggaagcaagcgaggctgacggtgctgacagtgtaagtggcagtggcagtgatagggtatacaccattgacaaggtgcatcaaggtgcagcaatgcctattgcaagggtcgtggataagtaccaaggggaggcagtggagccggacattaagaagctttacatgaggctggaggcactggaggccgatagggagtcgatgaggcaggcccttgtggcaatgcgcacagagaaggcacaacttgtgcttcttcgtgagattgcgcagcagcttgccaaagatggagttccagttgggccgggagctggggcggggccaggtgtacaccatttacctagaaaacacacagttgggattgtagaaaggagattcacagaggacaagaaggcgatacttgtgaagacattttccatggctgccttgtttaagtggatcctcgctttattgggcaagaaaaagaagctatctcaaagcaggtatacttttggcttaacaaataataatgttggtttgctcatactcttggataagtgcccacggatccagaaaaccctcacaagaacaaagttaaaccttgccgaaagaagcagcagcagcagcagcagctgtacaatgtaaatagatagctttcagttgggaagattgcatttcttttgttaatgtttggtagagcggaagttcttttgattctttagttgatgattttccgatttcccatcttttggtgatgaggattttatgcgttggtcttgcaattgttaagtcacaaaatcgctttcgcttctttctcaccaggaagaactacaatgcatgtatagtgcgcttgtaaatacactggtttagtttgcttgc

SEQ ID NO: 13506 - DNA, 1538 bp, Zea mays
  Clone ID: JC-ZMSHLIB3587P045D02_FLI
cgcttctgcgccgagcaaggcggacgcttccgcggcggcctcggagctggatgggctgccacgcttcgagaagaacttctacgtggagtcacccgcggtggccggcatgacggaggaagaggtggaggcgtaccgccgccgccgggagatcaccgtcgacggccgcgacgtgcccaagccggtgcttgagttccgtgatgtgggcttcccagaatatgtgttgcaagagatcacaaaagctggttttgtggaacctacccctatccaatcgcaaggttggccgatggcattgagaggccgcgaccttattggcattgcagagacaggatcagggaaaactcttgcttaccttttacctgccattgttcatgtgaatgcgcagcctattctttcccctggcgatggtccaattgtcttggtgttagctcctacacgtgaacttgctgttcagatacagcaagaagcaaccaagtttggtgcatcatcaaagataaaaagtacttgcatatatggtggtgtgccaaaaggtccacaagttcgtgatcttcaaaaaggtgttgaaattgttatagctacaccaggacgactaattgatatgattgaatcacatcatacaaacttgcgaagggtcacatatcttgttttagatgaagcagaccggatgctagacatgggatttgaacctcagattaagaaaattgtttctcagattcgtccagatcgccaaacactttactggagtgctacctggccgaaggaagttgagcagctagcaaggaatttcctttttgacccatacaaggtcactattggttctgaagacttgaaggctaatcatgccattgttcagcatgtggagatattatctgagagtcagaagtataacaagctggttaatctactggaggatataatggatggtagccgaattttaatatttatggacaccaagaaggggtgcgatcagactactagacagcttcgaatggatggttggcctgctttgtctatccatggtgacaagagccaagcagaacgggattgggtcctttctgaatttaagtcaggcaaaagtcctattatgacggccactgatgttgctgctcgaggcttagatgtcaaggatgtgaagtatgtcattaactatgactttccggggtcactcgaggattatgttcatcgtataggtcgaactggcagagcaggcgcaaaaggaacagcgtacacctttttcactgcagctaatgccagatttgccaaggaacttattaatattctggaagaagctggacaaaaggtcagctctgaattagctgctatgggtcgtggtgcacctcctccatcttcaggttaccgtgatagatatagggggtatgggggtggccgatcgtggagttgacgttcaaatgcttagttgctgctaagagcaatgctttacatttgtttgttgatggatatgttgttttagcacactgataagagcaatgctttacattttggctagtattcggtaatgatggattcacatactcttggat

SEQ ID NO: 13507 - DNA, 1748 bp, Zea mays
  Clone ID: JC-ZMSHLIB3587P048E07_FLI
ttctcctcccgaacaccctactcgttctcccccatcggcgccgctacgaccagcgtttgagccactcgccgccgcgcacgatcctccacgccttgctccagtcctcgtcggcacgcctccttcccaaccctaaccctagcactagcagtcagtcgagcggcggcaagtcaagggtctgtcgagcgggccggcggcgaagaagtgtctagcgaggcgagtcaggtgcagggggacccacccgcagcggtggcgtgaagcgcgtttgactggatcgaccaggttggcggctaaacagaggaggttgcttgtttgttttctccgtccggctgcggttttcctttgactggatcgatcagatttgccggcggcggcagcggtcccccggcaaaggcgtggggatccctgccgggatggaggtgccgtggctgctgctggtgcacgggtcagtgacggcgctggtggtggtgtcgttcctctgcgggcaatggcccatcttcgagggcaccttcatccagagcatcaaccacttcctcacctttggggcctaccactacctcctgcggtttgtgcagtctgtgtgcggcactggggctagggatctcgtcctcggtgtcgagggatactgctgcgaccgacccaacccgatattgcaggtattttatgttgccataattggagtgacatattttataatagtgcagacatctttccagtatattcctgggtattatgtgagtggactgcacagatatctgagtgttgtggctgtttctgttggtgctatactcttcgtgcttactagcttttctgatcctgggactgttactgctgaaaatgtttctcaatacgtatcttcctacccatatgacaacattatttttgtggagaaagaatgttcaacttgcaagattactaggccagccagggcaaagcactgtagaatatgtgacaagtgtgttgctcgattcgatcaccattgtggatggatgaataattgcattggggagaaaaatattcggtattttgtggcctttttagtttggcatttccttatatgtctgtacggggctttaatccttggcttcattcttgctggtgaaataaaagagcggaaaattatatacattctgacagtttattatggcatcgataattcattctcgggcttgtttccacatgttgcacagtggttgcttgctgtgcataacactcagatactcttgagtgtatttttggctatattagcactgctccttggtggcttttgtgcttaccatgcacatctttgtttgacaaatacaacaaccaacgagacattcaaatggcaagactacatcatctggatgaaaaaggaaaatgaagcaaaggcggacgctgccacgctcagatccagcataggctcggccaatagtgatgcacagaaagctcctccaagcaaatggaggacgttcttcatgagatcccgcacaccaagcatggaaccagttgtgagaaacaacatatatgacagaggcatgattacaaacctgtgcgaggtggtcgtccctttatcagaacggaaggcattttcccgcatgaaatcagattgatgtcttttgttgcagttgctttgtcaccaaactgttgttgtatatcagtgtagaatttgcgacacatttttttggtcataccatagaggcatagggaaaaatattcagggtaatcgtgttcagtacctacgtcctatttattataggtgaaaggttttg

SEQ ID NO: 13508 - DNA, 706 bp, Zea mays
  Clone ID: JC-ZMSHLIB3587P050C06_FLI
cccaccgtccggagaggctgcaggagctgtacctgctggacccagccacgtactcgaccctgacggggatagtggagaaggaagtgaaggagggcacagcgaggaaggtcgacagctgcgcaagggcgatcctgtggcttgctagatccatggatttcacagctgcgctgttacagaggctggaggaggactctgcgcagcagcagcagcagagcctcgcgcagctcgtggaggccgcgtacgaggccaccctgaagccgtggcacggctggatctcctcggcggcgtgcaagatagcgtggaagctcatccccgagaggaaggtgttcaccggcatgctactggggacgggccatgactgctctgcactcggggacgacgacatcgggcggctcgcgacgttgcttcggcccttccttgatgacatccactccatgatggccaagttcagactggacaggctcaagtcgacgtgatccatggcgaacccgacgcaagcccaagccatggacatggacatggtccgatccccgtccttcgctgtgaatactgcctgccctggctttcgtcttggagtcgcattgcttgcggttaggtctagtttagacgctgctgctctctagtctgtacataggtcttttgcttgtagaatagactcccaagatctgcatgcggtgccctttttcatggtagggtacgtttggac

SEQ ID NO: 13509 - DNA, 1948 bp, Zea mays
  Clone ID: JC-ZMXLIB3526039CC01_FLI
gcaatcctccttattgttccacacaaacagaaacacacagggtctctgttctgttcatcctcacactgattgagttcttgtggtctctcaaccagcatctgatacccaattcctcgcacaaacctgccacacgcaatgtccaagaccgagagcaggaagctgtcggacgactatgaggttgcggaggtcctcggccgaggcggattctcgatcgtgaggcggggagtgagcaagtcagaggggaaggcggcccaacaggtcgccataaagaccctgcgaaggctgggcccggccaccacgaccggcgggagcacgccgccgcagcaaggctcaaataagggcggcggcctggttccgacgtggaagcaggtgtcgtccatctccgacgcgctgctcaccaacgagatcctcgtgatgcggcggatcgtggaggccgtggcgccgcaccccaacgtcatcgcgctgcacgacgtgtacgaggacgcgcgcggcgtgcacctggtcctggagctctgctcgggcggcgagctgttcgaccggatcgtggggcgcgaccgccactactcggagttcgacgcggcgggcgtcgtccgccagatcgcgcgcgggctgcaggcgctccacggcgcgggcgtcgtgcaccgggacctcaagcccgagaactgcctcttcgccgacaggggcgaggcctccacgctcaaggtcatggatttcggcctcagctccgtcgaggacttcagcgaccccgtcgtcaccctgttcggctcgatcgactacgtctcgccggaggccctctcgaggcaggatgtctcggctgccagcgacatgtggtctgttggggtgattctgtatatcctcttgtccggatgcccgccgttccatgcaccaactaatcgagagaagcagcagaggatactgcagggagagttcagtttccaggaccatacatggaagacaatctcttcatcagccaaagaactgatctccagtcttctctctgttgagccttacaagaggccaacagcaagtgacctgctggggcatccttgggtgataggggactgcgcgaagcaggacctcatggacgcggaggtcgtgacgaagctgcagaggttcaacgccagaaggaagctgcgggcggcggcgatcgccagcgtgctcagcagcaaggtggcgctgcggacgaagcggctgcggaacctgctgggacggcatgacctgagctccgaggagctcgacaacctgcgggctcactttgcacggatatgcgccgacggcgagaacgcgacgctggcggagttcgagcaggtgctgagggcgatgaggctggaggcgctggtcccgctggcgccgcgcgtgttcgacctgttcgacaacaaccgcgacggcacggtggacatgagggagatcctgtgcgggctgtccagtctccgcaactcccgcggcgacgacgcgctccggctctgcttccagatgtacgacgccgaccgctccgggtgcataagcaaggacgagctggcgtcgatgctgcgagcgctgcccgaggagtgccttccgggcgacatcacggagcccgggaagctagacgaggtgttcgacgagatggacgccaacggcgacggcaaggtgagcttcgaggagttcaaggcggccatgcagaaggacagcgccctccaggacgtcgtcctctcgtccctccggccgccgccgccgccatagctagaccgggagagagattccaactcgttcaacttcattcccacgagaacgcaccattgattacagtaccgttcgaatcatttaatcagtctccggcctgtgccgttgtccgatccggccggctagttgttggaaactccggtcgtgggagaacctcgatggatcctgctagatatggctgtgctgttatgtgtttctggatcctgatagattcgatggctgtgttatt

SEQ ID NO: 13510 - DNA, 476 bp, Zea mays
  Clone ID: JC-ZMXLIB3526050BG11_FLI
ctgggcgtcgtcacgtcctcactccttgtccgtctgcctgtcgccttgtctcgccttgcaggtcgtagacgacagacgagcagtagcagcagcacgaggcggccgggcccgggccacgccatgccggagaaggaggcgcaggccgccgcgttctgcggcgaggcggtgatcgccgagttcgagtccctcacgcgggacgccgccgccgtgcagcgcgacacgctgcgccggatcctggcagacaacgcctgcgccgagtacctccgctgccggggcctcgcgggccgcaccgacgccgccagcttccgcgcctgcgtgccgctcgccacgcacgccgacatcgagccctacattgcgcgcatcgccgacggcgacacgtcccccgtgctcaccgccaagcccatcacctccatctccctcagctccggcacgacgcaggggaagcgcaagtacctgcccttcaaccaggagctcgc

SEQ ID NO: 13511 - DNA, 994 bp, Zea mays
  Clone ID: JC-ZMXLIB3526088DF03_FLI
gccaaaaccccaatcgcacaggagagaccgagagagaggttttccatccatggctcccggcgtcgcttccgtgctggtcccgcaggagcccgtcctcctcaaggacatcctcgcctcaccgtccccctgcgggaacaccgctgtctccgcccgccacctcttcggcaacggagtcgcgccgccacgctcctcggacgacggcatcaaggacgccgctgccgaccgccacggtgaccgcgacctctccatccccaagatcttcaccggagacgtgctggacctgctcgacgatgctgcgaggctggacctgatgctggcgctgacgggggacggcggtgcggcgtccatggccggcttctccgcgcgcgggtggtgggtctcgaaggaggatggcgacgcggtgcagctgaaggtgccgatgccggggctggggaaggagcacgtgaagatgcgggtggagaaggacgccctggtgatcaagggggaggccggcaaggacctcgagggcgacgacgacaagggcccggcgcggtacagctaccgcatcggcctctcctcccaggctttcaagatggaccagatcaaggctgacatgaagaacggcgtgctcagggtcaccgtcccgaagatcaaggacgaggagcgcaaggacgtcttcgagatcaagatcgagtagggtgtgtgcatcggatgggtcctcccaggtctcctagttgcagtccatatccataccgtagttgcagtccatatccatatcgtagttgccatgagctagtcgtattagtagtttcaattactggagtgcagtagtcgtttctgttgcagagcagtcgtagtactagtagctttctggtggtgctccgtctctgcctgatctgaggcagcgtttacctttctgttggtcttgcaaagttcagttccctggatggcgacgatcactgacgatcttgtgatgaacttcaaatggtaatggaatctgcagttaataatcgac

SEQ ID NO: 13512 - DNA, 912 bp, Zea mays
  Clone ID: JC-ZMXLIB3526090CG03_FLI
cttcgctcactcgtcagctccctgtcgcgcacacaacggacgcagaggccagagccagagcagctgcccccctccgatcggagcaagcaacggcgccaccgtctgtccgtctccaatggcgcggccacagcaacggtaccgcggcgtgcggcagcgccactggggctcctgggtctcggagatccgccaccccctcctgaagacgaggatctggctgggcaccttcgagacggccgaggacgcggcgcgcgcctacgacgaggcggcgcgcatcatgtgcggctcccgcgtgcgcaccaacttccccgaggacgcaggcggcggcggcggcggcgacgggcagcagcagcagcaggccgcgccgtcgctcctctcccccgcgctcgtcgccaagcttcaccgctccaacctcgcgtccgctcaggcggcgcagggcaaggccgacgcctcggcagccgccgccgccgcgctcccgcgcgtcgcggcggcagtgcctgccggcatgggggtctccgcctcgccgtcggcgtcggcgtcggcggcgggggactggagcggcgggctgcttgaggagcagtacgtggaccagatgatcgaggagcttctggactccaacttctccatggagatctcctactagctgcgcgcctgcgcgcacgacgcgtcatcccgcgccccccgcctcctctgctccgtcacatctcaattctcatctcatctctctgtttggtttcgtcggtcaggtagggaagtgcagtgcagtgagttacttagtattagcagtatcattagccatgccaggagtgactcgaggttactttggcctgttggccagacgagttggttcttgagcaacctgatgtgtagtatacggtagtgtcgccagagcataaaagagttggattggactcc

SEQ ID NO: 13513 - DNA, 903 bp, Zea mays
  Clone ID: JC-ZMXLIB3526P033CC12_FLI
cttctcgatctgggtgatcctccatctctaccccttcctcaagggtctcatgggcaggcagaaccgcacgccaacaatcgtcatcgtttggtccatcctccttgcgtctatcttctccttgctgtgggtgaagatcgatcctttcatctccccgacacagaaagctgccgccttggggcaatgtggtgtgaactgctgatccagattgtgactcttatctgaagaggctcagccaaagatctgccccctcgtgtaaatacctgagggggctagatgggaattttttgttgtagatgaggatggatctgcatccaagttatgcctctgtttattagcttcttcggtgccggtgctgctgcagacaatcatggagcctttctaccttgcttgtagtgctggccagcagcgtaaattgtgaattctgcatttttttatacgtggtgtttattgttttagagtaaattatcatttgtttgaggtaactattcacacgaactatatggcaatgctgttatttatacgcaaagactgatacattcttcggattgtgagcaaacagtcagaacactgtaatctcttaggacaactatataaggcagctgttgtatcatctctattgtttctaatggccgagggatatgtagatgtaaatcacttgcaacatcgtattgttggcagtctgtaatgtttgaaaagcatggagggactgatgcggcgtggtctttcatgaattggggaatcagatggcagtccggtagaacttctgctaccgtattttctgatggcattacctttccagctccaccaactgttcgtgtcgtttttgttggatatttaacctagtttaggtatgtctgatttaagaaatctaaattatgtctatacatttgaggatttctagat

SEQ ID NO: 13514 - DNA, 1381 bp, Zea mays
  Clone ID: JC-ZMXLIB3526P037CG02_FLI
cagggcgatccagagggcgaactgcttccacgtggaggggcacggggacccctgcaacatctccagcacgccctacatgatcatcttcggcgtcgtgcagattttcttctcgcagatcccggacttcgaccagatatcgtggctctccatcctcgccgccgtcatgtccttcacctactccaccatcggcctgggcctgggcatcgcgcaggtggtgtccaacaagggcgtgcagggcagcctgacggggatcagcgtcggcgcggtcaccccggtcgacaagatgtggcgcagcctgcaggcgttcggcgacatcgccttcgcctactcctactccctcatcctcatcgagatccaggacaccatccgcgcgccgccgccgtccgagtccaaggtcatgcggcgcgccaccgtcgtcagcgtggccgtcaccacgttcttctacatgctgtgcgggtgcatggggtacgccgcgttcggggacaacgcccccgggaacctcctcacgggcttcggcttctacgagcccttctggctcctcgacgtcgccaacgccgccatcgccgtgcacctcgtcggcgcctaccaggtctactgccagccactgttcgccttcgtcgagaagtgggcgcgccagaggtggcccaagtcccgctacatcacgggcgaggtcgacgtcccgctcccgctcgggaccgccgccggccggtgctacaagctcagcctgttccggctgacgtggcggacggcgttcgtggtggccacgacggtggtgtccatgctgctgcccttcttcaacgacgtggtcgggctcctgggcgcgctggggttctggccgctcaccgtctacttccccgtggagatgtacatcgtgcagaagaaggtgcccaggtggagcacgcggtgggtgtgcctgcagctgctcagcgtcgcctgcctcgtcatcaccgtcgcctccgccgcaggctccgttgccgggatcgtctctgacctcaaagtgtacaaaccgttcgtcaccacctcctgatcgaccgtacgtcctagcttccgtgcagttcaaaacatacgcacgcacagatcattaattggcgcctagtatatatgtgcagtcgtctttaattaaattaactaggcattaatcgatcgataattaccactacgtcgttctagtgatgcgcgtagcttgcatcatcgctagctgatttaatttccattgtttttctttgatgatctggttagccgaaatggctagtgaattaagagaaaacaaatagtagcagtgtgtgtaatcccaagtcaaatacgttattgaagttgtcggcggtacaagacgcttgtaaaatgtttgtgtttcaattaatcaagaagaattgtacgtgtt

SEQ ID NO: 13515 - DNA, 2080 bp, Zea mays
  Clone ID: JC-ZMXLIB3526P040AA08_FLI
gaaaaactgctcggttgctgctcctgctccgccgcgccggcatcatgtgtggcatcttagccgtgctcggttgctccgactggtctcaggcaaagagggctcgcatcctcgcctgctccagaaggttgaagcacaggggccccgactggtcgggcctttaccagcacgagggcaacttcctggcgcagcagcggctcgccgtcgtctccccgctgtccggcgaccagccgctgttcaacgaggaccgcaccgtcgtggtggtggccaatggagagatctacaaccacaagaacgtccggaagcagttcaccggcacacacaacttcagcacgggcagtgactgcgaggtcatcatgcccctgtacgagaagtacggcgagaacttcgtggacatgctggacggggtgttcgcgttcgtgctctacgacacccgcgacaggacctacgtggcggcgcgcgacgccatcggcgtcaacccgctctacatcggctggggcagtgacggttccgtctggatcgcgtccgagatgaaggcgctgaacgaggactgcgtgcgcttcgagatcttcccgccgggccacctctactccagcgccggcggcgggttccggcggtggtacaccccgcactggttccaggagcaggtgccccggacgccgtaccagccgctcgtcctcagagaggccttcgagaaggcggtcatcaagaggctcatgactgacgtcccgttcggggtcctcctctccggcggcctcgactcctcgctagtcgcctccgtcaccaagcgccacctcgtcgagaccgaggccgccgagaagttcggcaccgagctccactcctttgtcgtcggcctcgagggctcccctgacctgaaggccgcacgagaggtcgctgactacctcggaaccatccatcacgagttccacttcaccgtacaggacggcatcgacgcgatcgaggaggtgatctaccacgacgagacgtacgacgtgacgacgatccgggccagcacgcccatgttcctgatggctcgcaagatcaagtcgctgggcgtgaagatggtgctgtccggggagggctccgacgagctcctgggcggctacctctacttccacttcgcccccaacaaggaggagttccacagggagacctgccgcaaggtgaaagccctgcaccagtacgactgcctgcgcgccaacaaggccacgtcggcgtggggcctggaggtccgcgtgccgttcctcgacaaggagttcatcaacgtcgccatgggcatggaccccgaatggaaaatgtacgacaagaacctgggccgcatcgagaagtgggtcatgaggaaggcgttcgacgacgacgagcacccttacctgcccaagcatattctctaccggcagaaagaacagttcagtgacggcgttggctacaactggatcgatggccttaaatccttcactgaacagcaggtgacggatgagatgatgaacaacgccgcccagatgttcccctacaacacgcccgtcaacaaggaggcctactactaccggatgatattcgagaggctcttccctcaggactcggcgagggagacggtgccgtggggcccgagcatcgcctgcagcacgcccgcggccatcgagtgggtggagcagtggaaggcctccaacgacccctccggccgcttcatctcctcccacgactccgccgccaccgaccacaccggcggtaagccggcggtggccaacggcggcggccacggcgcggcgaacggcacggtcaacggcaaggacgtcgcagtcgcgatcgcggtctgacgagagtacgtgctcgcgcacctccctgcttctaccgggctgcatcctgcagcatgcactgtgcgagcacagccgatcagcgccaataaactggaggataagaacgactggtagctgtgtgtgtgtgtgtcgtgcgtgcccaccggccatatcccggtgccgcagcacgtgctattgttacgtgttgtactgccaccagcgtacgtgtctgtgtgtctcgatcatatctgtacgtttttagatttagaaggggaaaaaaagtatgtccg

SEQ ID NO: 13516 - DNA, 931 bp, Zea mays
  Clone ID: JC-ZMXLIB3526P041AE11_FLI
gcgccggaggaggggagggatgatgtggctcccattcctgtacccggcgccggcgtcggcgtacatggcggcgatgtcggcggtgtcgttcgtgtccatggcgaacgcgggcctcgccgagctccgcggcgaccacatgccctactccaagttctggcacgccgtggcgggtgccgccggcggggacaccaggcagcggggcgggatgccgctcctgcgaagccgggacggcatgctgctggcctacgccccggcgctgctcgccgccgccgcgtccttcgcggtgccgggcgccgtcgagggcgcgcgcgccgagctgctcagcgccgcgctcgccgcgcacttcctcaagcggatcctcgaggtgctgtgcgtgcaccggtacagcgggagcatgccgctgggcacggcggccaccatctcctgcagctacctggtcagcacggccaccatggtctacgcgcagcacctcagccgcggcctcccggaccccgccgttgacctgctctgccccggcgtgctcgtcttcgccgtcggcctcgccggcaacctctaccaccaccgcctcctctcgggcctgagggccgacgacggcacagggtacaaggtccccaggggcggcctgttcggcttcgtcgcctgcccgcactacctcttcgagatcctcgccttcttcggcttcgccatgatctcgcagacgctgtacgcgctcgccgttgccaccggaacggcggcctacctcgccggccggagctgcgccaccaggaggtggtaccggtccaagtttcaggacttcccgccgaggatcaaagcgttgattccgtacgtgctgtagtgagctagctaggagagtgatgagtcgcatgtacaagacacactgttcatttggtacagagcatcatctgttgcagctgaacgtaaacttcatggg

SEQ ID NO: 13517 - DNA, 2007 bp, Zea mays
  Clone ID: JC-ZMXLIB3526P041DF11_FLI
ggccgcggtccattccgtctgaagaccctcctcctacctaattatttttctctgtcgtgacgtgaaatgccagcgcgcagcttcttgatccgttccggctgatcccgtggaccggacttggggttgggggaggccctctgtctccatggatgaggcagcagggctgctgttgcaagaagagggtggaggtggggaccaagaagctctcctccttccacttccacaggatgttggcctttacacaggtgatggatctgttgatgtcaaagggcgccctgcgttaaagggcactacaggcaattggaaagcatgctttttcatcctagggaatgaatgttgtgaaaggctggcctactacggaattgcaaaaaacctagttacttatttgaaagtgaagcttcatctaggcaacctcgaggctgcaagacatgttaccacttggcaagggacatgctatctcactccccttgttggaggcatcttagcagactctcgttgggggaaatactggactattgctgttttctcatcggtttactttattggcctggctattttaacgctttctgcatcagtcccagcgttgcaaccaccttcatgtttaaggacagtttgtccagaagcaagcttacttcagtatggcatattttttggtggcctctatatgattgccctagggactggaggtatcaaaccttgtgtctcctcctttggagctgatcaatttgatgacactgaccaagcagagagagctaagaagggttcattcttcaattggttctacttctgtataaatataggttcattcatatcaggcactatgatagtgtggatacaagataacactggttggggaataggctttgcgattcctactatattcatggcattagctatttcattcttcttctcagcttcaaataagtacagattccaaaaacctggtgggagtccactcacaagagtgtgccaggtggttatagcagcatttcgtaagtggcacattgaagtgccacatgatacatctctcctatatgaagttgatggccaaacttcagcaattgaaggaagccggaagctggagcacacaaatgagctcgagttccttgatagagctgctgttatctcatctgctgatctgaagagtgaatcctttaccgacccatggaagctttgcacagttacccaggtggaagaattgaagatcctaataagaatgtttcccatttgggctactactatcatattcagtgctgtttatgcccaaaactcttccatgttcatagagcagggcatggttcttgacaagcgcattgggtctttcaacattcctcctgcatctctctccacttttgatgtaatcagcgtcatcatgtgggtcccactctatgaccgcatcctggtgccactagctagaaaattcactggaagggagaagggtttttctgagctacagcggatgggaattggattagtcctgtccattctcgcgatggtatctgcagctctagttgagttgaagcgtttagagattgccaggtctgaaggtctcattcatgagaaggctgctgttccaatgagcattctttggcaaataccacaatatttcttggtgggcgctgctgaggtgtttacttgtattggtcaagttgagttcttttacgatcaggccccagatgccatgaggagtttatgtagtgcacttgcacttattacagtctcactgggaaactatataagctccatcatactgacattggtgtcgtacattacaactcagggaggagatcctggatggatccctgacaatctgaatgaaggccatctcgaccggttcttttggttaattgcagggataagctttgtaaatttgatagtttatatgggttgtgctgtcagatacagatataagaaagcctcttgattatatttatgtgaactcttgtaatgtgatttcccattcccgatatcatacttatcaaatacaatgcactgtacagatttctg

SEQ ID NO: 13518 - DNA, 694 bp, Zea mays
  Clone ID: JC-ZMXLIB3526P043BD08_FLI
acaggcaagacaggttggggtgtaagatccctcagttctatatcatcaggcagtttcatatgtgagtataccggtgagctattggaagatgaagaagctgaaaagagagagaatgatgagtatctatttgatattggtcataactaccatgataaagaactttgggaggggctgaagtcagtggttggcctaggatctgctacttcgtcttctgagaccatggaaggcttcacaatagatgcatctgagtgtggcaatgtgggaagatttatcaaccatagttgttcaccaaacctctatgcccaaaatgttctctgggaccatgatgatatgaggatgccacatgttatgttttttgctgttgagaatatcccgccactacaggagctgacctaccactataactataagataggggaggtctacataaatggcgaggagaaggttaaacattgctactgtggcgcctcggattgctgtggaaggctctactgaagcattattgactgctgttagctctatgttttgaacacctctgtcttgtctctgcggtacccttcttttctcagttcgccttgtcttgtcggcgttctgatgtttacagcaagctgcatttgatcttgctgttttcatttagaaaaaaacattctgcttcgctctactgtgttttgaattgtgaatgaattttgaatgg

SEQ ID NO: 13519 - DNA, 738 bp, Zea mays
  Clone ID: JC-ZMXLIB3526P092AH08_FLI
tacgtagtagaggcaagcaaaagggcagggatagagcgccgccgagatatctagctagaagagcctagaagccggtgtagaggatcaggaggatgtctgggtcgtccggctccggcgtgtgggtgttcaagaacggcgtgatgcagctggagcagccggccgcggcggcgagccggaaggcgctggtgtacgtgccgacgaacgaggtggtgcggtcggtggaggcgctggagcggcggctgggcacgctgggctgggagcgctactacgagaaccgcagcatcgtgcagctccacaagcgcgacggcggcgccgacctcatcaccatcccgcgcgacttcgccagcctccgctccacccacatgtacgacgtcgtcgtcaagaaccgcgaccacttcaaggtcgtcgacgcttagccgccgcatcccgcataagctacgaccagaccaagcagctagctactagctagctccatcgtcgtcgaccaccgtcgtcgatctcgacatgcatgcgtgtgcactgcacaacggactgctagctgatgccagaaattatagtaagtctagcttatgtacgtatgcattgtgtgtgtgttcgtgcgtgggtacatgcatattgctcggctttggcttggcttaaattagttgcacgtctaattaagacgatcgagtttgtgtgtatgtgtgtgtgagagagaaagtgtgcgtaaaatattgtactcatgctctgctgttttct

SEQ ID NO: 13520 - DNA, 804 bp, Zea mays
  Clone ID: JC-ZMXLIB3526P093BE04_FLI
cccacacgcacggccgcaggcagcagcaccatgtggtcggcagcaacggcggcggcggcgcgcgcggtgtccgtgtccccagtcccggcgccttcgctcctcagcggccggcgcggcgggtcgcggggcggccgggggtcggtgtcggtgcgcagcacggtgtgggacttcgtgggcggcgacctggtgcggccggacctgggcaagtggctggacgacgtggagaagcacaaggcgctggccatctacccgccgcacgagggcggctacgagggccgctacctgaaccgcctccgttaccagggctactacttcctcgacctctccgcgcgggggctcggcgacccggagaccacgctcaccaaggtccaccccgtctgcccgcctagcctcggcaggcagccggtggcgcggtggtacttcccgccggaggtggactacaggctcagcctgctgcacccggacgccaaaggcctcgtcgtctggatcatcgaagccaaggttctgtccaaggctgagctgcagttcctggccatgctcccggacatccgccccaaagtcagggtgatcgcagaatgcggcaactggagaagctttgtttggaagccactgaagcagatcgcaggcctcgagccggacccggacgcggaggaatgatcaagcaagcaggtctagctagttgtctaccagactggctactgctactgctacactctccaattgcttctgggacatctctccctgccattcctgcagctttgcactgaatgagagaggcaattaataaagatatacatacatttt

SEQ ID NO: 13521 - DNA, 1392 bp, Zea mays
  Clone ID: JC-ZMXLIB3526P099AB10_FLI
tctgctccaccaccggcacatcgccgccgaccttattcctccgccgctcgaggagtcagccgagccaacggagggagaccatatgggcgcggaggcagcgcatccgcagcaacagcctccctcctccgtccgaccctgcagggaggcggcggcgcccgcggtgctggggctgcagctctcggcgctgatcgaccacgtcgcgcgcgtcgactggtccctcctcgaccgcgtcgctggcgaccgcggcggctcgcagcaggtgtccattgtggagttgaatcatattcttaatgaagtgaatacccacatccttccttcccacaatgatctcaccccaataactacaatagccggtggaagtgttgccaacacaatccgtgggctctcagctggttttggaatatcaactggaataattggagcttgtggggatgacaaccagggaattttgtttgtcaacaatatgagctttagtggtgtggatctcacaaggttaagggccaaaaaagggcacaccgctcagtgtgtgtgcttggtcgatgcaagcggcaatcgcaccatgcgtccgtgcctatctagcgcagtcaagatacaggccaatgaatttagaaaggaggatttcaaaggctccaagtggcttattgtgagatatgcacaacagaacatggaacagattattgaagctattaggattgctaaacaggaaggcctttcagtatcattagatttggccagttttgagatggtccgtgactctaggtctaagcttattaaccttttggagaccggtaacattgacctttgcttcgccaatgaggatgaagctagagaggttatagggggaggtctggaatcagatccagaggaggcgcttgcgttcttgggcaagtattgcaaatgggctgtggtcacacttgcttcaaagggatgcatggcaaagcatggcaaacaggtcgttcaagtgccggccatcggggagagcaacgcggtggacacaactggagcgggcgacctgttcgcgagcgggttcctgtacgggctggtgaaggggttgccgctggaggagtgctgcatggttggggcgtgcagcggcgggtcggtgacgcgggcgctcggcggagaggtgcggccggagaactggcagtggatgtacaagcagatgcacgccaggggcatgctgctccctgagctcaagaactgaactaatcatgctgcagctggtgttagctgcatgctgcaccagctgttgtatctctcagcactcctacctttcccctgctagaatattgaaccactcctgagattgaaccaatcagatggagtgtattgataattgcacttcacatgtgtgctagtgtactattcccttggtctaaaatatcatgtcatttt

SEQ ID NO: 13522 - DNA, 783 bp, Zea mays
  Clone ID: JC-ZMXLIB3526P100BE05_FLI
agtcaacacgagttctccatcgaacaagttcgatcccgctgctcatctatcgcgcgcgtcgtcaatcgtctcgtcatcaccatggttggaagcagccccctgcaggccgtgctggtggcccccggcgtcaaggacaggaaggtgctcgcgttcaagcgcgacgcgctcaaggacaaggacgccgtctccggcctcatccactccatcctcgcgtccagcccggcgcagcgcagcgccttctacgtcttcgacctggccaaggtcgtcgacctcttcagggcgtggcgccgggcgctgccggacgcgcggccctgctacgccgtcaagtgcaacccggacccggcgctgctcggcgcgctcgccgcgctcggcgcgggcttcgactgcgccagccgcgccgagatcgaggccgtgctcgcgctcggcgtccggcccggggacatcgtctacgccaacccctgcaagcccgaggcgcacctcgagtacgccgcggaggtcggcgtcaacctcaccacctacgactccgaggaggaggtggccaaggtcaggcgctgccaccccggctgcgagctcctgctccgcctcaagggccccgacggcggcgacgtccgggtcgacctggggaccaagtacggcgcgcaccccgacgaggtcgtgccgctcctgcgcgccgcccagcgcgcgggggtcggcgtggccggcgtctccttccacgtcggcagcggcgcgtccaacctccacgtctaccgcggggccatccaggccgcgcgcgccgcgttcgac

SEQ ID NO: 13523 - DNA, 765 bp, Zea mays
  Clone ID: JC-ZMXLIB3527073DE07_FLI
attgtttaccatggaccagattttgttaggaagatctgatgttgcaggttggggtgcattcattaaggtcagataaccgaacaaaatacctctgagtgcgatacttcctttcttgttctggctaattttccttgcaatatgtagaatcctgtaaataaaaatgattatcttggagaatatactggtgaattgatctctcacaaggaagcagacaaacgcggcaaaatttatgaccgggcaaactcatcttttctgttcgatttaaatgaccagtatgtgttggatgcttatcgcaagggggacaaattgaagttcgcaaatcactcatctaaccccaactgctatgcaaaggcaagaatcgcaattactgaataacatttagttcttgattaccttgcccatcttaaattcattctaccttccaggtgatgctggtggctggcgaccatcgggttggtatatatgcgaaggagcatattgaggctagcgaggaactcttttatgattatcgttatggacctgaccaggctccagcttgggctaggagacccgaaggatcaaagaaggacgaggcatccgtctctcaccgtcgagcacacaaagtggctcgatagctgaagagtcgctccggatgatacaatatgcagtaaacttaatacttaatacatgattcagtcctagttcattggtagataaacatgctatatactatccattagtaaataaactctcattcatcgagttggagaataaatgcgtataaac

SEQ ID NO: 13524 - DNA, 1237 bp, Zea mays; identical to SEQ ID NO: 4164
  Clone ID: JC-ZMXLIB3527P006DE07_FLI

SEQ ID NO: 13525 - DNA, 1035 bp, Zea mays; identical to SEQ ID NO: 12198
  Clone ID: JC-ZMXLIB3527P074AA07_FLI

SEQ ID NO: 13526 - DNA, 315 bp, Homo sapiens
  Clone ID: LIB10-10-F3_FLI
actttctgtgaagaatacgatgcttgccagaggaaaccttgccaaaacaacgcgagctgtattgatgcaaatgaaaagcaagatgggagcaatttcacctgtgtttgccttcctggttatactggagagctttgccagtccaagattgattactgcatcctagacccatgcagaaatggagcaacatgcatttccagtctcagtggatccacctgccagtgtccagaaggatacttcggatctgcttgtgaagaaaaggtggacccctgcgcctggtgtccgtgccagaacaacggcacctgctatgtggacggg

SEQ ID NO: 13527 - DNA, 1040 bp, Triticum aestivum
  Clone ID: LIB103-023-B8_FLI
ggggaggcgattctgcaggcggtagggcaagagcccggtcaagaattggagggcgaggcggaggagagcgcagatcgagaggggaacggcgacgacgctgggaaggaagatagtgggtgtaaagatctggtcctggtagaggaccctgtcctggtcgaggatccagaggaagcatttcaggaagaaatgagagcgcttttggcgtctgtccctgaaggtgccggggcatcatttactgcgatgcagctgcaggagctagagcagcagtctcgggtataccagtatatggctgcccgtgtgcctgtgcctacccatctcgtcttccccatctggaagagtgttaccggtgcatcctctgaaggcgcgcagaattaccctacattgatgggattggcaacactctgcttggactttgggaagagcccagaaccagaaccaggaaggtgccggcgaacagatggaaaaaggtggcggtactggagaaaaacaatcccaaacgagaaatattgtgaacgccatatgcaccgtggtcgcaagcgtcctgtacaggttattgttgaggatgacgagcctgattccgcatcagagtcaaaatcatcatctggcaaagtcactgaaggaggcaagaagactgacgacaagagttcaagtagcaagaagcttgcagtggcagcaccagctgctgtggagtttacatgattgatgatgtagcatttggaagctgcaagaagagcgtaacggccatggcaattagactaccgttattgtaatcctcaaagactttagtgttgtctagctataacctcattaagcaagcaaaatgtcttgtcggaagaagccacaaaaacccctgtttagctgtcactgaatttttcagtttaggtgtatagtttgaattagcttggtcgtgccttcggcctttaggcaggtgatgcggcataattggataagtcttccctcattgataagtcgcattgtgactcaagaaactggtggatgaatctgcagagagtagatactatttggtgtgtgcttttaag

SEQ ID NO: 13528 - DNA, 597 bp, Triticum aestivum
  Clone ID: LIB103-025-B8_FLI
gggtacgtggggaagcaccgcctctccgccgccatccagcgcctcgaccaggagctccagtcactccaggatgaattgaatgagcttgaaaccatggaacctgcatctgcggcatgccgggaggtgatcacaagtactgaaggaaagcctgacccgcttcttccaatcacaagtagcccggagaactcttcctgggacaggtggttccagcgcgtgcgaagctcccgcagcaacaaatggtggcaatccaaaggctccgattttgcctagctttcgccgaagctgagacaagctgtgtgcagattgaatctcccctgatccgtatggtccatccatggatggcttggcaacagaatacaacccagtttttcctgagaattgttgtgtatgtaatccctaacaaaaacatgaatgtatccccattagtcctgattgctgttcagaaaatagtcctgtaattcatctagccatgttcgattcttatggtcttggagcaaaatggtcctgtacttttgggcaagtttgttgacctttgagcaaaatttctcatgtgcatctaattttgttgaaatttgttgaagcaccgcatttcgtgtg

SEQ ID NO: 13529 - DNA, 598 bp, Zea mays
  Clone ID: LIB143-001-A1_FLI
acacatgtgacaagcctcatctcagccgtgcaggaccaagtagttttgcttcactccggcattccatccatatccatccatcagaattctcagtctccacagcagcaaggcgcacgaccagcaccagcagccggcaacaaaagacacagcagcgatggcgttcgtgccggtgtgcgtgcagtgcgggacgcggagcaacccgtgccggtgcaaggtggtcgggccgacgctggggttcgtcgcgttcgtggtggccggggtcatcgagtggccgctgggggccgccgtgtacctgttccgccaccgcaagggacgacgcatcatggcgcacccggccaccgtcgtgtacccgcgcgttaccagggccatcccgatctaatcggccgaccgatcagccaggtcgcggtttcatgtccgggtttgtgtcgccaacgtactgagatgtcgtcagtccaaatttgtgaatccttttacacccgcctgcctttctttctcaataagagtcgcaaatgtgtgtggtttcagtttgcgtacatttgtactccgattgtaagcatcgccgtcaatgtacgtaatactatgtatgtcatctcagtct

SEQ ID NO: 13530 - DNA, 758 bp, Zea mays
  Clone ID: LIB143-001-A3_FLI
agaggaaaacacatacgtattaatttaccaagtcaaaccgaaaacatcaccactccataacatttagcgcaagaactaatggtacacagctacatgaacatatatctctactgggtcgcagccgatcgagtcgggtcgggagggacaccatcctaatactagtccccctcctccatctccatctccatctcctccgcagcaacaccggcactcgccacgctattcatttttttttaacaaggacggacggaagctggaaaggttcaagcacacgcacgtatgtacagacacgggctgccacggcgatctggccggcggctagggcctggcgtcgggcgcggcggaggcgaggcgggacgcgatggcggagtggtacatggcgtcgtggaagctctccgtctccatcatctgcacgcgcagccgccgcgccttgtcctccgtcagcacgccgaaccgcctggccgaggccgaggccgaggccggcccccgcggcagaggctcgtcctcggacgccggccgcgcgtcgatgtagtccggctgcccggaccaccccagcagcggcgcccaccacttggcgccgtcgccgacggggcgcgccctcgccgtggcagagcaagcgcagggccgggccggagccggcgggcggacggagaagaccatccctgatgacactgccatggatggaagttctggattcggacgagaaagaggtttgaggctgactgtgtgttgagtttgcgacctgcgggtggattggg

SEQ ID NO: 13531 - DNA, 1513 bp, Zea mays
  Clone ID: LIB143-001-B6_FLI
acgaaacatagctacctactactcaagtatccatccttattgtaagtgctcttataagctactactagttacaagctggtttatatttaactacaagtagcaacgatttgtcttagtatatatggttcataatacatatatattggaactgagataatatatgcaggagtacagtgttgatccatggactcggaaggagttgtagcagcaaaggtggcagatgagactactaaaccggcaatccaagaagacggcgccgagagcaaggccgggatgactgatctgctgatgctgaccgacaagtcgcagctgcaggcgctggcgatgctgctgcggaacaacgaggagctcatgatgagccaggcgatcaagtcggagacggagcgcattgagtacctcaagacggtgagcgactgctacacgcggacgatgaagctcctcgacgattccatggcggccaggaccacgtacgagcgttcgggcggaatgaggagcctcgtcgcccgggacatggacgactacgtcgtctacggcctcaacgcgtgcttgcagaacgtccgcaactgctgcgtgcgcctggacgccatcgacaagctgcgggcgcactacgacgccctcgccgacgccgtcgccgacccggccgccaacgtcgagggcctcgccgcggaggcgtccgagtacaaggccgccatgtggcagtactgctacaaccagcggagcgcctccgcgcgggcgcactcccgcgcctactcccaggcgctcaagctggagggcatcgacttcgccgagctggtgcggaggcaccagctccggctcgggtacggcagcaagggcgaggagttcgaggacctggacgacacccagaagctggaggtgtacaacagcatcatcgtcgagtcggggcgggcggggctaccggtgcggatgttctcgtcgggccgctctgccggtggccctaagattgcagccacgacgtgggcggaggcagtgagcgtcttcatcatggcggcgggcaacctggcgtgggacgtgttcaccacggagcacgaggtggaggccatcctcaagggcagcctcaacctcctggcggggctaggcggctttgccgtggaggccgtcgtcggcgcggctgtcaccaaggcggtcgcaaacgtcggcgccggcgtctttgcttgctctctcgccggcttcgtcgtgggcgccatagccgggctgattttcgtcggcgtcagcggcctcctcattaacctcatcatcggctcccctaggaaggtgcctgacatgagcaagctcatgttccacaccgccgtcatgcccgatggaatggcccttgcgtatgcggtatctcattaattacttattatcatcgcagtgactaccaactgcttcagatcctactgttggaacgcgcgtggaaataagaagagagggcacaataaataataattgtaataaaattaataattattacaatgataataattatctatctatctctatttaataatagagc

SEQ ID NO: 13532 - DNA, 1702 bp, Zea mays
  Clone ID: LIB143-001-B9_FLI
ctccgcctccctgcctgcataccctgaccggaccccgatcccgccggcgtcgcgcggaatcgcggcggtcaaagcctatacgccaccccacctcacgtcgcgccgcgtcgccgcggtttccgcgtgctagtgctctcgggagctcggatcagaggggcgggctagggttcgccaatcgccagcgtgggtgctgccgtcgggcgccggcggctgagtagtacgaggagagatggacgcgttcctgcacaggctcaagcggctggacgcgtaccccaaggtgaacgaagatttctacaagcggacgctctccggaggcatcgtcacgctcgtcgccgccgtcgttatgctgctcctcttcatctccgagaccaggtcatatttttattcgtcaacagagactaagttagtcgtggacacatcaagaggggaaaggctacgagtaaattttgatattacttttccgagcattccttgcacactcctcagcgttgatacaacggatattagtggagagcagcatcatgacattaggcatgacatcgagaaaagaagattaaattcacatggtaatgttattgaagcaagaaaagaaggcattggcggagcaaaggtcgagaggccgttgcaaaaacatggaggaaggcttgacaaaggtgaacaatattgtggcacgtgttatggtgctgaagagtcggatgagcaatgctgtaattcttgcgaagaagtcagggaagcatataagaagaaagggtgggctctaacaaatcctgacctaattgaccagtgtgcaagagaggattttattgatagagttaaaactcagcaagatgaaggttgcaatgtccttggctttttagatgtcagtaaagttgctggaaattttcacttcgccccaggcaaaggattttatgaatcaaacatagatgtgcctgagctgtcattacttgagggtggtttcaacattagccacaaaataaacaaactgtcctttgggacagaattccctggtgttgttaatccacttgatggtgctcagtggacacagccagcttcagatgggacataccagtatttcataaaagttgtccctacaatatacactgatattagaggacgcggtattcattcaaaccagttctcggtaacggaacattttagagatggaaatgttcgtccgaaatcccaacctggagtatttttcttctatgatttctcacctataaaggtgatattcacagaagaaaatagatccctactccactacctgacaaacctttgtgctatagtgggaggtgtgttcaccgttctggtatcattgactcgttcatataccatggacagaaggcgctcaagaagaaaatggagttaggcaaatacagatgatcaacttggaccttgtactggccccgtcgtttccaaattttgaggcatgtaaggagcttatatgcctgctaaacatgacgagtaccacttaagtcggagactgcaaggccatcaaactgatgttattgcacattagctgatcagataacttgtaaaatgacaaggaatagcctggtctgaggggtgggtgccggtgtgtgtgggtgtgtgctttgatgcctatcattgttgactgttgttgaatgacatgtttgaaggtggataggtcagatcacagaatgtttctcatgaaagtttgttcaaggaaacagcttcactc

SEQ ID NO: 13533 - DNA, 881 bp, Zea mays
  Clone ID: LIB143-001-D11_FLI
cgacgagggcggggaggaagacgacgaaggcgaggatgagcggatgacgggtacctcaagggcgtcgtcaccgacgtcatccacgaccccggccgtggcgcgccgctcgccaaggtcactttccgccacccattcaggtacaagcaccagaaggagctctttgtcgcagccgagggcatgtacacgggccagttcgtctactgcggtcgccgcgccaccctctccatcggcaacgtgctgcccctccgcgggatccctgagggtgccgtcgtctgcaacgtcgagcaccacgtcggtgaccgcggtgtcttcgccagggcctctggggactacgccattgtgatcagccacaaccctgacaacggcacatcgaggattaagctgccctctggcgccaagaagattgtccccagcagctgccgtgctatgattgggcaggttgctggtggaggcaggactgagaagccgatgctcaaggctggtaacgcgtaccacaagtaccgtgtgaagaggaacagctggcccaaggtgcgtggtgtggccatgaaccctgtggagcatccccacggaggaggtaaccaccaacacatcggtcacgcctctactgtccgccgagacgctccccctggccagaaggttggtctcattgccgctaggaggactggaaggctcaggggtcaagctgctgccacagcctccaaggctgacaaggccacctagagttattgtcgttgtttatctgtctactgtgctttagattgttaaaggacatgtgtttcagaacggatgtgttgttgcctcgtactatggtgaaacattgtctcagtttttgtggtcgctgtcaggattttgcattatgcctaaagatgtttactttggat

SEQ ID NO: 13534 - DNA, 677 bp, Zea mays
  Clone ID: LIB143-001-D3_FLI
gagcctggaggggcggtacgacgtggtggtgtgcctggacgtgctcatccactacccgcgggaggaggcgcgcgccatgatccgccacctcgcgtcgctggcggacaagcggctgctcatcagcttcgcgcccaggacgctctacttcgacttcctcaagcgcgtgggcgagctgttcccgggcccgtcaaaggccacgcgcgcctacctgcacgccgaggccgacatcgaggacgcgctccgccaggccggctggcgcgtcgctaaccgcggcttcatctccacgcagttctacttcgccaagctcttcgacgccgtgcccgtcggctcctcgacgtagccgtgtaggccgcccgccgtgtgcttgtgtgtttgtttgcctcacgcgactgtttatagagctccagacggtcgccgcagcgcgcgcggcggcgtagcctgtttgtacttgcaagctcactcagttccattccgtagcttgatgccttgattgattcccacgtagacttccatcgacaaacacaattgcagggttttgagtttttgacccaaacgacacgacaaagagttcttatcatccaggggcctcgaccaccgtgctcgttttacaaaagctgtaattaaagactactttgcaagattatccatattttatgtgatatggctttcgatttttc

SEQ ID NO: 13535 - DNA, 1171 bp, Zea mays
  Clone ID: LIB143-001-E8_FLI
ttaaaccttccgtacccatatccacctgctgctccgaccttccagtcttctccgtaggggcttcgctccatagatttcgccgcaaggggcaacggcacacccaccaactgacctgacccacgagggatccgcagatgaagatcattccggtcccttgcctggatgacaactatgcctacttaatcgtggacgagagcaccaagaaggcagcggccgttgaccctgtggaaccggagaaggttctcaaggcggccggcgaggtcggcgcctacgtcgactgcgttctcaccacccatcaccactgggatcatgctggtggcaatgagaagatgaggctgcaggtgccagggataaaggtatttggaggatccctggacaatgtgaaaggctgcactgatcaggtggagaatggaatgaagttgtcacttgggaaggacattgagatactatgcctacacacgccttgccacactaaaggtcatatcagctactatgttactagtaaggagggtgaagatccagcggtcttcaccggagataccttgttcattgctgggtgtgggaagttttttgagggttctgcagagcaaatgtatcagtcccttattgttacactgggttcgctgccaaagtcaacccgagtttactgtgggcatgagtacactgtgaagaacctaaaattcatgctgacactggagccagagaatgagaagacgaaacagaaactggaatgggctgaaaagcagcgcgaagcgaatcagccaacagtgccctcgactataggagatgagtttgagataaatactttcatgcgtgttgatctaccagaaatacaggcgaaattcagtgtcaactctccagttgaagcaatgagagaggtcaggaagaccaaggataattggagaggttgaggacacccatggccgccactagtctgttgaaccagcattccaaagtgaactaatgcagaaaccttgccctgtaggtgggaatgaggtttactgccgtgcaatgctttgagaaatgtgttgttgtgaaggagaagactcctacaataagctccgcgttaatgagtagtaacaatacgctccttgtaacttgtggtctgtttgccaataataatgtacgaactgtagtgcctatcttgaaaatatgaagagctataatgggt

SEQ ID NO: 13536 - DNA, 966 bp, Zea mays
  Clone ID: LIB143-001-F4_FLI
gaaatattcttcccgtcgaaagacggagagaggaaaagggacaagggcaaggcaagagagaggcgtcgtcgtttgatctgctgccggagtgcgaagaggaagaggaagaggagcgccggagttgtaaagatgttcctggtggactggttctatggggtgctggcatcgcttgggctgtggcagaaggaggctaagatcctcttccttggcctcgacaacgccggcaagaccaccctcctccacatgctgaaggacgagcggctcgtacagcaccagccgacgcagtaccccacgtcagaagagttgagcatcggcaggatcaagttcaaggcgttcgaccttgggggccaccagatcgcccgccgcgtctggaaggactactacgccaaggttgatgctgttgtgtacttggtggatgctgttgacaaggaacgttttgccgagtcgaagaaggagcttgatgcgcttcttgcagatgactcccttgcaaacgttcctttcctcatactgggcaacaagattgacatcccatacgcggcttcagaggaggagctgaggtactacctcggcctgagcaacttcacaaccgggaagggcaacgtgaacttggccgactccaatgtccggcccctggagatcttcatgtgcagtgtggtgcgcaagatgggctatggcgaaggcttcaaatggatgtctcagtacatcaagtgagtcgctgctgtcctcttttgtccatggcgctgctgctttcgcaggagggttgaaatcaagtctggtcgtgacatggcagctgcatggaaaggtttatggtagctagtgataggcaaagcttgtaagtcggtgttaatcctagatatgtgatgtggggtctactttctcttctgattgtttcttggggtggtctaaacggttaaaaaaaatgcgacttcttcgggtcagctagaagttatgtaatcacgttacatg

SEQ ID NO: 13537 - DNA, 2106 bp, Zea mays
  Clone ID: LIB143-001-H4_FLI
gttagattcatggcaagggagatacagatattaagaagacttgatcatccaaatgtcatgaaactggaaggtttgattacttcccgactatcatgcagcctttatctagtatttgaatacatggagcacgatcttgctggactttgctcctccccggacatcagattcactgaagcacagctcaagtgctacatgaaccagttactgtcaggactggagcattgtcattcacgccgtgtggttcatcgtgatatgaagggcgctaatctcctcgtgaataacgaaggggttctaaagatagctgattttggacttgcaaatttctttgatcccaacaaaaaccatcctctaaccagccgtgttgttactctgtggtatcgaccacctgaactgctactaggttcaactcactatgatgcagctgtcgatttgtggagtcttgggtgtgtatttgccgagatgtatcgtgggaaacctatcctgcagggaagaaccgaggtggaacaactacacaagatttttaagctatgcggttcacctgctgatgattattggaagaagtcgaagttgcctcatgcaacagtatttaaaccgcatcatccatatcccagtacccttcgagatgtttttaaagaggtaccagaaaatgccttgagtttactagaaactctcctatcggtggagccctacaagcgtggtactgcatctagtgctctttcttctgagtttttcaggacaaaaccttatgcttgtgaaccatcgagcttgcctaagtacgcacccaacaaggagatggacgcaaagttacgagatgatgcactcagaaggaaagctagtagcagagggcatggggcagaagcatcgaagaagtcttcaaggatcagcagagcagcaagagaacacactgcagtccctaagcagataaataacgcagaggaacccaaaaacaacgtgaacgcaaccagagatggcacaacactacaggatcgcacgaaactgtcactgaacggcgacgctaggctattcgcggacatacagccagtgccagcggctcaagtgaaaggaagcgctcgtgacgctaagaacgaatcacgagaggaaatgcccttctcagggccactgagtgtcccttcctctagtggcttcgcatgggcggcggcccaaagaccgcaggaggaccgtgctctcgctaggtcacggaccagatccagctcaagaggccagtttcctgcagcagaggccgaccgggactgtactaggacccaagccaccacagagagtgctgctggccacagggagctgcctagcagcagagacatgccacgcgtcggctccaaggtccgggagccggagcctcacgacgcggcgaagcgcgcggtcctgcggaagtggtcgcagctagagcgcccggactcgttcgactcctgcgacacttaccactcccagaacttctcccacgccatgctcgttggtggtggtgctctctcgtcgaagaacagcttcgagggcggtcatggtcatggtcaggaggagaaggccgagtactcggggcctttgttgtcccagtcgcacaaggtcgacgagctgttgcagaagaacgagcgccatatccggcaggctgttcgaacgtcatggttcaggagaggaggaagaaaggaggacaagtgaggaaacgcttgacggttcctttccatggtggaagtgggggggagcatgtctgatgggcctctgctgccagtctgggaagtggacaactggtgctgacgattccattgtttaactggaaacagaatggactttggtggtcccagctcacagcaaaattttagcctcttttttttcctggcgtgtgttgcagattgcccggagacgccagtgctctatccgttttggctgtacaaaagaaacagtagcggctgacgcggcagttgtgtagttggttggaaccgataagctggcagcaccacgtggtgcgagcgactgtagtaaacattacaggctggttggttcatggctaactacgacacactttgtctaacgttagttgttcgaattgaaaaactaatattagttaaaaatattagacagtaacttaaatagcgaacc

SEQ ID NO: 13538 - DNA, 1678 bp, Zea mays; identical to SEQ ID NO: 4238
  Clone ID: LIB143-002-A7_FLI

SEQ ID NO: 13539 - DNA, 2011 bp, Zea mays
  Clone ID: LIB143-002-B12_FLI
tcctaaaaccctaacccctagccagcgctccgccgccatccgccggcgagatggcgttgtacctgctgttcgagtcggcctccggctacggcctattccatgcgtacggtatcgatgagatcgggcagagcgttgaggccgtgcgctcctccgtgctggacctcgaccgcttcggcaaggccgtcaagctcactgccttcaatcctttctcctctgccgtcgacgcgctcaaccagtgcaacgctatctctgaaggaatcatgaccgatgagttgaggagcttcctggagctgaacctgccgaagcctaaggaggggaagaaggccaaatacagcctcggcgttgtcgagcccaaggtcggctcccacatctccgaggtcaccggcatcccctgtcagagcaacgagttcgtccaggagctgctccgcggtgtccgcctccacttcgaccgtttcatcaacgagcttaaggattctgacttggagaaggcccaacttggcctggggcatagctacagcagggctaaggtgaagttcaatgtgaatcgtgttgataacatggtgatccaagcaatatttctgctggatacacttgacaaggacatcaattccttctccatgagagtcagggaatggttctcatggcacttccctgagcttgtcaagattgtgaatgacaattacctttatgccaagcttgctaagtttattgtgaacaaatctgatttggcggaaaaagatatcccagctttggctgatatagttggtgatgaggacaaggctaaagaaattgttgaagcagcaaaggcttcaatgggccaggatctgtcaccagttgatttgatcaatgtccagcaatttgcccaaagggttatgaatctctctgagtatcgcaaaaacctttatgaatatctcgtgactaagatgaatgatattgcgcccaacctgacatcattgattggtgaagtagttggagctcgcctaatctctcatgctggcagtctttcaaaccttgccaagtgtgcagcttccacccttcaaatacttggtgctgagaaggccctattcagagcactgaaaactcgagggaatactccaaagtatgggcttatattccactcctcctttattggccgtgcttcaaccaagaacaagggcagaatggctcgttacctggcaaacaaatgctcgattgcttcacgcattgactgctactcggaggctagtacctctgtctttgggcaaaagttgcgcgagcaagtcgaggagagactggaattctatgacaagggtgttgcgcctcgtaaaaatcttgatgtgatgaaagctgctattgacagtatggtcaatgacaccttaatggatgatgatggtaaggcagataatgagaaggcggacacatctgccaagaaaagcaagaaaaagaagaccaaaaccgagactgatggtgatgcaatggatgtggataagccctccaacgtggctgatggagaagctgagcttggaaccgagaagaagaaaaagaaaaagaagcacaagctagaggaggcacaggaggagaacggtgcagcacatgctaatggcgacgctgaagagacccagactcccaagaagaagaaaaagaagagccgtgaaatttcggaggaagctgaacctaagacagccactgaggggaagaagaagaaaaatgaagaagctgaacctaagacagccaccgaggggaagaagaagaaaaagaaggcagtcaaggctgatgaatgacaagctatttgttgtatgtcagtacaaatcctagtatttgttgaaaaccgagataagcacctagcttctagttcatgaggtgtacgatgcaattcaattcaactatgaagttctgcaatccaactcaactacgaagttctatcgtctctagcttgattgtaatttttttatgagggtgcggttggataagcaaatagcttggtgagttggcgttcgattgttatattgagtgagaactgagatttgaaggc

SEQ ID NO: 13540 - DNA, 1239 bp, Zea mays
  Clone ID: LIB143-002-C4_FLI
attacatgtttcgatccgggtcactgcgcggtaggcccggctggtgatgtggggctcggttcggttcttcgtcgcgttgctttcttcctttcctccccttcccctcccacgtacgccggtcgccggcacgcgctcgtgacgcgcaagtcgcaggtcgcagcaaccgtaacgcgccgcgagcccgcatggcggcctgactcggcgccacgcgtttgctcctccggccaccatcctggctccttccttgtcgccgtttcctcggctatatagccgccagcctggcggaaggagaacggccaaaccagcacccgccgcccacaggaacatcgccgcccagatcggctgcatacctgttcttcttctgggcgccggagttcgcatcgtcggctcgtcgttcggtaacttgggggagcaatgggaggagggaaagacaagcatgacgagagcgacaaggggctcttctcaaacttgatgcacggcgttgccggtggccatgggtaccccccgcagggataccctccgcagggctacccaccgcaaccaggagcatacccacctcccccaggggcgtatcctcctccacccggcgcatacccaccacaatatgggtaccctcagccgggtggctacccacctcaaggtggatatcctcctgcaggctaccccggctcatctcaccagggttatgggagcagccactccgggggccacatggggacgggggcaatgctagctggaggtgccgccgccgccgctgctgcttacggagcacacaagctttctcatggccatagcggacacggtggacatgggccctttggaggccatggtcgtggtcgtggtggttatggccgtggtcgtggccaccacggcaagttcaagcatggcaagcatggacacggcatgttcggcggcaagttcaagaagtggaagtgatgtgttgatcgtagctagcggtggtaatggatcacgatttaaatgtttcttcacaatatgttagagaccgtaaataattttaatttaaaaatgaatagaaatatagctcgatcctaatcagatttgatctttaaattttatagtgtaaaatttatggcacattaccatccctaatggtagctgaattcaggcttctaggacatgtgttgccaggaatgccttttcagtatctatgtctgcagtaatctagattgtggcaagtgacatattgctaataagtgacataaataaccatttgctggt

SEQ ID NO: 13541 - DNA, 212 bp, Zea mays
  Clone ID: LIB143-002-D12_FLI
gtcccttttataaaaaaaaactgttgtataccattatttcgttagttacacttaacggtgttaagtgggtgtttgtcactgctctaggtttcaacttgagtgtgaagatgatgtgtttgcaatacttccatcgttaatatggtatgcttataatacccttataaacttttgtaaacactaccacctccaagcgagaagacatatccacttat

SEQ ID NO: 13542 - DNA, 1419 bp, Zea mays
  Clone ID: LIB143-002-E1_FLI
ccgcaccgtccccgctcctttgccggcgtcgcgcccaggcgcggcccctcccagcaagtcgcctccctccgcctacccgcgtcgccgtgcagccccccgccgcgccggtcgcgacgcgcatcggctcctttgacaaggtgctggaggcgctgatcggcgggaccgacttctccgaggaggatgcggaggcgacgctgaagctgctgctggacgagaaggacgaggcgcgcatctccgccttcctcgtcctcctcagggccaagggcgagaccttcgaagagatcgtggggcttgcgaaggcgatgttgagctgctgcatccgagtcgatggtctggatgacgccgtcgacattgtcgggacaggcggcgacggcgcagacaccgtcaacatctccaccgggtccaccatcctcgccgccgcggccggcgccaaggtcgctaagcaaggaagcagggctagctcgtcggcgtgcggcagcgccgatgtgctggaggcgcttggggtcaacatcgagcttggacccgagggtattaaacaatgtgtcaatgaggtgggtgttggattcatgatgtctgcaaattatcatcctgcaatgaaaattgtcagacctgtgaggaagaagcttaaaataaagacagttttcaatatccttggtcctctactgaatccagcaagggtgcctcatgctgttattggtgtttaccatgagaatatagttaccaagatggctaaggctgctcagaaatttggaatgaagagagcattggtcgtccattcaaagggtttggatgaaataagcccacttggtcccggatatatccttgatgttactccagagaagattgaaaaaatgttcttcgatccattggattttggcattcctcgctgcacattggaagatctgaaaggaggcgatccagcgtttaatgcaaaagttctccaggatgttcttgctggtcaaaggggggcgattgcagatgcccttgttctaaatgccgcggcgtccctacttgtcagtggtaaagtgaaaaatttacatgacggtgttgctttagcacaggagacacagcggtccgggaaagccattaatacacttgagtcttggataaaaaaatcaaatagttccagagactgagtgaagttgagtggcaatagatggatttctgcaataagacatgaggaatggtagcaaataagggctccgctgagtccatccatcatccgtgtatgattagctttcttctcgtgttttgttcatgatttgtgtcagaaacctaggtggcatgggaagattatacccatttgtaatgggggagaatcaaggcttaaacatttctacaataacgtgcgaagagttgcccccattggtaacgcatgtcctgaaatatgaataaagctgcaggcagttgatattttgc

SEQ ID NO: 13543 - DNA, 664 bp, Zea mays
  Clone ID: LIB143-002-F10_FLI
tggcacgataaatagtaacaccaaggaaggagataatgagaaggggggcactgaagaggatgatgaacctgttgtagtagttgccaaaatgtgggagaacagcaagtttgctgactatgattcatctaaggagaaggacaatgatggtgactcacaggttgatttggaatcaaacaagggggatgcaggtcttgacagcaatgggttgcactcaactaaggagaacagtggcagggcatcaccaactaaacagcaccagcagtataagaagaagcctttgctgaagagattcggtggtctgctaaaaaagaaaagcgaaaattagcataaaaccgtctgatgatattctttgttctatcatttgacatatttctttgattagatatctagttcctgagtcttcccccatattatggtaaactaagtgatggatgcttcaaagaatacaaaatgtcgactttatttacataatggcctcgcttgggttagggagtgttcgcagttcagttcagctgtctggtgtggaaaaactgttttgagctgtctgccgtaaaaaaaaaaactaaaagaaagtcgtttggttcgagcttcggtgaaacattagattttttatgatttatctgtattgcttctgagattgtttatatgcaaatgaccgtaatac

SEQ ID NO: 13544 - DNA, 868 bp, Zea mays
  Clone ID: LIB143-002-G4_FLI
tttgaagcagaagaaggctcacctcatggagatccaggtcaacggtggcactatagcagacaaggtggactatggttacaagttctttgagaaggaggtccctgttgatgctgtgttccagaaggacgagatgatcgacatcatcggagttaccaagggcaagggttatgaaggcgtggtcactcgctggggtgttacccggcttccccgcaagacccacaggggcctccgcaaggttgcctgtatcggtgcatggcatcctgctagggtgtcgtacactgttgctcgtgctggtcagaacggataccatcaccgcactgagatgaacaagaaggtttacaagattggcaaggccggacaggaaagccatgacgcctcaactgagtttgacagactgagaaggacatcactcccatgggtggcttcccccactacggtatcatcaagggtgactacctgatgatcaagggttgctgcgtcggccctaagaaaaggtggtgactctccgccagtctctgctgaagcagacctctcggttggccctggaggagatcaagctcaagttcatcgacagtcgacacctcgtccaagtttggacatgggcgcttctagaccacagacgagaagcagaggttctttggcaagctcaaggcctgagttgctgtcttgctgatggtgtcaagcgaaatggaaatgtattaccagatagttttttgtttttcagattcagctttgttggagatatcataagaacatgtttgatttgctagtctgagttgattctattgcgggcggctgaagttatattacttctaatgaactcgaaagtctctgtgattcaagcatcataggcctgagttgatttgtc

SEQ ID NO: 13545 - DNA, 820 bp, Zea mays
  Clone ID: LIB143-003-A10_FLI
cgcttttgctctctccctcccggctctcggcttcttctacacgctaccgtctcacagccgtaaacgcccctcccggatcccgctagttcgccaccgccgcccgcccgcccgccgttcgcctcatcatggccgcctcgtcgaccgccacctccgtccacgacttcatcgtcaaggatgcgagcggcaaagacgttgacctcagcacctacaaggggaaggttcttctcattgttaacgtcgcatcccagtgtggcttaactaactccaactacactgagctggcccagctctacgagaagtacaaggaccaaggctttgaaatcctggctttcccatgcaaccagtttggtgggcaggagcctggtaccaatgaggagattgtccagtttgcctgcacacgcttcaaggctgagtaccccatcttcgacaaggttgacgtcaacggtaacaatgctgcgcccatctacaagttcctgaaatctagcaaaggtggccttttcggcgacagcatcaagtggaacttttccaaattcttggttgacaaggagggacgtgttgtggatcgctatgctccaaccacttcacctctgagcattgagaaggatatcaagaagctgcttgggagctcttaaacaatatctgggtgcaaaactgtagaaaaacatgtatcaacaatgccctgagcgataaaatatatgataagctgtattaataagtattgccgtacttgagaggttgcagtatctgctctatttcccttgcatacactctgtacttgtatatccccttccaatgaattccaatgctgtatcagtttgct

SEQ ID NO: 13546 - DNA, 1724 bp, Zea mays
  Clone ID: LIB143-003-B4_FLI
gcacagacagcagccacagcggagcttaattagcaatcattgactatgggtgcgctcttgccatggctggcatggttgctcgtctccctcgtcggcgtctacctcctcggccatctcgtgcaggcccgtcgtcgtcgtggtctaccgccgggaccccacccgctgcccatcatcggcagcctccacctgctcggtaaccaaccgcaccgctccctcgccaggctcgccaagacccacggcccgctcgtgtcgctccgcctgggctcggtgaccacggtggtcgcctcctccccggccgccgcccgggagatcctgcagcggcacgacgccgccttcagcaacaggtccgtgccggacgccccgggcgcccacgccaggaactccacggtgtggctgcccaacgcgccgcgctggcgcgcgctgcggaagatcatgggcacgcagctgttcgcgccgcacaggctggacgcgctccagcacctccggcgcgacaaggcgcgggagctcgtggaccacgtgcggcggctggcgcgcaggggcgagcccgtgaacgtcggccgcgtcgccttcaccaccagcctcaacctcgtctcgcgcaccatcttctcccgcgacctggccagcctcgaggacgacggcgcgtccaggaagttccaggaggtggtgacggacatcatggaggccgtgggcagccccaacgtctccgacttcttcccggcgctcgccgttgccgacctgcagggctgccggcggcggctggcgcggctgttcgcgcggctgcaccggatcttcgacgaagagatcgacgcgaggctgcgtggccgcgacgctggcgagcccaagaagaacgacttcctcgacctgctgctggacgccgcagaggacgatgacaacacggccggcctggatcgcgacacgctccgttcactcttcacggacttgttttctgctgggagtgacacaagctccagctcagtggaatgggcaatggtggagctgcttcgaagcccgggttcaatggctaaagcatgcgacgagcttgcaacagtcatcggcccaagaaaagacatcgaggaatctgatattgggcggctgccctacctccaagccgtggtgaaagagaccttcagactgcatcctgctgccccgctgttgctaccgcggcgtgcccaggccgacgtgaagatgatgggctacgtgattcccgaagggtctcgagtgttcgtaaacgtatgggcgatgggccgagacgaggagacgtggcctgagcctgagaagtttatgcccgagaggttcctggggaagaagaagacgcaggcggttgatctcaggggcggggacttcgatctcatcccgttcggtggaggacgccggatctgccctgggatgccgctggcgatcaggatggtgcatctgctgcttgcgtcgctcttgaatcagtttgcatggaggcttccggctgagctagagaggaatggagttgacatggctgagaatttcggcatcacgttgaccaaggccgtgcctctttgtgccatagccacagagatctgagtcggcaagctattctattctagttaactatttcgaaataaacttagtaaataggtcagagaatgtttggtttgaagaattaatctattctacatggagtgagtgatgcatcatgattcatgaatccattctacatatttggtgtaatgaactcgttactcgtgttcact

SEQ ID NO: 13547 - DNA, 1839 bp, Zea mays
  Clone ID: LIB143-003-C12_FLI
caatagttcgtcatctccaagtgcgtgcgccggccgccccctatcccgccggccctgtgtgtgttccccgctaccagccatggcgtcgccgttctccgtgccttcgctgatcatggaggaggaagggcggttcgaggcggaggtggcggaggtggagtcgtggtggggcacggagcggttccggctcaccaagcgcccctacaccgcccgcgacgtggtcctcctccggggcacgctccggcagagctacgcgtcgggggagatggccaagaagctgtggcgcacgctcaaggcgcgcatgtcgctgccccgcgccgagcgcgcgcgggcgccgtacgtcgacttcctcaagcccatcatcgccgacggcgacacgggcttcggcggcgccacggccaccgtcaagctctgcaagctcttcgtggagcgcggggcggccggggtccacctcgaggaccagtcctccgtcaccaagaagtgcggccacatggcgggcaaggtgctcgtcgccgtctccgagcacgtgaaccgcctcgtcgccgcgcggctccagttcgacgtcatgggcgtcgagaccgtcctcgtcgcgcgcaccgacgccgtcgccgccacgctcatccagaccaacgtcgacgcgcgcgaccaccagttcatagtcggcgccaccaacccgggcctcaggggccagagcctcgcggccgtgctgtcggccggcatgtcggcgggcaagagcggcagggagctccaggccatcgaggacgagtggctggccgcggcgcggctcaagaccttctccgagtgcgtcagggacgccatcgcgggcctcggcgtcgcgggccaggagaagcagcgcaggctccaggagtgggaccgcgccaccggcggctacgacaggtgcgtgtccaacgaccaggcgcgcgacatcgccgccagcctcggcgtcacgtccgtgttctgggactgggacctgccgcggaccagggaagggttctaccgcttcagggggtccgtggcggcggccgtggtccggggccgcgccttcgcgccgcacgccgacgtgctgtggatggagacgtccagccccaacgtggccgagtgcaccgccttcgccgagggcgtcaaggcggcgtgccccgaggcgatgctcgcctacaacctctcgccgtccttcaactgggacgcgtctgggatgacggacgccgagatggccgccttcatcccgagcgtcgcgcgcctcggctacgtctggcagttcatcacgctcgccgggttccacgccgacgcgctcgtcaccgacacgttcgcgcgggacttcgcacgccgcggcatgctggcctacgtggagaggatccagagggaggagaggatcaacggcgtggagacgctggagcatcagaagtggtcgggcgccaatttctacgacagggtgctcaaggctgtgcagggtggcatctcctcgactgcagccatgggcaaaggagttactgaagagcagttcaaggatccacggcccgcaactgggagcagtggcctgcaagttatggccaaatccaggatttgatgaagactcagaagaagaagaatgatttggagaaggctctaaataaattcgaaaaaaaaataagctgggttcagttcatcagcaatggggaagctgctttccaagttctaaactgaacataatcagcataaatgaatcaacgaatcgtctagctagctacgtacggatggagttctgagttgtgactccaaatgaaaacccaggttgggttgaaagtattggtgtcaatctgtgagattatttatcacttcagattgaatatatgatttggttttggt

SEQ ID NO: 13548 - DNA, 509 bp, Zea mays
  Clone ID: LIB143-003-C5_FLI
aagcccgcagtaaatttgatgtggaaacagagccgcctaatgcagttgagattgaaccagcgaacggttttctaaactcggaagggctggcatcactgaagttcagaaggatatcatcatccttgtcaatgggaaggataaactgcaaggtttactactgtaaagaagatgaagtttgtctctaccaatcgattgcttttgatgtcaaattccgtgaagaggcggaaccgaacccagcacaaattacgctatcctatactgtttcgccaagagataattcaggtagcacacaactactggctgctagaaagaatgccaaggtgtagtcagactcacggtgatttttttttacttgcatcattgtattgattgtcaatttggccccaggcccacaatggcaagtgtttcaagattgacttctcctgtatgttgtatagcgacatgttgcttgtaacccagcttcattgtctcccctcagcacaacagtattaatggagtagtttattttc

SEQ ID NO: 13549 - DNA, 1495 bp, Zea mays
  Clone ID: LIB143-003-D10_FLI
cgtttgcctcttctccctcttgccggtcccgaataaagagcagcagcgcaagaggtcggtagagcgagaagaaggcaatggcggccgagagcttccttttcacctcggagtccgtgaacgaggggcaccccgacaagctgtgcgaccaggtgtcggacgccgtgcttgacgcatgcctcgcgcaggaccccgacagcaaggtggcctgcgagacctgcaccaagaccaacatggtgatggtgttcggcgagatcacgaccaaggcgaccgtggactacgagaagatcgtgcgcgacacctgccgcgagatcgggttcacctccgacgacgtgggcctcgacgccgaccgctgcaaggtgctggtgaacatcgagcagcagtcccccgacatcgcgcagggcgtgcacgggcacttcacgaagcggcccgaggagatcggcgcgggcgaccagggccacatgttcgggtacgccaccgacgagacccccgagctgatgccgctgagccacgtgctggccaccaagctgggcgcgcgcctcaccgaggtgcgcaagaacggcacctgcgcctggctgaggcccgacggcaagacccaggtgacggtggagtacgtgaacgagggcggcgccatggtgcccgtccgcgtgcacaccgtgctcatctccacccagcacgacgagaccgtcaccaacgacgagatcgccgccgacctcaaggagcacgtcatcaagcccgtgatccctgagaagtacctcgacgagaagaccatcttccacctcaacccgtccgggcgcttcgtcatcggcgggccccacggtgacgccggcctcaccggccgcaagatcatcatcgacacgtacggcggctggggagcccacggcggtggcgccttctccggcaaggaccccaccaaggtggaccgcagcggcgcctacgtggccaggcaggccgccaagagcatcgtggccagcggcctcgcccgccgctgcctcgtgcaggtgtcgtacgccatcggcgtgccggagcccctgtccgtgttcgtcaactcgtacggcaccggcacgatccccgacaaggagatcctcaagatcgtgaaggagaacttcgacttcaggcccgggatgatcagcatcaacctcgacctgaagaagggcggcaacaggttcatcaagaccgccgcctacggccacttcggccgtgacgacgccgacttcacctgggaggtggtgaagcccctcaagttcgacaaggcatcggcttaaggttgggagtgtcactgtggacatgaggactaccttcctctggctctgctgttacctgcaagcattgctgctgctggatgtgtgtgtttgatcagtgactggctgctgctccatagaagatgaacggagagaaggatgatgaagggctttggcaatcgccgctgcaactgcaacccatgccatgccggcttagtgattgggtataatttggcttggcagcagccagcattatt

SEQ ID NO: 13550 - DNA, 1362 bp, Zea mays
  Clone ID: LIB143-013-C7_FLI
ccaccgtcactcaacacagcacaggcagctcgagagagagagagagagaaagatgtcgtggttcgggcaccaccaccacaaccagccggctcccccggcgtcgggccccaaccaggtgttcaagatcttctgccgcgccaacgagaactactgcctggccgtccgcgacggcgccgtcgtgctggccccggtcaaccccaaggacgaccaccagcactggtacaaggacatgcgcttcagcacccgggtcaaggacgaggaaggcatgccggcgttcgcgctcgtcaacaaggccacggggctcgcaatcaagcactccctcggccagtcccacccggtcaagctcgcgcctttcagcccggaccaggaggacgcgtcggtgctgtggacggagagcaaggacgtgggcaagggcttccgctgcatccgcatggtcaacaacacccgcctcaacttcgacgccttccacggcgacaaggaccacggcggcgtgcacgacggcaccgccgtcgtgctctgggagtggtgcaagggcgagaaccagagctggaagatcctgccgtggggtcccgaggccaactcctccgcggcccacgcgggaggcccgcacgccgtgcgcgtcttctgcaaggccggcggcgaggactacagcctcacggtgcgcaacggcacggcgtgcctggcgcccaccaacccgcgggacgagtaccagcactgggtcaaggacatgcgccacagcacccgggtgcgggacgaggagggctacccggccttcgcgctcgtcaacaaggtcaccggcgaggcgctcaagcactccacggggcagggccaccccgtcaagctcgtgccctacaacccggactaccaggacgagtccgtgctctggaccgagagccgcgacgtcggcaacggcttccgctgcgtccgcatggtcaacaacatctacctcaacttcgacgccttccacggcgacaaggcccacggcggcgtccatgacggtaccgagatcgtgctctggaagtggtgcgagggcgacaaccagcgctggaagatcctcccttggtgaacgaacgaaagaaactactagctggtaccctaataataattctgctggctgcggcgatcccaaaataaaagaggccgggtgcgatgcatctcggacttctcgagtggtgtttgcgtcagacagccagccactgtggggctagtgttccaacatttgtcagcctgcttgcgcgaggaaggggggtcactgactcaagagaagggcctggtcataggctgctgcattatgaatttctgatgatgtcttatgtctgtactctgaatcaactatgtatgagatctcatctcctttctcct

SEQ ID NO: 13551 - DNA, 448 bp, Zea mays
  Clone ID: LIB143-018-E5_FLI
aggagccacccaaggagaagcccccgccacctaaggaggagccgcccaaggagaagccacccccgcccaaggaggagccgcccaaggagaagcccgccccggcaccgcccaaggaggagaagcccgccccgccgccacccaaggtggtggaggtcccctacccgtggccgtacccgtacccgtaccctgcgtggccgtccgactgctgctgccaccacggccacggcgggtgccactgctgctcctgcggcaaggcccccgagccggtcccggcccccgccccggccccacccccgccgcagtacttcccgcagtacatgccccagccgtacccctgcaacccctgcggcggcggctaccggatcgtctgcgaggaggacccctcctacgcctgcgccatcatgtgattcgtttattatcaatatcatcccttgatgagtgtaccgtc

SEQ ID NO: 13552 - DNA, 820 bp, Zea mays
  Clone ID: LIB143-018-F1_FLI
agctaagcaagtgccaaccaacgagtagcaggaaacatgtctccgcccgtcaagatcctcggccactacgcgagcccgtactcgcaccgcgtcgaggccgctctgcggctcaagggcgtgccgtacgagctggtccaggaagacctgggcaacaagagcgagctgctgctcgccaagaaccctgtccacaagaaggtgcccgtgctcctccatggcgacagggccgtctgcgagtccctcctcatcgtcgagtacgtcgacgaggccttcgacgggccgtccatcctgccggccgacccccacgaccgtgccgtcgcccgtttctgggcgaacttcttggacaccaagttctcccagccgttctggctggcgtactgggcggagggcgaggcgcagaaggccgtggtgaaggaggccaaggagaacctggcgctcctggaggcgcagctcggcgggaagagcttcttcggcggcgacacgcccgggtacctcgacatagccgcgtgcgcgttgggtccttggatcggcgtgctcgaggaggtgactggagtggccttgctggacgccgacgagttccccgctctatgccagtgggccagggactacagctccagtgaagcgctcaggccatgcctgccggacagggaccgactcgttgcctacttcaccgagaacaaggagaagtacaagacatttgccaaggcaacgttgcatcagtagctgctagttgggtgcaaaccgcttgtttatctctgtgtggaataatgtatacgtacgtgctccctcgatatcaaataaatcagctaccggagttgactgt

SEQ ID NO: 13553 - DNA, 739 bp, Zea mays
  Clone ID: LIB143-018-F2_FLI
gcgccggcgaaggcggcgaccccgaggtccaggagcttcctccgccggagccgacgaggtttgccttcgccaccgcggccaaggcagcagttgatggcgtgatgacgacgactccaaaggatgtcaaaggagatagaccagtaaagcgcggccggaagaaccagtacaggggaatccggcagcgcccttggggcaaatgggcagctgagatcagggaccctaacaagggcgtccgcgtctggctcggaacctacaacaccgccgaggaggcagctagggcatacgacgccgaagctcgcaagatccgcggcaagaaagcgaaggtgaatttccccgatgacgacgcgccaggcactggtcacaggccagcgaacgcagcgcctaggctagtagctccacccccaccccccaaggcctgcgccgatgagatctttaacaacctgaagaacgacgacgacgacaacaacaacaacaacgatgatctgtttgcgatgtttgcgttcggtgacaataagaagaaggttcctgcagcgaagccagccgccgccgagggtggcagtggcagtggcagcttcctcgtccctgcgcctgcggtggcggtggtgcccggtaataagaggaggtcgtccgcgaccaacactatgctctccgtctccgacgaccagcgcagcaactcctacggctccggctcctccgacttggtggggtcgtggtcgtgggacgacgacgcggcggccgc

SEQ ID NO: 13554 - DNA, 945 bp, Zea mays
  Clone ID: LIB143-018-F6_FLI
caatcaccatgggagatcaatctggctctagaaatggaccacaacagaagtacgtttcaggagcccagaatgcctgggatatgttctctgatgagctgtcacagaaacacatcactactggttctggtgacctcaatgacatacttggtggcgggattcactgcaaagaagttactgagatcggtggcgtcccaggggttggtaaaactcaactggggattcaactagcaatcaatgtacaaatcccagtggaatgtggtggccttggtgggaaagcagtttatatagattgctgaagggtgtattagggacatactggagcactttccgcacagccatgagaagtcctcttctgtccaaaaacaattacagcctgagcgtttcctggcggatatctattacttccggatatgcagttacaccgaacaaattgcagtcataaactacatggagaagttcctcagagagcataaagatgtgcgtatagttattattgatagtgttactttccactttcgacaagattttgaagatctggcactgaggaccagagtgctaagtggattatcattgaagttaatgaagattgcaaagacatataacttggcagttgtcttgttgaaccaagtcactactaaatttacagaagggtcatttcaattgactcttgctctaggtcagttttgtgtcatacaagtataatcctccattccttcttcatcttcgaatcagtactggatgtttgtggtcattattgctcacagagcagcaggaagttagcaccaagaatttccttgcttttgttaccaaggttgcctttctgttctggttctgggcacacgtttccagtgaccaagtcaaaatggcaagcatttactaattgcagccgaaacttcggtaccgtgataatgtggggtggatgaaattatctaggcaaatcgtact

SEQ ID NO: 13555 - DNA, 957 bp, Zea mays
  Clone ID: LIB143-019-C12_FLI
tcaacttctaaaggaaagaggtgagaacattccagcagaagaatcttttgatgtagcaagaaggattaaagaaatgtactgctatacttcttcggacattgtgaaggaattcaataaacatgacaaggagccatcaaagtacattaaacactggacgggcactaaaccgaagactggtgcaaaatacacatgtgacattggatatgagcgattcctagggcctgagatcttcttcaacccagagatatataacaacgacttcaccactcctttgcaagttgttattgacaagtgcatccaatcatctccaatcgacacaaggagggctctttataagaatattgtcctgtctggaggctcgactatgttcaaagatttccacaggaggttacagcgggacctaaagaagatagtggatgcacgggtccgtgcatctaatagccggcttattagtggggatgctaaggcccagcctatagaagtgaacgtggtcagtcatccgatccagagatatgcggtatggtttggtggctctgtgcttgcttcaactgccgaattctacgaggcttgccacacaaaggcagagtacgaggagtacggtgccagcatctgccgaacgaatcctgtcttcaaagggatgtactgactcagagcggttccctgtggctgacgtcgtggatgatatccactcaaagcttaaatggggagaagtgacagtggtcgtggagacaggactgtcgagagggatcctgatcgtggggaagcatagccgtacgagctgtacaaaaagagaaagcgcaaatagataggtttatgtttcaccatacaatttagatgctggtaggcctgacaggatgggtttgccacccctgctgaattgggtggcattgtaatttgtagcgtcaacacttctggcggtgcgagattgctccttgtatacatgttgattcggcagcg

SEQ ID NO: 13556 - DNA, 979 bp, Zea mays
  Clone ID: LIB143-019-H10_FLI
tgaccgtgctgcagattgtctgtttgcacggtcaaaggaaagaaaatctagatatataacagaactggagcggaaggttcaaactcttcagacagaggctactactctttcagcgcagctcacactattccagagagacacaactggactttcggcagaaaatgctgagctgaagataaggttgcaggccatggagcagcaggctcaactgcgggatgctctaaacgatgcgctgaagcaagaagtggagaggctcaagatagcgacgggcgagatgccgaagtccaacgaacaattcaacatggggatgcagcacgtctcgtacagcggcccttctttcttccatctcccggagcagcacgtagacattcagctgccgcaccatttccagcagcctccgcggaacgtccagatgctgtcccaccccaactccctctcggatatggcgcagcaagactcgcttgggcggctccgggggctggacattggaaaagggtccatggctatgaagccagaggcagaggtcgtggtgaagtcagagggcagctctgtatctgcaggtgaaagcaacaccaccttctagctatacaatacatctgccttccaagaagcctccgtttggtttagagttcttttgttcatagtctgacatcctccttccttgagctgcttcgtccttctcagtaggcctattttttttattccattggttatatctactagttaacattggtcggttgccaatcgttgttgtcgtggtggctgatttctatagggacattgatgtgttggtttcgagtttgttgttgttgttgtgtgtgtggttggttgtttcgagctaggggctgaaagggcaccgagtgtttttttctccacctgttttagttttgttatagatttgacaacaatcgttatgatttctccttctggaaaggtgtacattgtgttgctatgctaatttgtagtgatatttttgatg

SEQ ID NO: 13557 - DNA, 2509 bp, Zea mays
  Clone ID: LIB143-019-H6_FLI
agactatgacaacctcgataaaaaagaagatacagatgaattcctgacgcctctacagtcaaacgaggttcctggggtgccagctgaaggtgaagtggggcacctgttgcagaacactgagcctgttactgatggtgaccatgttgtcggtgaagaagcgaatcagtttgacaatctcattgcatccgatggtaatcaagatccaccaccacctttgcccatactcgatgctgcaggcccctcggaggaaattcctgatgtagaagaaacatcagatcccaaaatggatttgccagaaaaccagcatttcgatgaaacattaacttcagatgcaatggtgctagattcagatgttgtgcccatccaggacatctctgaaggtgccattgctgctgcatttcacccagaagacaaaggtgtcgagcagaacccacaaactcttgacaaagatgaactttctccatccggattgcctgattatatggaacatgtaagcgccgatgggatgcatccacttggatcaaacgagttatccatggctacaaggaccagtgagacaggagatggggaggaaactatagtagaggatctgtataaaggagaaagtgaattagaaaaccaaaacaaacaattggagtccacaccacctgaccaatatttttcttctcctggaattcctgctccctctgtagtatccactgctttacaggtgcccgcagggccgattgtggttccagcttctgttgacccaacccaggaaaatgctatagctgcattgcagattctaaaggtgatcgaatccagtgctcaagctggtgaattgtgtacccggcgtgagtatgctcgatggttggtagctgcgagcaattgcctttcaaggaacactttctcaaaagtgtatccagcaatgtatattgataatgtcactgaacttgcatttgacgatgtcacacctgaagatcctgattttccattcatacaaggcctagcagaagctggattgatttctagcaagctttcaagatctgatatgaatatcccagaagatgttcatgacaatcatatcttgttttcccctgagagtcctttgtcacgtcaagaccttgtgagttggaaaatggccctggataagagacaactgcctgaagttgacagaaattgtttgttcaaactatctggctacatagacatcgataagataaacacagctgcctggccagctttggctgcagacttggatgctggagaccagagcattacagctcttgccttcggtttcacaagacttttccaaccgaacaaacctgtgacaaagggacaagctgccctagcattttcagctggtgattctggcgaagtggttctggaggaggttgcccgtatcgaggcagagaaaatagctgaagcagctgtaaatgcacatgctgcattggttgctcaggtcgagaaagatcttaatgcaagttttgaaagggagcttaaggaggaaagagaaagggtagagacccttgaaaaagtagctgaagaagctagggtggagctagataggttgagggcagaaagagaggaagagaagaatattctggtcaggggcagagctgctgttgagtctgaaatggaagttctgttgaagttgaggagtgaggtagaggaacagctgcagaacgtactgagcaagaaggtggaggtgtcgttcgagaagagtaggattgagaaactccaaaaggaaattgagagcgataactcggctgttgtgcaacttcagtatgagcttgaagtggagaggaaggcgttatctatggcaagggcttgggcagaggaggaagccaaaaaggcccgggagcatgcacgcgcccttgaggaggcccggaaccaatgggagcgtcaaggaatcagagttgttgtcgaaggagaactgaaggatgacgcctcagctggggtgacatgggctaacgctggcaaagaaaacgcagtcgacgagtctatcaaccaggcagaagctctgctggagaagctcaagacaatgtctggtgagatggaggtgaggtctcggggtgcggtggagagagtgatgcagcatgtgaggtccttcatcgcaatcctaaagcagcaagctgcagatgcaaggcagtggtgtaccgagtttggggcttgtgctgcttccagggcaaacgaggtatcagcacaagtgaagggaagcgtatctgcgtttggtgcaacccttggagacaagtcgaagagggcaatggaagagtgcaaggacggcctggagaggatttcacacagattcaagacagactagataccaattttgttgtttgcttgttttttggggatgatgttgttgcagagttgtttactatagcatgctggaacgaacagtaagtagttcccgaccgtggccttgtggaataagtaagtgcaacgaagcacttgtggccttctggaataagtgtaattaataccaacagtaattaataatagttcccgtttattatattaaaaaaac

SEQ ID NO: 13558 - DNA, 3678 bp, Zea mays
  Clone ID: LIB143-019-H8_FLI
ctttctttctcctcttcgggcgcttcgctgcttgcctgctctgctcgcgacctgcttctcagacccgccctcctcgccggccgcccggcgatgcctcctggccagaggcggcggtggcggcggcggcgacggagatagttagctcttcagattgagtgactggtggtcgccggcggcggggacgcggagtatggcggcggcgccggggacgagctcgggcggcgccggaggcgaggtggccgggggcaccaaggtcaacgaggagctgtggtacgcgtgcgcgggaccgctcgtggcgctgccgccggcggggagcctcgttgtctacttcccgcagggacacagcgagcaggtagcagcatctatgcgaaaggatgcagatgccaaaattccgagctatccaaatctctcatctaagcttatatgcatactccgtagtgtcactatgcttgctgatcctgacacagatgaggtttacgctcgaatgactctccagcccgttagcaatgtgacgcattgtgacaaggagacgttgctggcaacagagcttgcactgaaacaaaccagaccacagacagagttcttttgtaaaacactgactgcaagtgatacaagcactcatggaggtttctctgtgccacggcgtgctgcagagcgaattttcccccatcttgacttctcagtgcagcctcctgctcaggaactgcaggccagggatttgcacgatgcaatttggacattccgtcatatatatcgaggccagcctaaaaggcatttgctgactactggctggagcctatttgtcagtggaaagagactccttgctggtgattcagtcctgtttattagggacggaagacagcaactcctcttggggataaggcgagcaaataggcagcccgttaacctctcatcatctgttttgtctagcgacagtatgcatattggaattcttgctgctgcagcccatgcagcagccaataacagccaattcacagtattctataacccaagggctagtccttcagaatttgttattccttttgccaagtaccagaaggccgtctatagcaaccaactatcacttggcatgcggtttagaatgatgtttgaaactgaagaatctgcaacaagaaggtacatgggaacaataactggtataagtgatatggatcctttaaggtggaaaaactcccaatggcgcaatattcaggttgcatgggatgaagcagcaccaagtgagagacgcaccagggtttccctttgggaggttgaacctgttatcgctccattcttcatttatccctcgccattgttcactgcaaaacgtccgaggcaacctggggtaacagatgatgatagctcagaaatggacaatctttttaagcggaccatgccatggtttggtgaggaggttggcaagagagatctgagtactcaaaacggtttagttcctggattaagtttggttcagtggatgaatatgcaacacaacccctctcttgccaacacggttatgcaaccggaattgctaaattcgttagctggaaaacctgtacaaactctggctgcggctgatctatctaggcaaattagcttccagccccagttcctgcaacaaaataacatccagttcaacacttcgctgctacctccccaaaaccagcagaccgaacagttagcaaatgtaatagctacaccaaaccaattgggaagtgttatagtaccacaaaaggcagttcaaaattccagttctgaacagaaacagaatctggttacacaaccactgcaagtcagccaaccaatggttagtgtggcacagcctcaacttgtccatactcaactccagcaacctcaagtagttctccaggctcagcctcagcaacctcaagtcattgtccaagctcaactacaacaacagcaacctctggttcaaaatcacaccaccatacaaagtggccttcaacaaatccagcttctgcagcaacagcaagttcagcagtcagtgcaggaacaacagcaaataaagatacagccttttcaggtacctaatgatgccaacatggtaacacagttatctgatcagatgaaaatacaactattgaaggctctacagccacagcagcctctggtcatggaacagcagaaaatgatatttgatttgcagcaacaagcagtaaattctcagtcaactgctcagcagtgctcacaggtagctacccaagtggttggtttgcatagcagtagcactaatcagtacccgacgcagcaaaagactcaacctctcaaaacatttcaagattttcctgggaatgctgtttctattgtaaaaccagaaattgtcacctccgtgggtgctcgctctttgcatgtgcctggtggagtgcagtcaatgaagatggatgaagttccctcttcttcaacatcgccatccacaaacaacaatcctgttattttgcgatcaactccaagtagctccaagaaccaatgtttacctactgcagcaaaggctcctcagtcatctgttgtattgggttctacacttgaacagggtatgaagccttgtgacagtacacaacacccaatggtgattcccaagctggctgaagaaaggccagctactggacaagactacatgaacagcactcagctggattatttggatacgtcatcttcagcgacttcagtttgcctttcacaggctgacggatcgctgcaacaaagttttccaccttcatccttcaatcagcatcaaccgttgagggaagcagttccagatagcgagtttgaggttacagatgcaggaaataactttctatttggggcaaatattgatggccatatggagcctcttaacgaagacgatttgcttggaactgccttcgaagctgacaagtacatggaacagatgccaggaaacggcatctctaactacatttcatcaaaggattctcagcaagagttatcatcttcaatgatctcacatccatttggcgttgctgatatcgcgttcaattccatagattcgtcgatcaatgatatccaattcttaaacagaaattcccgggctccaggtcctgttcaacaacgtatgcgaacatacaccaaggtgcacaagcgtggcgctgttggaagatctatcgacatcaacagatattctggttacgatgaactgaagcatgacgttgcccgtatgtttggaattgaggggcagctcagcgaccaaaacagagttggctggaaactggtttacgaagatcacgagaaggatgtcctattagttggtgatgacccatgggaggacttcgtgaactgcgtgcggtgcatcaggattctttcgccgcaggaagagaggcaaatgaggctggccagcgactacggagacagctttcttggcaaccaagcgtgtagcagctcggacgggggtcgtccgtggagggtcaccggcgactagaaatagcaggctatgcctgagcacaaatgtttgatataatccgtcccacgatagcaagaaaatgatacgcgatttctgagcacaaacttttgcactcagatgatcgtgcaaacagttagcattttaagaaaaatgttgcagttcaatgtaactgcaggaatgtctctgatgtagcctcttcgatgtggcagccttaacaatcgatgtgctacagttactctgcc

SEQ ID NO: 13559 - DNA, 1976 bp, Zea mays
  Clone ID: LIB143-020-A10_FLI
aatggacttggccaatgctgctgcagtctctgctcccaagtacgatgatctaactaatgctgggcaggccaaaagaattgtgcactctcaggccaccgcaaagaggaagcatgctggtctgcatcaggaccaaccttgtgggatccccaggaagaaggataggtctcgtccgctctcggagctctgtaatggagacatgtggggtggttccagaccaaatggccagaaggccgatgaacatttgttgggtgtggctacatgttcaagcagctcctctggcacttcaaccttggacactccattggacatgaacaactgtcatcgcagcatggcattcaaaacagatcaagcaaagggcacagaaatatcctgcatgacaaggctactgagtgatgattcccggcatggaaatgattttgtcggaactcctgctgcacaaaatattgtggaaccagatcatttgcatagatatcaaccttgtggattggcaaagaatcctacctggaaacccaataagcaaactaatgacgcccgcaaagctgagaaacatgcacgcaaaaatatgaagatgagaaccataagctctgttgatcaggagaacaagaacaggacaagagattctaatgatcatgaccaccacaaaccaaagacaggaaagcacaaatcaccaagagatggggttgtccttttggagaaaaggcaggagaagcgttctttggacaagaacaagcccgctgaacatgatattaaaatgcatattgccgtagttcctagtggtatggattgtgttggcgcctttcagcagcagcgctttaaaagcaggtgtgatcctgaagagtcattggaaagcttaagcaaccattcaaactgtgagagtggctcggtatcatcgctggtgtttgagaagccactgcaggcattgccgcccggaaagaatctgctgggttatgaaatatgtcatgcagcgaagccaatcaagacactgcatttgaatcctgccctgtatgatgtggagttgagcgtgttggggagcagcaacacggggcgccgtgtgccccttgtttctctaatgagtaggtggaattgtaaagccgtcgtggggtatcctgtctccgtggaggtcagcgatgatgtgtttggctgtccttctccttcatcagagaaagatatccagcaggctgctacaaacagtgtgaatgggatagtattgaagaaggatgaaactgagggtttggaacgtgttgttgtgccaccatcagcgcagacatcccggccaagatgcaaaagccgcagcaggagggcatcagagaaagcagtggacaagttatggcagccacataccaaatggccagcatcctcgtcgagaaagatgcggaggctttcctcttttggtccaggccagagagatgggaagtcagcggtgaggaaagtgtccggggcaaccgtcgcgtgcatcccgctccgagttgttttcagcaggatcaacgaggcgctgagcttctcagttaatgagaatgccctagctgggtgtgggactgcttcccggctgaggaatacttggtagctaggttttgctgtttgttgttcaccgcttgctttttttgtagccatgccataatagcattggtaaatgtttagtgtggcctatcacttggagcatggtaataggtgatgatgtatcgtcatcttggttgtgagccacatcacacttcactcacagtagaggcagtagaaggaagaactgtgctgatgcacccctctttattaaaaaaaagaacatttgatgggtctgtggagcacatggtctgatggtggaagcaaataaattagcgtaggatgatggttacttgctgggagtctgttttggtattagtgatgcatcgctgctgtaatgtaacttcctgtgttgccatcctaagctaattgtaatcggaagtgtcagcttctgcttgccttttttttttggttacttcctc

SEQ ID NO: 13560 - DNA, 994 bp, Zea mays
  Clone ID: LIB143-020-D6_FLI
ccaccgtccgggtcaaggagacccgcctcaagctcttcaaggatttcttcctcgaggagaggaagaagctggcgagcaccaaggccacggacagcaacggcctcaagtgcgccattgatcacatactggaggcacagcagaagggtgagatcaacgaggacaacgtgctcttcatcgtcgagaacattaacgttgcagcgatcgagaccacgctgtggtcgatcgagtgggcggtcgctgagctggtgaaccacccggagatccagcagaagctgcggcaggagctggacacggtgctcgggccgggccaccagatcacggagccggacacgcacaacctcccctacctgcaggcggtgatcaaggagacgctgcggctgcggatggccatcccgctgctggtgccgcacatgaacctccacgacgccaagctcggcggctacgacatccccgccgagagcaagatcctcgtcaacgcctggtacctcgccaacaaccccgacagctggaggcggcccgaggagttccggcccgagcgattcctcgaggaggagaagcacgtcgaggccaacggcaacgacttcaggtacctgcccttcggcgtcggccgcaggagctgccccgggatcatcctcgccctgcccatcctcggcatcaccatcggtcgcctcgtccagaacttcgagctgctgccgccgcccgggcaggacaaggtcgacaccaccgagaagggaggccagttcagtctccacatcttgaagcattccaccatcgtgtgcaagccaagaacgctctaagagcagcccacacgtcggttccatgcggagcagtcgaatgttctgctccatcaccatgttattcgggcttaattaagcagtatcattagtagacagtaggagtacaggaagaaaaaaagctctggataatgttatttgcaacaaagggaagggaagcgaagaatctgataactattcaatgaagcgttcgattcttg

SEQ ID NO: 13561 - DNA, 775 bp, Zea mays
  Clone ID: LIB143-032-A2_FLI
gagaagatggtatggctgacagatttccagtgctggacattgggaagcacaccactgaaggtgacccgtgagactgtcaatgtcttgcaagactgctatcctgagaggttggggcttgcaatcctttacaaccctcctaggatatttgaatcattctggaagatagtgaagccgttcctagaccatgagacccgcaagaaggtgaagtttgtgtactccaacgacaaggagagccagaagataatggcagaagtctttgacatggaggagctcgactcggcattcgggggaaagaacccagcgacatttgagtacaacagctacgcagagcagatgcaggacgacgacaagaagatgggatcttcgcacggctcagccaatagcttgcttggatcagctgggaaggaggctaatggcgcagactcggacgcctcaagcgaggcctccttctacagtggaactgactctccgacacatgagaacggtgaacacagcatcgcgaagaagaatggttgagctgagttgaactgctttgattgctcaaactgagggagctgactaatgtagttggtcaacataacagttatatctagcttgaacgattgtcaggaccgatggcgatgacagattccaggctggttagatcaccttgtcgggtctaggcggaatgtatatttgctgctcatgatattatagtatgtaagaccataaacggtgagtttgtgatgcgctatatatcttggaataaagttcaacttcttcgttttcttactcg

SEQ ID NO: 13562 - DNA, 1042 bp, Zea mays
  Clone ID: LIB143-032-B7_FLI
tctgccgctgcacacccctgctgcgtttttaccacaaaaatgtcgaaacatacaacccagtagcaaaaaagcacgaaaaaaaaacggttttacaagaccatttgcgggatatactttcttcaagaaatcttccccacttgttccctcgcgtccatggccttgctccagcctactcttctcactcctcccccgctctgctgctgctcgcatggcctcctctacccagggttcctgaaactgcctcccaaattctcaaatggggcctgctgttccacggcgagggcgtcggaccggagcgagctggcgggtaaaagcgggggcttggcttggagagcggcggggagaaaggggcggctgcttggcgtcaccggagctgggcgaggccccttctttggcggcggcgggaggcgtatggacaagggcactagccgggtcgtggggaacctcgccttcgccgccgtcgtgacgtacctcgccgtgaccggccagctccggtgggttattgacgccatcgtctctctctggctcctcacaatactgctgcctgtactggctctcggtgcatttttcttctttgcaggacaagatatactgcagggcgattgtccgaactgtggaaaaagcttccagatactgaagtcagctttgaaggatggcccacaactctgtccctattgcactcaacctttctccgttcaaggcaacaaatttgttagagaatctgctagattttcatctgggagggctgctactgctacaaatggtccagtgttcaatgagttcttcaaccgcaacatgagaggaggaaacgcggcgccttctgagacgatcgtggatgtggaggctgaagtcaaggacgtggagtgatgtttcttctcagcagaagaagagcacgatttgcttctgaatctgtgagaaatggggagaaaactgaaactgtgagagactaggcaaacgtgcatatagatagatgggtatcggggatgggtagttgtgtagtgcccgcgcgcatgagaaactggacaaggcccctgtttgtttc

SEQ ID NO: 13563 - DNA, 510 bp, Zea mays
  Clone ID: LIB143-032-D4_FLI
aggcaccacacctcttcttcttcttcctcctcctcctagcacagctagcgcctgctccccttcgcctgtgatcatgtcttgcagcagcggcaagtgcgactgtggctccagctgctcctgcggcagctcatgcaactgcatgtcccctaacgtggagaccgccgccgccagcagcatcaagaccacggtcctcgccgcgccgaccaccaaggccagcgccggcggcttcgaggcggccaccgagggcggcggctgcgactgcaacacctgcaactgcggcaccagctgcggctgctcctgctgcagctgcaactgagccggtcaggcgatggcgcacgagagtcgagaggacgacgacgagtcgtataaatataatagcggcgtctaaataagatcctgtcaactgcacccgccattatcgatccatggtcgctcctggggttcatgttcatctgtaacgtgctcgcggtcatgtccgtctcgtgccggatttaatatttatatgcatgt

SEQ ID NO: 13564 - DNA, 1647 bp, Zea mays
  Clone ID: LIB143-032-F5_FLI
attcgcacctgcccgcgcggccccgacccctagtcctccccacccatggcgcggcgatccgctcctctcctgcgccgcctcgtctccgcctcctccccgcccgcgcttcagtccctcacggaccacgtcggcgtcctcgcgcggcgcacggtgacctacatgccccggcccggggacggcgcaccacgcgccgtcacgctcatcccaggcgacggcatcggtcccctcgtcacgggcgccgtgcggcaggtcatggaggcgatgcacgcgcccgtctacttcgagacctacgacgtccacggagacatgcccacggtcccgccagccgtcatcgaatccatccgccgcaacaaggtctgcatcaagggcgggctcgccacgcccgtcggtggcggggtctcctccctcaacatgcagctgcgcaaggagctcgatctctacgcctcgctcgtccactgctccaacctccccggcctgcccaccaggcacgagggtgtcgacatcgtcgtaatcagggagaacaccgagggcgagtactcggggctcgagcacgaggtcgtacccggggtcgttgagagcctcaaggtgatcacaaagttttgctctgagaggattgccaaatatgcattcgagtatgcttaccttaacaaccgaaagaaagtcactgcagtgcataaagcaaacattatgaagcttgccgatggtttgttcttggagtcttgccgtgaagttgcttcaaaatatcctggtattcagtacaatgaaatgattgttgacaactgctctatgcaacttgtttcaaagcctgaacaatttgatgtcatggttacgcctaatctttatggcaatttggtggctaacacggctgcaggtattgtaggagggacgggcatcatgcctggaggcaatgtgggtcaggactacgccatctttgagcaaggcgcttctgcaggaaatgttgggaatgagaaccttgtggagcagaagaaagcaaaccctgtcgcgctgcttctgtcatctgctatgatgttgaggcatttgcagttcccgtcatttgcggaccggctcgagacggcagtgaagcgcgtcgttgctgaaggcacgtacagaacaaaggatctgggcggtagcagcaccacccaggaagttaccgatgctgtggttgccaatctggattagattccaggtgtacacggctaaaaaaggctaattctttggggtgactagttgtctagtcttgactcctgagtgttatttatcttcttacatagattttagattgcttcacatcttcaagagggattacaaggtatcccttgtttcagaatttctttagaaataatattgaggaacccacgacgattcttgttcacgtgatactttgtacttatcaaggtagaggaccttgagttgcaaagccgaagggaacggatggcagtctgaaaataacatgaattgagagttgattcagattggagctttgaccctggttgccactgcatactgtcactttggattattccctgagacttactgttatggacgttgtggttcacttgggatggtaatgtgcctgtctgttgatttcaggctgtgcatttgcatctggtgatccttgtacccaagttgtgaaaaactgtattttgt

SEQ ID NO: 13565 - DNA, 733 bp, Zea mays
  Clone ID: LIB143-049-H1_FLI
ctcctcgcattttccttgcaaccgattgcctatccccctcccaaccaaagaccgatggcgcccaaggccgagaagaagcccgcggcgaagaagccggcggaggaggagcccgcggccgagaagacgaccgccgggaagaagcccaaggcggagaagcgggtccccgcgggcaagtccgccggcaaggagggcggcgagggcaagcgtggcaagaagaagggcaagaagagcgtggagacgtacaagatctacatcttcaaggtgctgaagcaggtgcacccggacatcggcatctcctccaaggccatgtccatcatgaactccttcatcaacgacatcttcgagaagctggccggcgaggccgccaagctcgcgcgctacaacaagaagcccaccatcacctcccgcgagatccagacctccgtgcgcctcgtgctccccggcgagctcgccaagcacgccgtctctgagggcaccaaggccgtcaccaagttcacctcctcctaggcttgcacgctcgccctttgtaggcttctcttgtgttgatgttcgccttgtgttgtagttagatgttgctggtttctctgtcggcgctgctctgcttctgtaggaactgcgtcatgtaacctagcaaggacttgtttatttgtgaatcatcaacactttgttgttgatcacttatgttccaaattctgagtttgacgctggagcatgcctcatttgttgcaaaaat

SEQ ID NO: 13566 - DNA, 715 bp, Zea mays
  Clone ID: LIB143-050-A3_FLI
gctatctccgccatgcccaccaacctgtatggcccgcacgacaacttccacccggagaactcgcacgtcctgcccgcgctcatccgtcgcttccacgaggccaaggctactaacgcccccgaggtcgtcgtctggggatcaggctcgccgctgcgcgagttcctgcacgtcgatgacctcgccgacgccgtcatcttcctgatgggtcactactccggcatggagcatgtcaatgtggggagtgggagcgaggtgaccaccaaggagctcgccgaactagtcaaggaggtggtcggcttccaggggaacctggtgtgggactccagcaagccggacggcacacccaggaagctcatggatagctccaagatacaggggatggggtggaagcccaagatcgccctcaaggaaggcctcgtggaaacctacaaatggtacgtcgagaatgtcatctcgaacaagaagtagagccgtgacatgccagtggtgctgtcttgctctccgttgctgcttccacaaggtggttggatatctgatcatacggttatcagttttaagttaacccacatagaagaggcttgttatgttatgtgttgcctcacctgaataatctgtgggtcaagttagtctgttagtatactgctacaagcataattgatctggaacactttttgttgaatagagaaagtttaatgaccaagatgatgatggattg

SEQ ID NO: 13567 - DNA, 906 bp, Zea mays
  Clone ID: LIB143-050-C5_FLI
ttcagatgttgctataaagagaatcaacgatcgatgctttgctgggaaggcttctgagcaagagcgtatgaggactgatttctggaacgaggcagacaagcttgcatctttgcaccatccaaacgtagtagccttctatggtgttgttgtagatggacctggtggatctgttgcaacggtaacagaatacatggctaatggctcactccgacaagcattacaaagacatgaaaagatctttgatcggcgtaggcgtctactaattgcaatggatgttgcatttggaatggaatatctccatgggaagaatatagtgcattttgacttgaagagtgacaatctgcttgtcaacctaagggatcctcaacggcctatatgcaaggttggtgatttgggattatcaaaggtcaaatgccagacactaatctctggcggagtaagaggaacacttccttggatggcccctgagttgttgaatggcagcagcagccttgtctcggaaaaggttgacgtcttctcgtttggcattgtgatgtgggagctacttacaggtgaagagccttacgccgagctgcactatggggccattataggtggaatcgtgaataacacgctgcgacctccggtgcccgagtcctgtgatccccagtggaggtcactgatggagcggtgctggtcagccgaaccgtcagagaggccgagcttcaccgaggtcggcaagagcctgcgcgccatggcttctcctaccaaggcacaacaatcgaaatagatgctttagccttgcctctcgcgtccttctgttcagcagattgtttcagtcttcaaaccgaggaggtgccaccatggctggcctgccttttgtacatgaataagttgaagaaaaatacgagaatgtggcatgcttat

SEQ ID NO: 13568 - DNA, 1013 bp, Zea mays
  Clone ID: LIB143-052-A1_FLI
aggaaaggtgtacgaaagtataccgaattactaggacaagggacaaaacagaaagctatgggggtgggggaaacctgcttttccatctctttgctgccaaagaatagataaaagttgatgtcatgtttgtgcagaaacaaggttgtaatggaaggtttcatgactgcaataattcagtttcttgaagcgttagaatcattctatgttgttgaaagagatggttcaatcatcctttttttggttactcttggtggttgtcattcttcagattacatcaaaaagatgacattatcccttggtctcaagaaaatattcttgcttactacacgaactgcagacgaatatttacctctgttattctcttgacttattactatgtgcaaatagtagcaatgctccaattttcagtttttcgtatgcttgcttctaccttgcttaattttgaaatggcgcaggtttgcgcgacatggcttttcatagtgctcaattggatctatcccctgagcataggagaaaagtatcaatttgtatagtggatccaagtattctataaagcatgtatcctccaatttcccacaagcgagaatggcatgatatgatggatgaaatggctgttgcggtcaattgtctttcaaggatcaattgtctttcaagaaccacacttatgtattggtttgtgtgcagttcaagctctgcaaggtgaggtctgtccagtttggccagaaagtcatcccctacctgaacacctacgacgaccgcaccatccgctaccccgaccctctcatcaaggccaacgacaccatcaagatcaatctggagaccaacaagatcatggacttcatcaagttgtatttgccctttcatagacttcatcaagttatatacttagttaggctcaatgttagcacaaacagttgatgagcaagtttaaatttagagtacacttatgtatgagttattatttgacaatacttatttatgagatattgaatattatttatctatattatatt

SEQ ID NO: 13569 - DNA, 874 bp, Zea mays
  Clone ID: LIB143-052-B7_FLI
ctctggcctgtcgttggtatcgttgtcgccggcaaccaaggcggcggtgccgatttctcctccggtggtggctgccagcggtactaccaccagcgccagattttgtggcaccaccatgccaccatctggctccgaggtcatcaacatgcactcgcaggctcagcagcaagccagcaggaaggcaaggcggtgctggtcaccggagcttcaccggcggttcgttgccgctttgcacgaactcggtggccctcaagtggctactccgaaacagatcagggaggtgatgcaagtggacgggcttacaaacgatgaagtgaaaagccatctccagaagtaccggttgcacaacagaagatcctcccccggcgcggcggcggctccggtgagccagtcgatcatgctggtggatggcgtctgggctgctcaggagcaaagcagcggctcgcagtccgggtctcggcagggcccgctccagttctccagggcaggtatggccgtcggtggcggcgacgacagcagcagcagcgacgacgacgaagacgacgacaagtcggaggatggctacagcctgaaatgcgtgtgaggctgaggcaggctgcgtttgcggaagatcggatgagagtgtagagagatagcgttgtcgcggcttgagcatgcatcggtggattcttgagtctgtccgagagagtggttgtagtgcaggcaggcatgtatacagggagattaggcgcgcgcggcccgtgtgcgcccaagagatgaactgatcatgcggcgtttggaaagctgataggcgttttgtttgagtctttgctgacttctgttaacttccgggcagatcacaaaattttcgccctgagaataacttattaataat

SEQ ID NO: 13570 - DNA, 1764 bp, Zea mays
  Clone ID: LIB143-052-E11_FLI
agcagtagcaagtagcagcatactctcctacgcgaatcgattaacgggcggcactcacccaccgtgtggcctgccaaactgtcccctaggccccggccccgcccgcgcctggccagtggccatccatcccttcccttcgcttcgacgcaccaatcttgtcccggcgcctgccaaatccagcaaggccacacagcccgaggcaggaagggcagcgcaggaacagggagcgagcagcgcacgggcaatggcggcttcttccgggacgcgctccgtgcgcctgctggtgctgctgctctgccttctcgggttctgcgtcgcgctgagccaccaggagtcggcggcggactcgtgcgccagggccaaggtcgcggtcgccagcctcgtgcccttcgactccacgtccttccgctgcaccgccgcctggaagcagcaggacttcgtcctcaggtacaagaacacggggcccagcgagtggagcttcatcctctcggcgccggacaggggctcgtacgtggcggtcggcttctcgggcaagggcgccatggtggggagcagcgccgtcgtcgggtgggcggccaacggcaggggcaccgtcaagcagtactacctcggcgggaagagccccgaggagtgcgcccccaacaggggcctcctcaagctcgtcaggaacaggaccgccgtcgcctcgcgctccggccgcctctacctcgccttccagctcagcaccgactacccgcagccgtacctgatctacgccgtcgggccggacggcagcctgccgcagtccgactcgctgcggctgccggcgcaccagaacatggcctcccgctccttcaactacacctccgggctgtcgtacaacgtcgccgggtccggcgacgccgcgttcccgccggagaggaagcacgggctgctgggcatgatggggtggggcgtgctgatgcccatcggcatgatcaccgcgcgctacttccggcagctggacccgtgctggttctacacccacatggccatccaggtggctggctacgccgtcggcatcgcgggcatcgtcctcggcttccgcctcagcgaggacgggctcaggaacgtggacgtgcacaaggcgctcggcatcgccatcttggccatggcgtctcttcaggtgatggcgatcctggcgcggccggacaagacgtccaaggtgcggcggttctggaactggtaccaccacaacatcgggcgcgcggcgatcctgctggccatcggcaacatcttcctgggcctctccatcgcgcaggagaccagcgcctacatcgtctcctacggcgtgttcgtcgccgtctgggtgctcgccgtcgccgccttcgagatgaagcgctgctacgccgacgacgactgatgagctagcgacacgtaagagtcacagttcggtcccaacagctgacggcgaagtttggtgtcgttaaactgagcgttccacggccagctgggacgtgacagacacacgagcgccgagcgcgcgcgcgcgcacacacacaccattcttgttgttccgtagctcgcagctggacagtgcattattggttcgaggagggcgtgctttggttggctaattaaaaaaaaaatgttttttttttaggtataggatgtgaggaaggggacggtctgctgtttctaggctagctggacgctctgattcataaatttgtacattgattggtacgtggtcgtgttgtgttgtaccctttttggacgatagcatgttcttcgcccttttcttct

SEQ ID NO: 13571 - DNA, 662 bp, Zea mays
  Clone ID: LIB143-003-F5_FLI
tgaagaacaaggttttctccattgatctcgtttcagatgaaccttcagtgattgcttgtgatatggctcatactccattggagccatcctctatagatgttgcaatattttgtctttctttgatgggaatcaactatccaagttatttagaggaagcaaatagggttctcaaaccaagtggttggcttgttattgctgaagtgcgaagtaggctagacccgagcaacggaggtgctgatcctgaaaagttttctaaagccattatccagcttggcttttcgcttgtttcaaaggatgtgaaaaacagaatgttcattctgttctacttcaggaaaaaggaaaaaagtaaggtggcgaagagcatcgattggccacagctgaaaccgtgcttgtacaaacggcgatgagccgcttgtctcgtatccaccagtaatactgtagttgttgtagtagagctcttcaaaagtttcgtcaaaactgaaagtctagatttaggtccctccgtacctgtatggctgcatctgtgtgccacgctattccattattttccacattagctgcgtctttcatttgttggacctcacaagaaaagatcacatagggaacgatgcattgtttggaagcagatcatatataattcaagtctacttttcacatgctgc

SEQ ID NO: 13572 - DNA, 1961 bp, Zea mays
  Clone ID: LIB143-003-G1_FLI
cgtttcgagccagggcatcctcgcgtctcgctctcacccctcctcggcgcctccccgaccacagtgtaaagcccctgtcccttcctcccccccgactcgcccctcatggcgaggaggcgctgctgatgcctcgcggcgtcggatcggacgcggcggccacgacacctagccgcttgcggtggcgctcgcctacgcgcccaatccgccgacgctgctcctcggaccccccgagagattcaggccccgtctcgcctcgtcctgcctagtgcctaggtgaggctctggccttcaaaggtgcgtgggtgggatttgctgcctcggtttgcgttattcccaagtgccctgcccatactccaacagcggtccagtcgacttccccaagtgctcgacccctacaaggcagcgcgcgtgcgtcgcctcaaccccttgcatgcgctggcgctaaccctatctaggagacggagcggcgggccagcggctacgcgggcaaagagaggacgagagcgtgcaagaagagaaggcccgtgtcaggcggcggctatagtgtatttaatcttcatccatgttaatatgaagtctgcatttgttatactattctcaaactactccatccgttccaaattgtgcaaggataggcaacaagtgttcaaaaacacgtctgtggatcaattgacttgtatttcagcctttcagttgaggattaaagtggaggtttaagaagcttgagaattggcatcatctcaagaatacattgaagtgcaagatgccaaaaataaagagtctatctaatgcatgccgagtatcattttctccagaaggtcccatatctgaagaggcgcttgagagagtccgtgcactgttagatatgataagacctctagatgtcggcctagataatgaagcccaaattgcacgcaattggagtagttctacgcgtccatcaaatgggagacgaggacgcaatggggctaaccagttcgcggctccaatcaaatatttgcacattcatgaatgtgaaagcttctctatgggtatattttgtatgccaccttcttcagttatcccacttcataatcatcctggaatgactgtacttagcaagcttctttatggacgtctgcatgctgaatcttatgactgggttgacatacctgatcatccaattgatcaattacaaacaaggccagccaagcttgttaaagattgtgaaatgactgctccagagacaactattctttaccctaatgcaggtggtaacatccacactttcagagccattacaccttgtgctctctttgacgttctttctccaccatactccgctgaggatgggcgacactgttcatacttccgaaaatctcagatgaatcagccacctgttgttttgcctgctgagatagatagctctcaggtagtttggttggaggagttggaggaccatcagcccccagaaggctttgttgttgcaagaggtctgtataaaggccctgtaattaggagataatttgctttggagcgcagaatcaaccaagctgcaaatcagctgaaagacgatgcaggcttgtagtgcctagtgcaagcatcgtcaggtcatgtgcagcctacggtttatttgtacatctcaaagtgatctttgataatttaacagcagttttacagaacaggaacggatgttttttgtttggctgccattttaactgtgtcccactgctggagtatctctgacctagttatggagctcttatcagatcaagaccatggagaacatacttttgatgtaccagcatagctattgtcatgatgtaccagggaagatcaagacaagtgtttccatttggtgatttcagaaagaatttggtgtggggctaccattttgtctgtgtaatagcagcattactattttggagcaagactgtaaattacgggagaggaactataataatatcattaggtttatcatg

SEQ ID NO: 13573 - DNA, 531 bp, Zea mays
  Clone ID: LIB143-004-A3_FLI
ttatgaagagtggcaagtacactctcggctacaagaccgtcctcaggactctcaggaactctaagtcgaagctagtgatcatcgctaacaactgcccgccccttcgtaagtctgaaattgagtactatgctatgctggccaaggtcactgtccaccacttccatggaaacaatgtcgaccttggaactgcctgtggtaaatactttcgggtctgctgcctcagcattattgatcctggtgattctgatatcatcaagactacaccgggtgagcagtaaagaagcccctgcagtagggggatcttactgcatttgttcttctgtcttgttaaacagcatttacctgctagtaaactgagttattcggaacattgtcttgaattgaatttttgctccggtgttttgacacttaaatagagctttagcttataccgttgttcaggtcgcagctgtatgttgtcactatcaaaccgtcaaacgaatgctccaccagtggaggtatctcctataataaggattcattgtttgtagt

SEQ ID NO: 13574 - DNA, 694 bp, Zea mays
  Clone ID: LIB143-004-B11_FLI
tgatgttcgggctggagactcccctgatggcggcgctgcagcacctgctggacgtgcccgacggcgacgccggcgcgggcggcgacaacaagacgggcagcggcggcagcgccacgcgcacctacgtccgcgacgcgcgcgccatggcggccaccccggccgacgtgaaggagctgcccggcgcgtacgcgttcgtggtggacatgccggggctgggcacgggcgacatccgggtgcaggtggaggacgagcgggtgctggtggtcagcggcgagcggcgccgggaggagcgcgaggacgacgccaagtacctgcgcatggagcggcggatgggcaagttcatgcgcaagttcgtgctgccggacaacgccgacgtcgacaaggtcgccgccgtgtgcagggacggcgtgctcacggtgaccgttgagaagctgcccccgccggagcccaagaagcccaagaccatcgaggtcaaggtcgcctgagggagcaagcagtagctgtgcttctgaaactttgtgtgtttgtgtttgcttcctttggtatcaccaatcatcctatctgatatatcgactggggttttcgctgggtttgaagctttgtgacgcaaagctgaatgccctgatgctgtctccatagaataaatctctacatgtctcttgtaaccttttctagtgaagatcgtgtcgccatg

SEQ ID NO: 13575 - DNA, 1559 bp, Zea mays
  Clone ID: LIB143-004-C5_FLI
tacaatttagaagcgcccctcctcctctcccccatccgtacccaatctaatcgacacccggccgagatgggccgcaagttcttcgttggtggcaactggaaatgcctggaagagcccgcgttcttcttccaatgcgcctgtgcttccaggctccagcccagagcaaatcgtaaaagcccttcataagtttcgtgatgcatgttgtctgtaggagcagaggagttcgatatccaacttttggagacccattctcgtttgctgcacgaattaaccttacgtttcttgtcatggagctcggggcttgctcaatctgagcataggttggagctcctcgcgaattgagtactcattggcagtaatggaaccgcagatcaggttgagaagattgtcaaaaccctgaatgaaggaaatgttccctcttcagatgttgttgaggttgttgtcagtcctccttatgtgttcctcccggtggtcaagagccagctgcgccaagagttccaagttgctgctcagaactgctgggtgaagaagggaggtgcattcactggtgaaattagtgctgagatgctcgtcaaccttggcgttccctgggtcattcttggacactctgaaaggagagctctgctgggagaatcaaatgagtttgttggagacaaggttgcttttgctctgtctcagggactaaaggtcattgcatgtgttggtgagacccttgaggagagggaggctggttcaaccatggatgttgttgctgcacaaacaaaagcaattgctgagaagatcaaggactggagcaacgttgttcttgcctatgaaccagtctgggctattggaactggcaaagtcgccaccccagctcaggctcaggaagtgcacgcctccctgagggattgggtaaagatcaatgtcagccctgaggtctctgaatctacaaggatcatttatggaggttcagtaactgctgcgaactgcaaagagctggcagcacagcctgatgtcgatggtttccttgtgggcggtgcttctttgaagcccgagttcatcgacatcatcaacgccgccgccgtgtgaaatccgcttaagatgttccaacccttcaccctgttgcggtgatgtgctgaagacagatcagactatttttttgtttaaccgtgccgtgctatgtaagctactaactttgcgctggtgcggatgctgatttccctcccccctagctttttgtgaggctactctacagcttgattcagcttgctaataatgtttgcctctggacatagcgatagtggtgtttgtgtagccttttttttgtgtgtgtgaattacgatggatccgtcttcgcccgacgcccttttgtggcactagtctacagcgtctacacaaatttgtgagacttagtttgggcattttagtttgtgagactagtttgggcctttgttgtgcccacagccccacattggtcgaatgctgccaagattgtactgatcattgatgccctgtacggattaacctggtctccgaatgcaatcgttgcacggaggcaggcagccaattattgtacg

SEQ ID NO: 13576 - DNA, 914 bp, Zea mays
  Clone ID: LIB143-004-D12_FLI
gtgctgctaagtatttgatggaggactgtctttgtgtatgcttcctgcaggtgaaatgtgatctgtagtgatgctgtccccgaagttcagcaagcatacacaaagacagtcctgctgctaagtatttgatggagcgtggtgtggaccggaaggacttcaactcatatggtagccgtcgtggtaatgatgaagtaatggcaaggggaacgtttgcaaacattaggatcgtgaacaagtttttgaacggagaagttggacccaagaccattcatgttcctactggggagaagctttctgtttttgatgcggccatgagatacaaatctgagggccatgctactataatcctcgctggtgctgagtatggaagcggcagttctcgtgattgggctgctaagggtccgatgctcctgggagttaaagctgtaattgccaagagctttgagcgtatccacagaagcaacttggtggggatgggaatcattcctctgtgcttcaaagctggtgaggatgctgattcgcttggcctcactggacatgagcggtacagcatcgatctccctaccaacctcagtgagatccgtcccggccaggatgtgactgttactaccgacaatgggaaatctttcacttgcatcgttcgctttgacactgaggtggagctggcgtacttcaaccatggaggcatcctcccttatgtcatccgcaacttggcagctgcgcataactgaggcaagatcacacaccgtttgacccacaatggcagtggcaggctccatgttcccagggctagcgacctggttctcaatgtagtgacatttgtgatggatctaggggtctctttgtcgattcagcccataaataaagtgtgaaataaaagccgcaggtggaggcaggaacctgctgattgaggg

SEQ ID NO: 13577 - DNA, 3219 bp, Zea mays
  Clone ID: LIB143-004-D2_FLI
tgcgctagcctccgtcaacccgggccgcgccgcctcctccgcccgcctcgcgctctcgctgccgtgcggcgcgtgggtcggccgaagcgggctcgtccgccgcgccgccgccttctccgggacacggccgcgtttcgcgggcgccagggcgcagatcggggccgccgtgcctgccgtcgagcagttccagcgcaggatggcaacccaagctactgtgcatgccttcaaggatattctgaccagcctccctaagcctggaggtggtgaatatggaaagttctacagccttcctgcactaaatgatccaaggattgataagctgccgtactccatccgtattcttcttgagtcagctatccgtaactgtgataacttccaagttaccaagaatgatgttgagaaaataattgactgggaaaacacatctccaaagctggccgagataccattcaagccagctcgagttcttcttcaggacttcactggagttccagcagttgttgatcttgcagctatgcgtgatgcgatggccaagttgggcagtgatgcgaacaagattaacccattggtcccggtggatcttgttattgatcactcagtgcaggtggatgtagcaaggtcgcagaatgccgtacaagcaaacatggaactggaatttagtcgcaacaaggaaagatttggtttccttaaatggggctctagtgctttccaaaatatgctagttgttcctcctggttctggtattgtgcaccaggtcaatcttgagtatcttggcagagttgttttcaacacagatggcattctctatcctgacagcgtagttggtactgactcacacaccactatgattgatggtttgggtgttgctggctggggggttggtggtatagaagcggaggctacaatgcttggtcagccaatgagcatggttttgcctggtgttgttggcttcaagttaactgggaagttacggagtggtgtcacggccactgatcttgttcttacagtaacacaaatgctaaggaaacatggtgttgttggcaaatttgttgaattctatggtgaaggtatgggtaagctgtctttagctgacagggccacaattgcgaacatgtcaccagaatatggagctaccatgggcttctttcctgtggaccatgtgacattggattaccttaaactgacaggccgcagtgatgaaactgtgtcaatgattgaagcatacctgcgagccaataaaatgtttgtggactacaatgagcctccaacagagagaatatactcatcttatcttgagctgaaccttgatgaggtggagcctagcatgtctggcccaaagaggcctcatgatcgtgtccctttgaaggaaatgaaatcagattggcatgcttgcctggacaacaaagttgggttcaagggttttgcagtgccaaaggagcagcaggataaggttgtcaaatttgactttcatgggcagccagcagaaatcaagcatggtagtgttgttatagcagcaataactagctgcacaaacacctcaaatcctagtgttatgcttggtgctggtcttgtagctaagaaagcttgcgagttgggtcttgaggttaaaccatgggtgaagacaagccttgcccctggatcaggagttgtcacaaagtacttgcttcagagtggtcttcaagaatacctcaaccagcaaggattccatatcgttggctatggctgtaccacttgcattggaaactctggtgatctcgatgaatccgtatcaactgccattacagaaaatgatgttgttgctgctgctgttttgtcgggtaaccgtaacttcgagggtcgtgtgcaccctttaactcgggctaactatcttgcttcaccacctcttgttgttgcttatgcacttgccggaactgttgatattgattttgagaaagagcccattggatttggaaaggatggcaaggaagtctacttcagggatatatggccctcaacagaagaaattgcgcaggttgtccaatccagtgtgctgcctgacatgttcaagggcacctatgaggctatcacaaaaggcaacccaatgtggaaccagctaactgtcccagaagcgtcactctactcatgggattccaaatccacttacattcatgagcccccttactttaaggacatgaccatgtccccacctggcccctctacagtgaaagatgcctactgcttgctgaacttcggggacagcatcactacagatcacatttcacctgcaggaagcatacacaaagacagtcctgctgctaagtatttgatggagcgtggtgtggaccggaaggacttcaactcatatggtagccgtcgtggtaatgatgaagtaatggcaaggggaacgtttgcaaacattaggatcgtgaacaagtttttgaacggagaagttggacccaagaccattcatgttcctactggggagaagctttctgtttttgatgcggccatgagatacaaatctgagggccatgctactataatcctcgctggtgctgagtatggaagcggcagttctcgtgattgggctgctaagggtccgatgctcctgggagttaaagctgtaattgccaagagctttgagcgtatccacagaagcaacttggtggggatgggaatcattcctctgtgcttcaaagctggtgaggatgctgattcgcttggcctcactggacatgagcggtacagcatcgatctccctaccaacctcagtgagatccgtcccggccaggatgtgactgttactaccgacaatgggaaatctttcacttgcatcgttcgctttgacactgaggtggagctggcgtacttcaaccatggaggcatcctcccttatgtcatccgcaacttggcagctgcgcataactgaggcaagatcacacaccgtttgacccacaatggcagtggcaggctccatgttcccagggctagcgacctggttctcaatgtagtgacatttgtgatggatctaggggtctctttgtcgattcagcccataaataaagtgtgaaataaaagccgcaggtggaggcaggaacctgctgattgagggaacagttttgcctgtgtttggttacatgaattatctgtttcacagatgtgtagagcatggtgtaaatgcttcatgtgctgttcgtttcgacaaattgattatgctgtagcccttcaggtttcatcttg

SEQ ID NO: 13578 - DNA, 2252 bp, Zea mays
  Clone ID: LIB143-004-D3_FLI
cacgcacccttctcgcgggcgcgggcgcgggcgcggggcgcgggagcaggcatggcgtcgcaggtcgctgggtcaaccccggcggtggcggcgcttgggttccttctcccgaccttctgggagatcgaggtcacgtgcgccgccgcgatgatcctcgtggcgctttacgttgcctacgagctcctcaacccgcgctcctcgcaggcggcagcggcgggcgacgccgacgagctcctcgtgcgggggctggacggcgccgacaagttcaaggggggtgtgagcggcccctctgcctatgtagtgaagctcgaattgttggctgcaaaaaatttgatggcggcgaacttaaatgggacatctgacccatatgcattgatcacttgtggtgcagagaagcgtttcagctccatggtccctggctcaagaaacccaatgtggggagaggaattcaatttttttgttgatagtcttcctgtaaagataaatgtcacgatatatgactgggacattgtatggaaaagcacaatccttggctcttttactgttactgttgaatctgaggtaccgagtggaccaatttggcatacacttgacagcacatcaggccaggtgtgtcttcatattaaagtaatcaaggttcatgaaagttcctccagggcaataaatagctcagctgaggctggtgctcgtagaaggatttccttggataagcaaggtcctactgtagttcatcaaaagccaggtcctttgcagacaatttttgaactgcctccagatgaggttgttgaccacagttattcatgtgcacttgaaaggtcatttctgtaccatggacgcatgtatgtctcttcatggcatatttgctttcattcaaatgtcttttcaaagcaaatcaaggttgtgattcctttgagagatattgatgagataaggagaagtcagcatgcagttattaatccagctattacaatttttcttcgaatgggagctggaggatttggtgttcctccgttaggatgtccagatggaagagtcaggtacaaatttgcatcgttttggaacagaaaccatacatttagagcattgcatcgagctatgaagaacttcgtaatgatgatagacgctgagaaacaggaacgtgctcagtctgcattacgtgcacacagtagttcaagaaaaaatagcaagaaggagataaatgtaccagaagattgtgctgcattaacagggaagttacaaccttttgtcaaagaagaagttttggtccctgtattcaatggaacttttccctgtactgcagaacagttcttcagtattcttttaagtgatgattcaaattacataacagagtatcgaacggatcggaaggataaagatataaatctgggccaatggcacgttgcagatgagtatgatggccaggtgagggaacttaattgtaaatcaatatgccatagtccaatgtgtcctccttattcagcaatgacagagtggcagcatatagttctttcagctgacaaaatggatctggtatttgagacagtacagcaagtacatgatgttccatttggttccttctttgaggtgcactgtaggtggtgtgtgaaaactatcagttctaactcgtgcagtctcaacataagtgctggtgcgcatttcaagaaatggtgcatcatgcaatctaagataaagagtggtgctgtggatgagctgaagaaagaagtgaaggtgatgttagactttgcgcaggggtatatgctcaaagttagctctcctgaccaagagaacagtaatctcgcgcagcaagacaacacggcgccggatgcgccttctgatacagggtgacagccgccatcacatgacaacgaatcatgccattacgatgttatacacagaagggcaggtggaccagtaactagtagtccacatgaaccacatctaacatgttaagctgacttccaaaagaatgggtggaccgtgtgtagcgtgttaagttcgtttcctgccattgctctatccgtttttggcagtttggctgatgtatatatatagctgtaaacacacgcaaatataaagtggtggctgtggcaggccagtgtgttgtttgagtataaaaacaaagaaagaaacggaagagagaaatatttgccacagaaccaacgcttctcgagtcacagactcacaggggggcatatgttgtgcaaataaaagcttgatgtcctagaaacaactttgcaactgtcagtttgttc

SEQ ID NO: 13579 - DNA, 2224 bp, Zea mays
  Clone ID: LIB143-004-D5_FLI
aaaacttgtttcgtaaccatcctattttttctctcgaattctttcttgtgattaaggcctggctaatttctattcttcaggtttgcagatcggcgcagttttggtcgcaaaggcgtggtcgttctcctcgagcatcgatttagggttcttcggctttctatgatcaggaggagttgctggattattttatcagggaacagaatggtgtgattcgttgattggattacagtctggatctctcttgcatcaaatggttgagcaaggcaaaccacgaagcatcccgacgaaggcgaagaaatcgccgttcgtggaggtagaggttgacgagattggccaggctagtggggtggtgtttgcaagggaatcaccgctggcgcctaagagcgaccaaggatgcagcgttagccatagtcatggcgacgacgaaacacatgaatcggatgggtgcgtgcaaagccaggggctagacgagcatgggtgggtggacttcggtcactcactgcagctggtgctgttctcgcgacagtggagcctcgctgaaagtcttgttgacctagcagatcagcagccgatgctggattatggcctgtcgattgcccttgatgccatatggtttttgcggacgaaacaggatcttgaggggctcaacagtctgatatcgaagattgtggcctcaggggcaaaggattttgcaagagcaatcctcaggacatcgctgctcgcgtcatgtgttgcagcgtgccaaagcaaggctatcactgtgggtaacagcaaggagatcgtcgcagagagattgcatgatcgtctgcgagattgtccaggtgctgagcatctaaaaatagaggcaggtgccaaggtgcagaagttcatggaatgggctttacagtgtattcatatgcatcattgttctgaagatacacatatgtacagatggaactacaatactctccaagaggtacagcttcatgtatcagcatttaggaccttcttggacatagctggtgacaacttaagtggcaagatttttactgaggcatttgatgcggtctgcttcccccttacactcttctcaagtttatttgaacctggatggtcttctgggagttcagcagtctccattaagggccttttatcattgctggtggaaggaggcgctgacaatgtaaatcagtgttttcttgaagcagcgcgctttggaagtactgaacttgtacgcattctgctgaaggtcgcatatcagaatagcttggctgtggacaccgatctggctctggtgtatgcctcacattactgcaagttcaaaacaatggaatgcctagttgatgaagggaacgtgagttctttccttggccctctgataaaagctgcagagcgtgggtgcttgcaggttgtccactggttcgtcagtcgaggcgtctctgacattgagatgtgccttgccctgacgactgctgcctccagcggccatttcgtagtggcgtcgtacatgcttgcacatatccctcagcaaatccttgaagctctcagcacacagatcctcaaagccgcgaggggccagggcagcaggccgcttgatggtgtcaccttccttctgagatccaacttcctaagagacgcagctgcaacatatgaggccgcagacatcattgcaaccgggggcaccaacggtgagctcccggacctggttgccttcctgaaagaacactggtcccaggacgcgtttgctgaaggggtgagcgccggtgaaatgcacttcgtgaatgtcatgagggtcctcaggagaggggcgtccccgatctgcctggaggacctcccgcctgagatggtgctcggcatcacgtacctgccactgtaccgtgagtgcctgagcgcgggtgggcagctgttgccccaaaggctgaggggggagctgctggaggcggtgcaccggctcggtgagcccgttggcccggagagccaggggaaggacctcgtgctggcactagagcgccacatgccgtcgttcttggttggatcctgagatgtttccaggttgtaaaagaagcttgtgcaggctataccttgctttaaaaaattgtatggagcagtgttgattaccaacttctggctgcggtggaatcagcaatagatttggcgcgtcacatgtctcgtgatcgtgtagaaagattttgtttttgttttgtattttgcatgagaaagaagtttctttcttgattgcctattg

SEQ ID NO: 13580 - DNA, 903 bp, Zea mays
  Clone ID: LIB143-004-E1_FLI
ccaatccaccacccagccatgcctcccaagcgcaagtccccggcgacgattgcccctgccgcggggtccccgaggaagacgcggagcatggttgctgctgctgctgcagggaagcgggcaacggagcctgctccggcgaaggcagtgccggccaagaaggaagacgaggcggcggttgccgagttgaaagggaggaagaggggcaagaaggaagccgaggcggtgacggtggccaccgagccgaaagggaggaagagggacaagaaggaagccgaggcggtgacggtggccaccgagccgaaagggaggaagaggggcaagaaggaagccgaggcggtggcaccagcggcagaggaggaggatggggttgatgtggcggctggagcgaagcgtgtcatcgtcgaggcctgcactcagtgcagacagtttaagatccgagctcagaaggtgaaggaggacctggaaagttatgtttcgggggtgtctgtgataatcaaccctcagaagccacgccgtggttgccttgagatacgtgaagaaggcggcgaagtgttcatatcactgctgaacatgccacgccccttcacaccaatgaagaagctcgacatggacaaggttatcaaggacatcgccaagaagatctcctaaatcatgttggctggctatggcttggcggcaccattttgtgattgaaatattcaatctaagatcgtaatcttcaaagggtacggtgtaccttaggtgtaggtcccaatcagtggcgtttcctattgcattggccatgtgcccatgtctcgtactcgtacctatatgcttgtgctgcattgctggggcatatcattttctgttatatgatatatgccctgaaaattccttgacttctgatctaccatgttctctgcc

SEQ ID NO: 13581 - DNA, 554 bp, Zea mays
  Clone ID: LIB143-004-E9_FLI
ggggcacgtcctccccaacgcgctcgacatcaccgccgtcgactgggtcaacgccgcgccgctcccgtcccccgtggcccccggcagcgccgtgcgcctcacgctggcgaaggtgaaggaaggggtggaggtcgcgcagctcgtggagaaggtggccgcggccacccaggccgccggggacgccaaggtgagcttcggggagaacttttccccggcgcgggccaaggggtaccagttcgggatggtggcggtgttcgacagcgtggaggagctggacgccgtggaaggggacggcaaggtggaggaggccaaggcctcggtcaggccgctgctggacgaggtgatggtcctggacttcgtcgtcggagatgctccaacgcccgcgagcctctgattacaggctgcagggtctcactttcgggattctgagtgtgttgttgatgtcggaataatggatagatggactccctggtcctgcagcttttcaacttgtgatttgtgaaattgggaatgacagtgcaatgaataagaattgcttccctcgattaaggatc

SEQ ID NO: 13582 - DNA, 1519 bp, Zea mays
  Clone ID: LIB143-004-F12_FLI
ctttggttcgccagaaagctcttgcttatgggtccatctttccacggttgattctggtcgcccggcggccagaagcccagaacctttgctggcaggccgcgaaccaaccaaacagctgaagtctgacgacgagccttggttcagagaaacagggcactgggtttagagcccttcggatctagtattgtcgttcaccggcggcgaccaggccaaaccctagaaccttgccaagatgaggtcgttgcgagcggcgcagaccctagtctcccgttcccttttctcagcgcgccatctaagcggcgcagcctcccccgccacggccgccgccgcgggcgcgcggtggtgtgcagcgccggcgccaccgccccgttcgccgcttccatcctcgagggtgatgcctgccggggttgccggcgcagtatccttctcccttaccttcgctactgtagcggcggcggaggccaaggccaaggagcgaccgcaaccggatctgttgccgcagaacgtggtgctgtaccagtaccaggcgtgccccttctgcaacaaggtcagagcctttttagattatcatgatataccatataaagttgtggaagttaatccattgagcaaaaaggaactcaagtggtctgattacaagaaagttccaatattgacagtagatggtgaacagcttgttgattcatcagatataatcaatatactacagagcaggatcaaccccaatgaagaactcactagtgacgaggaagcaaaatggcgaaggtgggttgatgagcaccttgtgcatgtcttatctcctaacatatatcggacaacttcagaagctctagaatcttttgactacattgcaaaacatggtaatttcagttttacagagaggtttgccgtgaagtatgctggtgctgcggccatgtacatggtatctaagaaactaaagaagaaatacaacataactgacgagcgtgcttcattgtatgatgctgccaatacatggatcgacgcactgaacggaagagatttcctgggtggctccaagcctaacttggcagatcttgccgtcttcggtgttctgagacctatccgatacttgagagcaggaaaagatatggttgagaacactgaaatcggcgattggtaccgacgcatggaagacgcagttggagaaccatcaagaatacaggatgcagaaggaaactagaattttgacaacattcttttaaatactttagcggtatccgtgcctatgcatggaggctattcaaattttttgccagaatcaagtgtatgcaataatgctctgccagattattaagtatactagcacctgaggaacagtgtttgacttgggaacttggttgtgttactgtgtaaggttttgctcccctagctgttcacgtctgtattgtctgcgatgtggttttgaagattcagcatcagcgattctgctgtgccttgcatacagtttaaagaatttcggaatgctggatctgccgaagcgatagattcatggttgttt

SEQ ID NO: 13583 - DNA, 692 bp, Zea mays
  Clone ID: LIB143-004-H3_FLI
ccgccgccgccggcgttggccggttcggcggcgcagttccgtgggcaggcgcagctcccgcgcttcgccgcgccgcgccgctacgacctgcgcctgcgccccgacctcgtcacctgcacattctcgggcactgctgccgtcaccgtcgctgtctccgcgccaacccgcttcctcgtcctcaactctgctgacctctcaatcgacagcgcctccatccgtttccgggatttggcgcctaaggaggtggtgtttttcgcggacgacgagatcctggtgctcggattctccaaggacctggtgctcggtgagggcgtgctcagtatgaagttcaacggcacgctcaacgaccagatgagggggttctaccggagcaagtaccagtataagggaaagatgaagaatatggcagtgacacaatttgagtctgtggatgctcggcggtgcttcccatgctgggatgagcctgcattcaaggtgattatagtactaaatgaaatatctaataatatgggtgtgctccttcaagtgtttcatctattaggcttttgtgctctgagcaacatctttgttgcacttaaaagaatacatatgtagtagcaagttctactccaacctgtagctttatgatctttccagtctcatgtacacaagcctaataaaatatcaactatttcttacatttccattttgtt

SEQ ID NO: 13584 - DNA, 1092 bp, Zea mays
  Clone ID: LIB143-005-B9_FLI
cgatcttcaagaaagaagaagcaaatagagcacacagtcgagtgtaaaccatccaaccaatcatggcttcgagttccaggagcaccgtgttttcacttcttctcctggtggcgctgctgctcagctgcagcggcatgagcagcgcggcgcggttgctggaagaggcgccgcccaaggaggagcacccacatcctgccgtgccggagctgccagaacctgagctgccgccgcaccctaccgacgtcgtgccgcctgagctgcccaaacccgagttaccaccgcacccggccgttgtccccgagctgccgaagcctgaggtgcctcatcaggtgccggagcagccgaagcccgagctgccaccgcacccgacagccgtccctgagctcccgaaacctgaggtgccgcacccagtgccggagctgcccaagcccgaggtgccaccgcacccgacagccgtccctgagctcccgaaacctgaggtgccgcatccagtgccggagctgcccaagcccgagctgacaccgcacccggcggccgtgcccgagctgccgaagcctgaggtgccgcacccagtgccggagctgcccaagcccgagctgccaccgcacccgacagccgtcccggagctcccgaaacctgaggtgccgcacccagtgccggagctgcccaagcccgaactgcctcctcacccggccgtcccagagcttccaaagcctgaggtgcctcacccagtcgcgccagagctgccaaagcctgaactccctcctcacccgaccgtgccagagctgccgcacccagaggttccggaggtgccaaaccacgagctgccgcctctaccgaaagctgagctgccaccgaagccggagggccactacccggagccggaggcgaaaccatgagcggacgtacggtccgagactcggttatctgcacattttcccgcatgcacacgtacgtgtctgttgtatagtagctatatatgatttgtgatgttgtgttcttccgtacgagtcagagagcttacatgtgataagctagtagtacctatcagtttggatccatatgtatacctgaatgaataaagaattctag

SEQ ID NO: 13585 - DNA, 517 bp, Zea mays
  Clone ID: LIB143-005-F1_FLI
cccttacgccttcgctcgcgccgccgccgccgccgccgctacgccccgcacctcgcttcatttcgtgtcgccaagatgacgaagcgcactaagaaggcaggaattgttggcaaatatggaaccaggtatggtgctagcttgcgtaagcaaatcaagaagatggaggtatctcagcattccaagtacttttgcgagttctgtgggaagtttgctgtgaagaggaaagcagttggaatttgggggtgcaaggactgtgggaaggtgaaggctggtggtgcttacaccatgaacactgctagtgcggtcaccgtcaggagcacgatccgccgcctgagggagcagactgaagcatgatatagctctttatattattggggtttcctgtagttgctcttgtcaggcatgttgtgggggccttatctagtggaaatgtggaatcactgtactggctgttttgccgagacaatgctccttatatttggtttatgctctaggatctcaaagttgtgttgttgag

SEQ ID NO: 13586 - DNA, 1541 bp, Zea mays
  Clone ID: LIB143-005-F3_FLI
gaccccaccgtgccgctcgccgatcgcctcatcgttatgtcaccctccggtgtgcagaaggagaggatggtagcagaggacatgtatgtgatggctgcagatgggaaagtgctttctgcgcctgtagcaaagccatggccaaacaagcctcctaagtgcacggactgtgctcctctgttcatgaaggcgtatctgatgagaggagctggggctgtcattcacagccatggaatagagacttgcatcgcaacaatgctcatccctggtgcaaaggagttcagagtgacccacatggaaatgatcaaaggaatcaaaggtcatggctaccatgatgaattggtcattcctattattgagaataccccttatgagtatgagctcactgactccctaagtgaggcgattgcagcatacccaaaggcaactgctgtgcttgtaaggaaccacggaatatatgtatggggggagtcttggatcaatgccaagacacaggctgaatgctaccattatcttttagatgcttgcatcaagctctatcagctaggtattgattggacaacccctgaacatggttcaataaacaatccaaggagaccgcacagcattttgagccctgaaatttgtaatggatgtcatgctgctgattcatcaaagtgtgttgtactagacattgaggggacaaccactccaatatcatttgtgactgatgtcatgttcccttatgctcgtgataatgtacgaaaacatctgacttctacatttgactttgaggaaactaaagaagacatcaaactattgcgcatccaaattgaagatgatctacaaaatggagttgctggggctgttccagttccacctgatgagggtggcaaagaagaggttatcaattcattggttgccaatgttgaatcaatgattaaagcagaccggaagatcacatcattgaaacaacttcagggtcatatttggaggattggatttcaaaagaaagagctacagggagttgtctttgaggatgttcctgtggcgctaaagaactggcatgctagtggcataaaggtctacatatactcaagtggaagtagagaagcacaaaggcttctatttggcaatacaacatacggtgacctgcgaaagttcctgtgtgggtattttgataccacaactggaaacaaaagagaaacaaggagttattttgagatctctcagtcactgggcgtggacagtccatctcaaatcttattcatcaccgatgtcttccaagaagccattgctgctaaaaacgctggttttgaggtgataatctccattcgcccgggaaatgccccacttcctgacaatcatggtttccgcactatcaaatcattcagcgagatctgaggaatctggtgatctggacatgtctagatatatgtaattcgcgagtgctttagcccgcgtgccagttcatgcagtagaagcattatagcaccgcagcatggcaaaacgatgtgacgtaacaataagttacatggcgaaataaaaactttggttcgttgtgt

SEQ ID NO: 13587 - DNA, 1358 bp, Zea mays
  Clone ID: LIB143-005-F9_FLI
ggtctgccaaataaacccccgaaaagcaggagagcgagacccggtagtggaagactagggttagggtcccagctccgccgttgtctgggcgagtcgagacatggccggccctgcccccgccgttgcagccagtgccgccgcctcacagtcgccgccgatgcagctgccgtcgccgttcgcggagctagtcaagggttcctccggcctcgagaagatcgtgcttcgcggcgctcgcaactgctgtgccgagatctatctttatggaggtcaagtaacatcatggaagaatgacaatggggaagagttgctttttctcagcagcaaggctattttcaaacctccaaaagctattcgtggtggtataccaatttgctttccccaatttggaacacatggaaatcttgagcaacatggatttgctaggaaccggttttggactatcgacaacaacccaccccctttaccagtaaaccctgctattaaggcttatgttgatctgattttgaagccttctgaagaggatttaaagatctggccccacagttttgaatttcgcttgagagtttctcttggaccttctggagatctgagtctcacatcccgaatcaggaataccaacacagatggaagacctttctcttatacatttgcatatcacacatacttctctgtctctgacataagcgaggtgcgtgtcgaagggctggaaacaatggactaccttgacaacttgaaggcaaaggagcgtttcacggagcaaggcgatgctattgtttttgaatcagaagttgataaagtttatcttgccgcaccctctaaaattgccatcattgatcatgagaagaaaagaacatttgtcgtgacaaaagaagggcttcctgatgctgttgtttggaacccttgggacaagaaggcaaaagcaatgcaagattttggggatgcagaatacaagagcatgctgtgtgtggagcctgcagctgttgagaggcctattactctgaaacctggggaagagtggaaaggaaggcttgtgctttcagctgttccttcgagttactgtagcggacagttagatccatcgaaggtccttcagggttgaaaatcctcactttctgcatcttgtacagaagttcattgcccttgatatttgatgctgggctggcgtcaacgccgcatgttccttttgccatttccaccccctatatttctggtcccttttgtatctagaatttgagtgataggttgattccgaataacagtctgtgatttgagcttaggattgggtcatctcatcgatgaatgataccgctggacaaaatgctggcgtacgtgtcagtttcataaatcattcttctcat

SEQ ID NO: 13588 - DNA, 1880 bp, Zea mays
  Clone ID: LIB143-005-G2_FLI
cagtttcactgacggagctcattgaattagttccgcagctggtgagcagatcatcgacatcggcagatgcacatcctgacaagaagaagcttttctcagtgcaagacttcttcagatatgcggaaattgaaggaaagcgattctttgaagagttagacagagatggtgatggccaagtcactctagaagatctcgaaattgcaacgaggaagaggcggttgccaaggaggtatgctcgagaattgttcaggcgtacaagaagcaacttcttttcgaaatcaattgggtggaagcaatttttatccttgatggaacagaaggaagcaaccattctccgagcatataccacgttgtgtttgagcaagtctggaacacttcacaagaatcaaattttgacttccttgaaaggtgctggacttccagccaatgaagataatgccgctgccatgctacggtatctaaatgctgattcagaaggatcaatctcatatggccatttccgcaacttcatgcttctacttccttcagaacgccttgaggatgatcctcggtatgtctgatgtatcctgttagaagaaacctgtgattgaattggctttagggaatagtgactctgcaatcatcaccaattctgacaattatcttctctttacttacaaattcactcaggaacatttggtttgaagcagccaccgttgttgctgtatccccacctatagaaatatctacaggaagtgttttgaagtctgctttagctggaggtcttgcaagtgctctctctacctctctgctgcatcctattgattcaatgaagacacgtgtccaagcatctacactctcatttcccgagctcatttcaaagcttccacaaattggacttcgaggattgtatcgaggttctatcccagcaattctcggccagttttcaagccatggtttgaggacaggaatctttgaagcaagcaagcttgtattaattaatgtcgctccaacacttccagagattcaagtgcaatcaattgcatccttctgcagcacagtcttagggactgcagtccgtatcccttgtgaggttcttaagcagcgattgcaggctggaatattcgacaatgtaggggaggcgattgttggcaccatgcgacgagatggcccaaagggattttttcgtggcactggggccacactgtgtcgcgaggttcctttctatgttgctggaatgtgcctctatgcagaagctaagaaggcagcacagcatgttttgaggagagacttggaagcatgggaagtagtggcagttggagcattgtctggaggacttgcggcaatagtgaccactccctttgacgtgatgaagactaggatgatgactgcccctccaggcacaccagtgtctatgcagatgataatcttgtccatccttggaaacgagggtccacttgggctctttaagggcgcgatcccccgcttcttctggattgctcctcttggagcaatgaactttgcaggctatgagcttgccaagaaggcaatgataaaagatgagaaaaattccagtgagtcaacacgagagatcttgccaagaaagcagtgatcaaccatgcaacttttttattttatttttgggtccatgttgcagagaagcaacagaacatctgcctttttttgatattgggaattacattcccgtagggccttgagatggctgtatagtatacattacatgagaaaagtgctagaggacagaggcacatgctggagctgttgttcttttgctggataggacagctcacttgttttgttatccgacgatgatccatagccttccttgttaaacacgatgtaaatttgctcttgtagttaccctgaggacatttggcttt

SEQ ID NO: 13589 - DNA, 995 bp, Zea mays
  Clone ID: LIB143-006-A2_FLI
gatggacgtgaacaaaattatctgtcaataactctcccacacttaaaaagagaagaactcttctgagtttagactgaccagacattctctaggggtaccatggcaagatcactctccaccgccctcatgaggggacttatgagatcgtcccgtgcatcgacatcagctgctgtgtcacgaccagctatccagcagtttatgaactattcatcaggtcttagtggcactcctaatgcaaatggggactcagtgacaacacgagtagctgctgatcacgacacccatcaagattttcagccaacaagtaaaagttcagatatgtctttcagtgacattgttgctcaggatgtgaaggagcaccctgttgtcatctatatgaagggttatcctgatgctcctaggtgtggtttcagtgcattagcagtgaaggtcctccagcaatatggtgtccccatcagtgctagagatattctttcagatctaaagctcaaagagagtgttaaagcatacagtaactggcctacgtttccacaaatatttatcaaaggagagttcgttgggggatctgatatcatactcaccatgcaccagaagggtgaactgaaggaactgcttggcgatattgcacaaaaagccgaacaaagtggttcttcatgaaacaagcatcagtatttgtgatgcaaacttcccggactggatgttccttctcagaagattttaggtgatcttgcattgttgccctgtggcttcggatttgaatacgttctctgttttgttctgttctgttcttgccagttgtgatggaagatccactcaaggccgaattgcaggagtaaccaaagttctagttctcgataaataaatgccaatgctcgacactattcttttatgcatctagctgcctgccttagcttaagcttgggtgctttaagttgcttttaaactgaacggtgctgttgaaacatgtaattagtatgtgacatgcttatacgctc

SEQ ID NO: 13590 - DNA, 898 bp, Zea mays
  Clone ID: LIB143-006-A5_FLI
cccctctcctacgcagatcgtccaggtaagatgtcgtccgaggcggtgaaggtggcggtgccggagtcggtactccgcaagcggaagcgcgaggagcagtgggccgccgagaagaaggagaagtccctggccgagaggaagaagtccatcgagagccggaagctcatcttcacccgcgccaagcagtacgccgaggagtacgatgcccaggagaaggaactggtacagcttaagcgtgaggcccgtttgaagggtggtttctatgtcagccctgaggcaaagctgctatttgtggtccgcatccgtggtatcaatgccatgcaccctaagaccaggaagatattgcagcttctgcgtttgaggcagatcttcaatggagtgttcctgaaagtcaacaaagcaaccattaacatgcttcgcagggttgaaccttatgttgcatatgggtacccgaacttgaagagtgtcagggagttgatctacaagaggggctacggaaaactgaacaagcagaggatccctctgtctaacaaccaagtcatcgaggagggcttgggcaagcacaacatcatctgtattgaggatcttgttcacgagatcatgactgttggcccacacttcaaggaggcgaacaacttcctttggccttttaagctgaaggccccgctgggaggtctgaagaagaagaggaaccactatgtggagggtggtgatgccggtaaccgtgagaattacatcaacgagctcatcaaaaggatgaattaggttcacgaccaagctcattgtgttctaagaaactttctgtgctctcccaattttacattattaggaagtggatgaatatgcatgcagttttgttgtttggaactagatgtgtatggaagaaatatgatctttt

SEQ ID NO: 13591 - DNA, 1371 bp, Zea mays
  Clone ID: LIB143-006-B11_FLI
cagagatcatgaaagttgcagatttcatcaacgaaattcgtcaggctggcagaaatggagaactttcaggtgagactttcatattcttcaacaagcagatcaaaggaaacaagagggagatcatacagcttggtgtaccgttatttcaacctaccacagaggatgctaattgtcacacagaaccaatcccccttgtcctgcaggctgtcattgaccaccttgttctttggcgtttaataccagaaagcaggaaaccaaatagtgtcgtcatcaacttcttcgatgaggatgaacattcgcagccctacttcaagcctccccatcttgacaaccccatttgcactcttctgctgtctgaaaccacgatggcatttggcaggtcacttgtcactgacagcaacggtaactacaaaggacctctcacactttcactaaagcaagggtccttactagtgatgcgtgggaacagtgccgacatggcgcgacatgtggtgtgcccgtcgtccaaccggcgcgtgagcatcacgttcgcaagggtgaggccatcgacgccggtggacatgagcccactcccgtcccccaccaaggccatgacaccctggcagccgcagccggtcacggcctcccaggtgccgtcgcccgtgagcatgacgcagaagcccccggtcagcggtgccataatcggttatgccccgaccccgcaggccgtgctggcgcccgcagcctggggcatggccatgcgcgcgcccgtcatgatggtggctgcagcgcctgcgaggcccatggtgatggcctcatcgggcaccggcggcggcaacatcagcaagcggatgggccgcagcggcaccggcgtgttcctgccttggacggtcggcccgaagcggtacaacaagcaccttccaccgcgcatccagaagcgccggttctcggcgatgatgtcgcccatcgaggcgcagggctgaggacccgcccgacgtcatgtcgccgtcaaaccgaacggccaagatcaagtaggacccggtgcaacgagccaccgtttaattcctagggttcttggagtgttttttttttctctctcgtcgtcgagtcaaaaaaagaaaaaagaaaagaaatggtcaaaacgcgcggacagtgagtttggacgtctgtgtatttcggtgacctgtgtttttttttttctctggagggcttttggtccgcatgtaatttagccgggtttgtgacttgtgactttgtgagtgagtagcggagtttagaagcggtagaagaatatgggtctagggataggtgaagtcagaatcaggacaaggtttttcgtttgttttcatccttcttttttcagttttttaagatgatgcttttagttttgct

SEQ ID NO: 13592 - DNA, 1994 bp, Zea mays
  Clone ID: LIB143-006-C7_FLI
gattcgctccctcctaccgcaaagataggaataatcacctatgggagaactgtctcagtgtatgatttctcagagggggcagcagtgtcagcggatgtgctacctggaaacaagtcgcctacccatgagtctttgaaggccctaatctatgggacaggtgtttacctgtctcctatacatgcttcgctacctgttgcacacacaatattctcatctctgagaccctatcagctgagcgtgccagaagtgttaagggatcggtgtgttggagcagcagtagaggttgcccttggtattattcaagggccatcagtggagttgtctcgtggaatcatcaagagatctggtggaaactgtaggatcttggtgtgtgctggtggccctagcacctttggaccaggatcggtgcctcattcagctaaacatcccaactatgcttatctggagaagacagctatgaagtggatggagagtcttggtcatgaagcacagagacacagtactgttgttgatatcttttgtgctggacagtgtcctgtgagggtccctgttctgcaaccattggcaaagtgttctggaggtgtgctcttagctcatgatgactttggagaggcctttggggtcaatttgcaaagggcatcaactagagcagctggttcccatggcttatttgagatcaggtgttcagataacatgtatgttactcaagttattggccctggtgaagaggcttctcctgattctcatgaaacgttcaagcatggtagttccttctgtatccagatgcatagtgttgaggaaacacagagtttttctgtgtctatggagacaaaggctgatatcaaaagtgattttgttttctttcagtttgctgtccattattccaatatatatcaaacagaaatcactcgggtgatcactatgaggctgcagactgatgatggtttgtctgcatatctggcaagtgtgcaggaggatgttgcggcagttatcattggtaaaagaactgtattgcgtgccaggactgcctctgatgctattgatatgaggctctcaattgatgaaagagtaaaggacatagctctaaaatttggtagtcaggctcccaaatcaaagctttaccgcttcccaaaagaactagcatcactcccagagtgcttgtttcatctgaaaaggggaccacttttaggtagcataatcggacatgaagatgaaagatccgtacttaggaatttgttcctgaatgcttcgtttgacctttcgctccgtatgttggcacctcggtgcataatgcatcgtgaaggtggtacatttgaggagctgccagcatatgatcttgtcatgcaatctaatgctgcagtggtactggaccatggaacagatattttcatttggttgggtgctgagctagcagcccaagaaggacaaagtgcagcagctttagcagcatgccgtactctggcagaagagctcagcgagaaacgttttccagctcccaggatactttcattcaaacaaggaagctctcaggctagatattttgtctcacgcctgatcccagctcacaaggaccctacatatgagcaggagtcaaggtttcctcaattgcggacactcactcctgagcaaagggctaggctaaagagcagcttcatccagttcgatgactatagtttttgcgagtggatgcgcagcctcaaattggtcccaccagaaccaagctaacacaactagtctggggggtacacttccgaacggtggatagcaacagaatctatggcgtggcatctgatagagctttccctctaagatagatgtgatcttcatgaaccaaattatggcatcgccagatattcgtgagccgatcatacgtttggtttggtgggcagccatttaggtgcggtggaactgtatgattttgcataattcattttcttctccttttgaccatgatgtagtagagtaagttcataaacagttccttgtcaattgtc

SEQ ID NO: 13593 - DNA, 1383 bp, Zea mays
  Clone ID: LIB143-006-F6_FLI
tccgagtccagggggcaggggcaccattaccgagtagtttaattagtgctagttgtattaccattgttagtgacttaattaccctcacgcgaagcaccttacctctgctagtcctcctacgtctcttctcttcgcttaatcttgtactactgctctgttataatcagcgggaaggaggaagatgacggtgacgccacggatcacggtgagcgacgggcggctgacggtgcgcggccgtacggtgctcaccggcgtgccggacaacgtgtcggcggcgcacgcggccggggcggggctcgtcgacggggccttcgtcggcgcccacgccggcgaggccaagagccaccacgtcttcaccttcggcacgctccgggactgccggttcctgtgcctgttccggttcaagctgtggtggatgacgcagcggatgggcgtctccggccgcgacgtccctctggagacccagttcatgctcgtcgaggtccctgccagtgacggcgacggcgacgacgcccccgcgtacgtggtgatgcttccgctgctggaggggcagtttcgggcagcgctgcaggggaacgaccgcgacgagctgcagatctgcatcgagagcggggacaaggcggtgcagacggaccaggccgcgcacatggtgtacctccacgccggcgacaaccccttcgacaccgtcaccgccgccgtcaaggcggtggagaagcacctgcagacgttccaccaccgcgacaagaagaagctgccgtcgttcctcgactggttcggctggtgcacctgggacgccttctacaccgacgtcaccgccgacggcgtcaaacacggccttcagagcctgtccaagggcggcgcgccgccgcggttcctcatcatcgacgacggctggcagcagatcgcctccgagaacaagcccgaccccaacgtcgccgtccaggagggcgcgcaattcgccagccggctgaccgggatcaaggagaacaccaagttccagaccaagcccgacggcgacggcgacggcgagcaggcgccgggcgggctgaagcgactggtggccgagaccaaggacgcgcacggcgtgaagcaggtgtacgtgtggcacgccatggccgggtactggggcggcgtgacgccgacggcggggacggcgatggagcgctacgagccggcgctggcgtaccccgtgcagtccccgggcgtgacgggcaaccagccggacatcgtcatggactcgctgtccgtcctggggctgggcctggtgcacccgcgccgggtgcgggacttctacggcgagctccacgcgtacctcgcctcctgcggcgtcgacggcgtcaaggtggacgtgcagaacatcatcgagacgctgggcgccggcca

SEQ ID NO: 13594 - DNA, 671 bp, Zea mays
  Clone ID: LIB143-006-G9_FLI
gccatatctcacgatccactcgagcaccaagccgagggaaggtgaggagctatggcgcgcggcgtggtgtcggcgaagggcggcgcggtcgcgggcaagaagaaggggtcggtttccttcacgatcgactgcaccaagccagtggaggacaagatcatggaggtcgcctcgctcgagaagttcctgcaggagcgcatcaaggtcgccggcggcaaggctggcaacctcggcgactccgtcaccatctctcgcgagaagaccaaggtcaccgtcacctctgacggacccttctccaagaggtacctgaagtacttgaccaagaagtacttgaagaagcacaacgtgcgggattggctacgcgtggttgctgccaacaaggaccgaaacgtctatgagctccgctacttcaacattgctgagaacgagggcgaggaagaagattagattgcactacgcttatattttagtattgaactcgttgcattttgatacctgtacccgtagtttcgcaaatgtcccatgttatggtgtggtatggttaatttgaagaatccttatgtactgaatctctgcaaaaagctatgttgtggacagaagtgtaacgtgccggatttcttgcatttcttagggctattttgagaaccctattttcttaaggggtttttattttt

SEQ ID NO: 13595 - DNA, 1607 bp, Zea mays
  Clone ID: LIB143-006-H5_FLI
cgaatccgacgctccatcgagtgtgtgcggtggcggcgggaggagacgaaagagaaatatgcaggcggtggcacgggcggcgcgtgggctcgcggctgcggcggtggcacgggcggcgcgtgggctcgcggctgcggctgcggctgcgcggccgtcggtgatggaggcagggcacagcgggcaggtgcagcaagctcggggcatcgtggtgcaggtgagggacgggaatctggagccggcgctgtcgatcatggagcgcaagatgcggtccagcggcacggagcgcctcatccgggcgcacacccttctcgacatcaaggactcggagaaccgcttgctcgcgcttaaggagcttatgcagcgtgtccgttcccaggagctcatgctccgcaagatcgtcatcaagcagatcagaaccatggaggaggataatgcagactggtgcgatgaaaatgttaagatagcttgtgaaatatttgctgaggaagtaagagcaaagaacagatcaggttctcacttaaacaagcttgggtacaacaatgtaatggtcaagttcaaagagaggacagggaaaacttacagcgagctacagttcaaaaataaatgggacaagctgaaaaaagattatagtaattggaaacaattgggaaaagagacaggatgtggttgggaccctaacaagaagttgtatgttgctccagattggtggtgggagaaggcaaacatacaattcaaaggcattagcaagtttaaagacaagtcacttcaaaatgcagaagaattgagtgtcatgtttgaagatcttcggaacaccggtgatgatcactgggtcccaaccagtggtgagctaccccaagacactgaagcacaaatacacgatgccatcaacattgaagatgaaaatgctagtgattgtggggaagacacaccatctagttccacatccaagagacgtcgtgtggttgtgacagataaaggtaaaaaaccgaagactacgggaggacaatggatgcaagaccagatgtctaaactttttgaattgaataagcagacaacaacatcttgtgagtctatggtcctggcaagaacacaagagacacctggatcttctataaaagatgttatgcaattagataaaggtaaaaaaccgaagactacgggaggacaatggatgcaagaccaaatgtctaaacttgttgaattgaataagcagacaacatcttgtgagtctatgttcctggcaagaacacaagagacacctggatcttccataaaagatgttatgcaattggtgaaggcatgtggtgctatagctggcagcaaagagcacttcattgcaactcaagtctttaccaaaaaaaaatgaaagagaaatgttcttgactttggatacacccgaggagcgctttcagtggttatcaatgaagtatgaatggatgacaatgaacaagaagggctagttagagctactttgttatgcatttatcgtgtcattttttgtttttaccttaccaaacttatctattagaataaattcaaacattctggggaaacaattagtagaaaatttatggaaattttctgttgtgtggtgggcatgtccaacc

SEQ ID NO: 13596 - DNA, 1119 bp, Zea mays
  Clone ID: LIB143-011-A9_FLI
ctcaggtaccgggaagacgacgctgtcgacggatcacaacaggcttctgatcggcgacgacgagcactgctggagcgagaatggcgtgtccaacatcgagggcggctgctatgccaagtgcatagacctgtcgcaggagaaagagcctgatatctggaacgccatcaagttcggagccgtgctggagaacgttgtcttcgatgagcatactcgtgaagttgactacgccgacaaatctgtcaccgagaacactcgggctgcctacccgatcgagtacatccccaacgccaagataccatgcgtcggcccacaccccaagaacgtgatcctgctggcgtgcgacgccttcggcgtgctcccgccggtgagcaagctggacctggcgcagaccatgtaccacttcatcagcggatacaccgccctggtcgccggcacggaggacggcatcaaggagccacaggccaccttctccgcctgcttcggcgcggccttcatcatgctccacccgaccaagtacgccgccatgctcgccgagaagatgcagaagtacggcgccaccgggtggctcgtcaacaccggctggtctggcggcaggtacggtgtgggcaagaggatccggcttccctacaccaggaagatcatcgacgccatccactccggcgagcttctcaccgccaactaccagaagaccgaggtctttggcctggagatcccgactgagatcaagggcgtgccgtcggaaatcctcgacccaatcaacacctggacggacaaggccgcgtacaaggagacgctcctgaggcttgccgggctcttcaagaagaacttcgaggtgttcgccagctacaagatcggggacgacagcaacctgaccgacgagatcctcgccgcaggccccaacttctgaactaaagcagtgggtccggatgaataaaacggtggtatgcgtgtgaagaagatgatgatgacgacgaaaaaagtgtgttggatcgatgggccaacacagtgtagactagcttttgtatattatctcgggttggaaatctggtgttgttacctaaaatgttggtttctatcggcttgttgaaaacagtttgcgcgtgcttgcatcttggcccc

SEQ ID NO: 13597 - DNA, 737 bp, Zea mays
  Clone ID: LIB143-011-B5_FLI
cgctcactgacgacgaggtgtccaacctctgctccgaattcctcaccgcaggcaccgacacgacgtccaccgcgctgcagtggatcatggccgagctggtgaagaacccggacgcgcaggagaagctctacagcgagatcagggcaacgtgcggcgacgaccaagcggaggtcggcgaggaggacacgcacaggatgccgtacctcaaggccgtcgtgctcgagggactgcgccggcacccccctgcgcacttcgtgctgtcgcacaaggcggcggaggacacggaggtgggcgggtacctgatccccaagggcgcgacggtgaacttcacggtggcggagatgggctgggacgagcgggagtgggacaggcccatggagttcgtgccggagcgattcctgtcaggcggcgacggcgagggcgtcgacgtgactggcagcagggagatcaagatgatgccctttggcgccgggcggcggatttgcgccgggctcggcatcgccatgcttcacttggagtacttcgtcgccaacttggtcagggaattcgaatggaaagaggtggccggcgacgaggtggatttgtctgagacgcgcgagttcaccaccgtcatgaagaaaccgctccgcgcgcagctggtgcgcagaacaacttgtgtatgaatggcgattaatggcccatcaccgcgtctgtagaagtccaaaaaaaccatccttctggctcttggctcttctctc

SEQ ID NO: 13598 - DNA, 847 bp, Zea mays
  Clone ID: LIB143-011-B7_FLI
cgtctgcaccgaatcgatcgatcggtgcttttaatctctgagcaagcgatcgagctcaccaacaaccaccgcgctcaagagtagcagccggccggagccgaaaacgacgaggcggtggcatggggaggccgccgtgctgcgacaaggtgggagtgaagaaagggccgtggacccccgaggaggacctcatgctcgtctcctatgtccaggagcacggccccgggaactggcgcgccgtgccgaccaacaccgggctgatgcgctgcagcaagagctgcaggttgcggtggacaaactacctccggccgggaatcaagcgcggcaactttaccgaccaggaggagaagctcatcatccacctccaggctctccttggcaaccggtgggcggcgatagcgtcctacttgccggagaggacggacaacgatatcaagaactactggaacacgcacctcaagaagaagctgaagaagatgcaggccggcgaagggggcgggggagacggcgacggcgcagcaggtgcctcggaaggcggcgccgtcgccaccgcaggcgcgggagggaagcgcccggccgtgcccaaggggcagtgggagcggcggctgcagaccgacatccacacggcgcggcaggctctgcgcgacgcgctctcgctggaaccttcgccttcggcgccgccgccggctaaggtggagcctctgccggcgaccgccccggggtacaagacgtacgcgtctagcgccgagaacatcgcgcggctgctggagggctggctgcgccccggcagcggagggggcaaggggcccgaggcgtcgggctcgacgtcgacgacggccacgacgcagca

SEQ ID NO: 13599 - DNA, 916 bp, Zea mays
  Clone ID: LIB143-011-D8_FLI
actgatgagcctctgtcgtcgtcgtcatcagtgaaccaggcgaggcgacgatcggacccgggtcgtaagcggtaagcccaccggctcaacagcaggctgcagatccccccaccccccacgcaactccatctcctctccgcctccacctgcacccatcgagcaccgaacggcggcggcatggaggctggcggcgaggagttcgcgatcggcgtggtgatctccgcgaagaccaccctgggggaggagttcgagggccagatcgtcgccttcgaccgcccctccaacctcctcgttatccaggagggcgtgggtagggcggagaggggggagcggaggaacgtgagggtcctcaaagcgaactacatccgggagttctcggtggtcagtaagggtgacgaccctctcgatcctgccagctgcatgctggacctcaactccatttatgcccgggaggatgctgcactcaggcaagcagagattgaagctgagagaattggtgttggtgtcaccccagaagctcaaagtatatttgatgcgctgtccaagacgcttccggttcagtgggacaagactgacattgtcgtaatgaaggaggttcgtgtacgcagtccgtacctgcctgaaaatgttaatggaggaacagctgcagcaaatgaacgcgttaagaaagtgattgactttgaaaggaaaagattacattcacgtgtacctggccaattctcttgattaaaaggcttgactattttttacattagcctcgtgttgtatttctaatactgcatccagttttcttattctcatcgatgcggttttctataaaatgtttcagcaaaaatctgtcgtaataatcacatcaactagctagatctgtactgtttggtagttattcagatttttataaaaatattttggatcc

SEQ ID NO: 13600 - DNA, 1776 bp, Zea mays
  Clone ID: LIB143-011-G1_FLI
cctgcatcaggatcatcatcaggttctccgttccactccatggccttccctgctgtgcccctcctcgccgctctgctcctggtcgccgccacgcggctgtgggactacgtcttcgtgcgcctcgtatggcggccgtacgccatcaccaaggggttcagagagcaagggatccatggaccctcctacaggttcttcaagggctgcaacgaggagatcaggagcatgaaggagaagaccgacggtctcgtgctggacgtcggcgaccacaagtacctcccgcggatcgcgccgcactacctcgaatggagggctcagtacggagaaccatttctatattggtacggggcacaagcccgaatttgcatatttgactacgaactagcaaggcaaatcctttcgagcaagtctgggcatttcgtgaagaacgatgcgcaccctactttgttggctctggtcggcaagggactcgggttcatggaaggctctgactgggtgcgccatcgcagggtgatcaaccctgctttcaccattgacaagcttaagattgtgaccgagacgatgctggacttcgccgatagcatggcaggtgagttggaagctgaagcatcccagaacgagaacggagaaacacaagtggatatatacaaacatttcagcgatctgacagttgacaatatcgcctacgccatctttggaagcagctacaagttaggcaaacaagtgttcgaggcacaaactgagctgctggggatcaccatggctactttccttgacgtgcccataccaggatccaaataccttccaacccaagcgaatcggcgaaaatggatgctggagacgaagctcaagagcttactcacgcggatcatacagccacggttagcaagcggtgagcacggaaacgatctgctgggcgtgatgctggactcctgcactgagaccaagcaaggagggaagcagcagcaagtggatcgtctgcgtctcagcttgagcatggaggagatcatacacgagtgcaagctgttcttcttcgctggccacgagaacacagcccttctcctcacgtggtccgtgtatttgctcagcatataccccgagtggcaagaaaggctccggaaggaggtcttgagggagttcgggagggacgctcctaaccccaacgcgctcaacagattgaaagagatgacaatggtgttgttcgagaccttgaggctctactcgcctgctctcttcatgcaaaggaagaccctggccgacatgaccgtggggccaataaaactgcccaaaggcactgcaattgtgatacccattccgatcatgcatcgagacaagcaggcatggggcgacgacgcagacgagttcagtccgatgagatttgcgaatgggatcacgggagcagcgaaagttcctcacggcctgctggcgttctcgatggggccaaggtcttgcatcggccagaacttgtcgatgctggaagccaagtcgacgctggccctgatgctccgcaagttctccttcgctctctcccctgactacgtgcacgcgcccgtggatctcttcactctcaaacctaagtttggccttcccgtcattctgaggccactggataatgttttgatttgagttgggcatatagtacaacaggaagtaacttaggtacatatcaaatttgctagctggtcaaaacgttatatgatgttctcaaccctccgttgttctatatcgttgaaaacaagtattttaatttaggtgcggtttggtttggcgctgcaagcg

SEQ ID NO: 13601 - DNA, 1879 bp, Zea mays
  Clone ID: LIB143-011-G12_FLI
atcgagtggagtcagctagctagatactccgtggtcgtcgtcgtcgttggacgtacgccagaagagggagctagagaagaataccgtacagctgcttccaacatggcagctgcctcgtctgcccacctgttcggactcggcgacgggcagatgcagatgcagccgcagcagcagcaggcgccgcctcctcctcttgtgaacaacccggccgcgccgccgcccaagaagaagcggaaccaacccgcagaccctgacgcggaggtgatcgcgctttcccccaagacgctgatggcgacgaaccggttcgtgtgcgaggtgtgcaacaaggggttccagcgggagcagaacctgcagctgcaccggcgcgggcacaacctgccgtggaagctgaagcagaagaaccccaaggagacgcggcggcgggtgtacctgtgcccggagccgacgtgcgtgcaccacgacccgtcccgcgcgctgggcgacctcacgggcatcaagaagcactactgccgcaagcacggcgagaagaagtggaagtgcgacaagtgcaacaagcgctacgccgtgcagtccgactggaaggcgcactccaagacgtgcggaacccgcgagtaccgctgcgactgcggcaccctcttctccaggagggacagcttcatcacccaccgtgcgttctgtgatgcactagcgcaggagagcgcacgggtgccgcccatgggcgccggcatgtatggcaccggcggcatggccctcggcctctccgggatggccacatcacagctgcagtcattccaagaccagacccactcctcggccactaccgccatcagcagcaacccggcggcgcagttcgagcacctcatgcagtcgtccaccggctcccccgttttccgcggcgcgcaaccgacatcatcgtcttcctcgccgttctacctcggcggcgccgaggacggccatcaaagcctatccggccacacctctctgctccacggcaacaagcaggcctaccacggcctgatgctgttgccggagcagcagcaccaggcggggagtaacggcctcctcaacctggggttcttctctggcgggagcagcggtcaggacgcgcgcctcgtgttcccggaccagttcaacggcgccgttggcgggaacgtccgcggcgacggcagcgagcacggccacagcggcgctaacacggaatcagcggccatcttctccgggaacctaatgggaaaccaccaaatggcaagcagcgcgggcttttcttcctccttgtacaactcgtccgagaccgttgcgccggcgcagatgtcggcgactgcgctgctgcagaaggccgctcagatgggcgcgacgacgagcagcggcaacgtgaactctctgctcagggggcttggtagcagcgccggcggcaccttgaacgggaggcctgccggagcagcagctgggttcatggccggcgagggatcctcgtcgaggagcacttcccaggccgagaacgagagccagttccgggacctgatgaacacgctcgcagcttccgggagcggagctgctggcacagcgttcagcgggggtttcccgggcatggacgacagcaagctgagcacgagagacttcctcggcgtcggcggcggcgtcgtgcggagcatgggtggcgcggcagggctgccgctgcggcacggtgccgcgggcattggcatgggctcattggacacagaaatgaagtaggcgaatcgaaatccgaaacgagcattattatgctccactcttgggctcttgcattgcatgcaaggtaagtagtagcagcctaagcaaacgacctatggaaagatgagaccatttgcgcccaaaataacaaatgaggccgtcaaccatc

SEQ ID NO: 13602 - DNA, 1441 bp, Zea mays
  Clone ID: LIB143-011-G3_FLI
ccacagcccagcgacagcgagcaccggcggcatccagccatgtgcggcggcgccatcctgtcggacatcatcccgccgccgccgccgcggcgtgtcacggcgggccacctctggcccgagagcaagaagccgaggagggctgcagccggcaggaggagagcccccgtggagcaggagcaggaggaggatttcgaggccgacttcgaggagttcgaggtggagtccggcgagtcggagctcgagtccgaggacgagcccaagcccaagcccttcgccgcccccagcagcgcgctcgccagaggtggactaaacactggtgcagctggtgtcgatggccctgctgcaaattcagttaaaaggaagaggaagaaccagttcaggggtatccgccggcgcccgtggggcaaatgggctgctgagatcagagatcctcgcaagggcgtgcgcgtctggctcggtacattcaactctcccgaagaagctgccagagcttacgacgccgaggcacgcaggatccgcggcaagaaggctaaagtcaacttcccggatgaggttcctacggcggtttctcagaagcgccgtgctgctgggcttgcctctctgaaagcgcctaagatggacgttgaggaggagaagccgatcatcaagctcgcagtgaacaatatgaccaactcaaacgcatatcactaccctgccgtcgtcggccaccacaacatcatacccgagccattcatgcagactcagaacatgccattcgctcctctggtgaattatgctgccctcgtgaacctgtcttcagaccaaggcagcaactcgttcggttgctcggacttcagcctcgagaacgactccaggacccctgacataacttcggtgcctgcgcccgttgccaccttggccgccgttggagagtctgcgttcgtccagaacacggccggccatgctgtggcgcctcctgcgacggggaacactggtgttgatctcgctgagttggagccgtatatggatttcctgatggacggtggttcagacgactcgatcagcactctcttgagctgtgatggatcccaggacgtggtcagcaacatggacctttggagcttcgacgacatgcccatgtctgctggtttctactgaggctgaggcccagcgactggtgcttgactgcttgtgtacatagggggggacaaagggtaagagcctgcagtaacagagattggctctttctggtacttgcaatttctatcccttcaactctttcttccgcccccgtgtttcaggaataatgttctggagatgaagaatcgcttgcgtgggcgtgcctgcaggcacgcgtgtagtagctgcggtattagtatatatgcttagatgttcagtcactttctttaagtacaatttggcgctggacatgtaccttattttactatgtatccgtgacaac

SEQ ID NO: 13603 - DNA, 783 bp, Zea mays
  Clone ID: LIB143-012-B10_FLI
aggcggtgtccgcctacttgtggaaggtcctcgccgccgtcgtggccgcgtgccgcgtgcccgaggagcggtgctgcatgggctggatggtggacgctcggcggcgggtgaagtcgcccgagctgatccccgcgatgcgcaactacttcggcaacgtcacggcctacgcgctgggcggcgcggccgtggaggagatccggcggaagccgctggccgaggtggcggccatggtgcgggataccatcacgtccatagactacgacgagtacctgcaggagctggtggactgggtggaggtgcacaagacggagcacgtgatggagaagggcgtcctcgggctgggctcgccgacgttgaaccagaccgtgttcgcgtcgttcccgctcgacacgaacttcggcttcggcgacgccgcgctcgcgctgcccatctgcgactatgggaggctttgttcgggctacctgtccgtcggagcgcggcctggaggcgacggctcctggctcctcagcgcctacatttggccgcagatggcggcggcgctggagtcggacggcgtctttaagcctctcacggcggagtatctcggtctcacagtcacaccctagcggcgacgtggtcgatctacatgcgctgcatgcatatcagatcagaatcagatatcgttcgtattgctcattgttgattgcatgattgcgcgctaccttgtattgtgtacgtcgttcgtgtaataatgttgcatggtctcgggccagtgctaaataaaaatctctgttaattttcttc

SEQ ID NO: 13604 - DNA, 1327 bp, Zea mays
  Clone ID: LIB143-012-B6_FLI
gttcgtcgggcgtagcggcagcgatgatattttagtcgtactcgtacagaagccacagccctctgctagctagctagctcctgctagaatggaaagtgcaggaggggaagctcggccggtgctgccgccgccgccgccgccggtgcaagagctcgccggcgcagcgaacgacgtgccagctcggtacgtcgcgcgcgcaggcaacgagcccaaggtcacggtaaccgcgccggtcccggtcatcgacctcgcccggctgtgccagccgggcggcggcgccgacgaggcctcgaagctccggctggcgctcgagtcctggggtctcttcctggtgaccaaccacggcatcgaggccactctcatggacgccatgatggacgcgtcgagggagttcttcaggcagccgctccaggagaagcagaagcacagcaacatgatcgacggcaagcacttccagctccaagggtacgggaacgaccgggtggcgtcggaggaccaggtcctggactggtgcgaccgcctttacctcttggtggagcctcaggaggacaggagccttgacctatggcccgcatgtctaagggacgttctgcacgatttcaccacagagtgcacgagagtgaaggactgcctgcttcgagaaatggcgaaggcgctagatgagctcggcgacgacgacgactacttcatcgaccagttcggcgacagggccgacacccatgccaggttcagctactaccctccgtgcgcgcggccggacctcgtcttcggcctgaggcctcactccgacggcacgttcctctcgcttctcatgctagacgacagcgtcggcgggcttcaaggttttccgggacggagcctggtacgacgtgcgcaccagacctcacaccctgctcgtcaatctaggagaccaaatagagataataagcaatgggatcttcaagagcccagtgcaccgggttgtaacaaacgcggagaaagagaggctatcagtggttctgttctattctatagatcctgagagagaaatccggcccgctgacaaactgatagacgagaaccatccagcactatacaagaaggtgaaagtcaaagaatatactgctggactctacgaacatttctctcgagggaaattggttaaagagactgcaaagatatagcttgttcgctttggattaaatccatggactaatccttagagacaaaaacactgtataagtagtaaaagtcggtacgaattaaagctcaagctagtcgtatctatgtaatgaataagggtgaaacctttgcgatcctagataataaatgaaattaatttttaatt

SEQ ID NO: 13605 - DNA, 1383 bp, Zea mays
  Clone ID: LIB143-012-B8_FLI
gcaaatttcaatctccatcgatcgattcctcccgaacccgacccgatggcctccgacgccgccgccgagccctcctccggcgtcacccaccccccgcgctacgtcatcggttacgcgctcgcgccgaagaagcagcaaagcttcatccagccgtcgctggtggcccaggcggcgtcgcggggcatggacctcgtccccgtggatgcgtcgcagcccctggcagagcaagggcccttccacctcctcatccacaagctctacggagacgactggcgcgcccagctcgtggccttcgccgcgcgccacccggccgtccccatcgtcgacccgccccacgccatcgaccgcctccacaaccgcatctccatgctccaggtcgtctccgagctcgaccacgccgccgaccaggacagcactttcggtatccccagccaggtcgtcgtctacgacgctgccgcgctcgccgacttcggactccttgccgcgctccgcttcccgctcatcgccaagcccctcgtcgccgacggcaccgccaagtcccacaagatgtcgctcgtctaccaccgcgagggcctcggcaagctccgcccgccgcttgtgctccaggagttcgtcaaccatggcggcgtcatcttcaaggtctacgtcgtcggcggccacgtcacttgcgtcaagcgccgtagcctgcccgacgtgtcccccgaggatgacgcatcggcccagggatccgtctccttctcccaggtctccaacctccccactgagcgcacggcggaggagtactacggcgaaaagagtctcgaggacgccgtcgtgccgcccgccgcattcatcaaccagatcgcgggcggcctccgccgcgcgctgggcctgcaactcttcaacttcgacatgatccgcgacgtccgcgccggcgaccgctatctcgtcattgacatcaactacttcccgggctacgccaagatgccaggatacgagactgtcctcacggatttcttctgggagatggtccataaggacggcgtgggcaaccaacaggaggagaaaggggccaaccatgttgtcgtgaaataagatgatgattgatggcactggatatctggcgaatgctgctgattctggatgcagaattcgatgaggggatttagttggttgtagtatctggcgaatgctgctggttctggatgcagaatttgatgaggggatttagttggatttcaacccatagcatgccgaggacctcctagctctttccaaaccagttgtttaggtatcttttctgggtaagtcagcttcatctagtttagtctgtctgaacaaaagagtgggacatgacccaaacggaattctaatgaaaaacgagctctctatctgcaatcctat

SEQ ID NO: 13606 - DNA, 1159 bp, Zea mays
  Clone ID: LIB143-012-D8_FLI
cgtcattctcttcctcttccggtgctcgtgctcgtgctcgtgctctccgccctccccctccgccacctcgcgcggaacggaacccaggccgccgccgacccagccaccgctaggcgaccgcgcggcatggtggcgcttttacactacctatgctagtttgcctgatgctacatttccacgatggttaagctgactatgatagcgcgtgtcactgatggccttccattgtcggagggattagatgatagtcgggatctgaaagatgctgacttctacaagcagcaagcaaaactgttgttcaagaacttgtccagagggcagcatgaggcgtcaaggatgtcaattgagacaggaccataccttttccactacatcatagaaggccgtgtttgctatttgactttgtgtgaccgttcttatcccaagaaacttgcattccagtatctcgaagatctcaaaaatgaatttgagaaagtcaatggcagccaaattgaaacagctgcaaggccatatgcatttattaaatttgatgcattcatacagaagaccaagaaactgtatttggataccagaacacagaggaaccttgctaagctgaatgatgagctctatgaggtgcaccagatcatgactcgcaatgttcaagaagttctcggtgttggtgaaaaactagaccaggtgagtgagatgtcaagtaggttgacttcggatactagaatctatgcagagaaggcgaaagatctcaatcgccaggcattgattcgtaaatatgcccccgttgctattgtgattgggatagtggtgatgctcttctgggtgaagaacaagatatggtgactggtgccatcttgcgatttcacagttatcatgctggaaccagctgagttgtcttgtcttccctcgtgcaaccatatgtttgatcgtggtcccaaaaagaaaagatggctcgatggtttatcccgcatctgccgattcaagcgactactttagctatcaaaagcaaaaccacggtagtagagatagccttggaactgcacatttctattaactggacatgtataaatatagttctcgtgagcgcaccatgtaatcgtcgaaattcatccatgtgttgtgacattttttgagcacagttgaacatgtggtggagcctggaggc

SEQ ID NO: 13607 - DNA, 1826 bp, Zea mays
  Clone ID: LIB143-012-F1_FLI
cgacggagaaaaggacacaacccagcccgccctaaaaccctcccaccatcatgtcgctctccacactcagccacccggccgccgccgccgccgggagcggaaaatcccttttcccggctggcccggcggcgcagtccgtacatttccccaaggcacggctccctgtccccgccgccgtctccgccgctactgcggctgttcacgcggaggatagggtttcgtcgctgactcaagtctccggcgtgctggggtcgcagtggggcgacgagggaaagggcaagctcgtcgacgtgctcgccccccgcttcgacatagtcgcgcgttgccaggggggagcgaacgctggacataccatctacaactcagaaggcaagaagtttgctctgcatcttgttccatctggtattctccatgaagggacactgtgtgttgttggcaatggagcagtcatccatgttccagggttctttggagaaattgatggtcttgagtccaatggagtccgctgcggtggaaggatactggtatccgaccgggcacatctgctgtttgatctgcaccaggctgtggatggacttagggaagcagagcttgaaaattcatttatagggacaactaagagaggcattggtccttgttactccagcaaggtaactcgaaatggactgcgggtttgtgatttacgacacatggacacttttggggataagcttgacatcttattcaaagacgctgcttcgagatttcaaggctttcagtacagcaaaagcttgctcaaggaagaggttgagagatacaagaagtttgctgatcgcttggagcccttcattgctgataccgtgcatgtgctaaatgaatctatcaagcagaagaagaaaatcctggtcgaaggcggccaagcaactatgctggatattgattttggcacttatccatttgtgacttcttctagcccttcagctggcgggatatgcacaggcctagggattgctccaagggcaattggcgacctgattggagtggtcaaagcttacacatctagagtcggctctggccctttcccaactgaactatttggagaggaaggtgatcgccttaggaaagctggaatggaatttggcacaacaacaggtcgcccaaggcgttgcggctggcttgacattgttgcgcttaagcacagctgccaaatcaatgggttctcatcacttaatctgaccaaactggatgttctgtccgggttgtcagaaattaaggtgggtgtttcttatacccagactgatggacagaagctgcaatccttccctggggatcttgatacccttgagcaagtacaggtcaactatgaggttctgcctgggtggcaaagtgacatttcttctgttcgaagatacgatgaacttccccaagctgcccgcctctatgtggagaggatagaagaacttgttggtgttcccgtgcactacattggtgttggacctggcagagatgctctcatatacaagtaaaagcaactttatttggtccttggttgggcggaaacctggccgggactcgggagcatttgcattttcttggcgtggtagcttttgatacggtgaagtcactgactcgtggagtgatgttgctcaataatcagaaccttgttctaatacagccgctgagacatcagctaaggcgaataagggaaggatgagtcatttgcaccatgtttgaccaccaattgttaggtggtccatatattttgtactaattgtgagactttgtgctatggatctcaactgtataccttgctggtgcatggctttgggtttacatggttgaaaatg

SEQ ID NO: 13608 - DNA, 614 bp, Zea mays
  Clone ID: LIB143-012-F10_FLI
ctggcatccgcagagagtttgttccgtccaggcaaccaaaaagcgttgccccgccgcgcagaggaagaagagagcagaggaggatggctcgtacgaagcagaccgcccgcaagtccacgggaggcaaggccccccgcaagcagctcgccaccaaggcggcgaggaagtcggcgccgacgaccggcggcgtgaagaagccccacaggtacaggcccggaaccgtggcgctgcgcgagatccgcaagtaccagaagagcacggagctgctgatccgcaagctgcccttccagcgcctggtgcgcgagatcgcgcaggacttcaagacagacctccggttccagagccacgccgtgctggcgctccaggaggccgccgaggcctacctcgtcggcctcttcgaggacaccaacctctgcgccatccacgccaagcgcgtcaccatcatgcccaaggacatccagctcgcccgccgcatccgtggcgagcgcgcgtagccatcatctccgaggatctgatgaatgtctagttaccaaacaaataggccgtattagcgtcgttgttctgtattcgttattttggattcggttgcagggaaaaacagctttactgatctt

SEQ ID NO: 13609 - DNA, 916 bp, Zea mays
  Clone ID: LIB143-012-F6_FLI
gtgaactcaagaagctagtggaagaaggaaaggttaagtacattgggttatccgaagcatctgcatcaacaatccgaagagctcacgcagtccatcctatcactgcagtacagcttgaatggtcattatggtctagagatgcggaagaagatataattcccacttgcagagaacttggaattggaattgtagcttacagtccactaggcagagggtttttttgtagtggagcaaaactagttgactcactgtcagagcaggacttccgcaagcatatgcctagacttcaaccagagaatattgtcaagaatgctaagatattcgagcatgtgaatgcaatggcagctaaaaaaggatgcacaccatcacagctagcattggcatgggttcaccatcagggaaacgatgtttgccccatacctggaacaacaaaaatcgagaacttcaaccagaacgtgggggcgctttctgtgaagttgacaccagatgagatggccgaactcgagtcctgtgctgctgcaggtgaaatcttgggtgaccgttatcctcaaatggccaacacctggaaggactctgagaccccgccattgtcttcttggaaatctgagtagccaatctggtgtctcttcaattctgccaccgtcacattggtgtatctccaaattgtcggactgcagaagatactcaggtgcactttgcaaaagcgtccatatgatgtgcttgccttttgcaagctatgatgtttggtacttggtgtgtattgcatgcctcaatttgtatcaagagtatttacccatgagtatagcttgaaggttaaaaccactggttcgacgaataaccatatgcatttgtatcgagagtatttaccatgagtagcaaactgaattttgtaataatagtcaaaagtgtgattgtg

SEQ ID NO: 13610 - DNA, 533 bp, Zea mays
  Clone ID: LIB143-012-H4_FLI
ctccaagcgcaatggctcctccttgcttacctaggtacctctgcagctagccgccatagcaagctaggccgaagcagaggatctaacagagcggggaaaagaaaagaggagtaatggccaaggtccaccccaacgccgcggggtccgtcgttgccacagcagcagcagtaggccgggccccggcggaggctgatggagagccgtccactgtgctgacggtgtggcgcaagtcgctgctcttcaactgcgacggcttcactgtctacgacgccagcggcgacctggccttccgcgtcgactgctacgccggctccacccggcgctggcgccgcgccggcgtcgtgctcatggacgccagcgggaagccgctcctcaccgtgcgccgcaagacgcggctcggcctcgcggagcgctgggtcatctacgacgccgacgccgacgacggcacgacgacgacggccagggccacgccgctgctctccgtccgccgccgcatcggcgcgtgctgcaagacgctggcgctcgcccactcc

SEQ ID NO: 13611 - DNA, 844 bp, Zea mays
  Clone ID: LIB143-013-A1_FLI
acacctctaagtttcaaactggccctaaaccgctgctctttgggcttgactctgcccgcttttctccatctccacttggtccctctctcgcatggcggcggcggcatcggcgtcgacgccgcagggggtggcggagcggcggggcatcccggcggcggccttcgtcgaggacgtcgaggcctacctccggcaggccgggctcgacgttaactccgccctcgccttcctccaggaaaggttgcaacagtacaaaatagtggagatgaagcttctagcacaacaacgagaccttcaggcaaagattcctgatatagagaagtgtttggatattgtttcaacattacaagctaaaaaggatttgggtgaggcacttatagctgattttgaattatccgaggggatatactcctgtgcgaaaatcgaggatactgactcagtgtgcctgtggttgggtgcaaatgtgatgctggagtactcttgcgatgaggccaatgccctcttgaagaaaaacttggaaaatgctaaggccagcttagaagtccttgttgctgatcttcagttcttgcgagaccagcaaaccatcactcaggttacaattgctcgggtattcaactgggatgtacaccaccggagaagcaaacaggctgtaaaggaaccttaatgagttagatcacgaggtcaaccaatgtgattgggacaaattttttcgtaccttttggtacctctggcagattagtccatcatagcgagctctttgtttgttgatggtttctttgctgtgtaacaatgtatcggtttattctctttaatggtgtgggaacattagtagaagatgaaacatttt

SEQ ID NO: 13612 - DNA, 2147 bp, Zea mays
  Clone ID: LIB143-013-A2_FLI
ccgcttccctccaaatcgaccctggatctccaaccccgattttccccagcagaagcaaacccgagcaaattgagcgcttgaagcttcacccggcgaagcagaatcgaatcggagccgcacgccacgccgcgatggggatcctcctccggtccctcctcgtcgcctcgctcgtcctcagttcgctcgtcttgcacgtcgcagcggctaaaactatagatccttacaaggttctaggagttgacaagaatgctagccaacgggatattcagaaagcctttcacaaactttctctaaaataccaccctgacaagaataaaggaaagggcgcacaggaaaaatttgaagaaataaacaatgcatatgagatcctatctgatgaagagaagaggaaaaactatgacctctacggggatgagaagggtaaccctggatttggtggtggaaattttggaaatcatgggggttctacatacttcactggtggtggccctaagtccagtcaattcacatctggtaatggatggcagacaatgggtggtcaaggaaatacaaaaacgttttcattttcatttggtggtaaacctggggccagtggtggaaacccgtttggtggtggttttgatcttggtgatgttttctcgaacctttttggtggtggaccaatgggtgatagccatattggtggatcaagtggctcagcaagagccaaaactggaacttctggtcagcattctggcactaccaagattgaggatatcaccacacaagttttcaataaagaagtagctgatcaaggaactacttggcttctgttattttatactccccaatctaaaagtcagtttgtgctagagagtgtcatgcaagacgtggtccattcactagatggtgttcttagggctggtaagatcaactgtgacaatgaaaaatctctttgcaaaaggtctggtgtttcaatagggaaatcggcccgtctcttcatctattcatatgctactgcagagaaagggtctttgcacgagtattctggggaacatgatgctaagagcttgaagacattttgtcaagaacacctgccaagattctccaaacgggtagatattagccaattcagcttccctttaaatgttctaccaaaccttcctcaagtgctcttactatcgagtaagaaggacacaccagcaatgtggcgtgctatcagtgggatgttccgcaatcggataatcttttatgatgctgaggttcacgatgtttctcatcctctgctgaaaagtcttggcgtgaagaatctcccagccgtaattggccgaaccgtgaatggtgaggagctccttctgaaggatggcatttcggtgaaagatctcagatctggtgtcaaggaattgaagacattgctagatagttttgagaagaagaataagaagttattatcgaatctagctaataagaaaccttccggtcaatgggaagaaatcaagaagattcctctgctcacagcttccaactttgaggaaatctgtggagagaagacttcagtatgcatcattggtgttttcaggtcaaacaaagccaaggggcagcttgaagcagtcctgtctgagatatctaagaagactctgataagggggcagaactataattccagaaatgctgtctcctatgctttgctggataaggacaaacaatctgcattcctgtcatcgtttgacaagtctggatacaggtcatctgacaatctgctcatcgcctacaagccccgccgggggaagttcgcggtgtacgacggcgaggtgacactggaagaagctgagaggttcgtgggatccgttttgaacggagacgttcaactgtcgccgacgaaacaaaagcctgtccttcggtagacgattattgcaagttgcaagggttttagatctaacacttattatcttaattaaggacctgtacatagatggacgaagagagtaaaatcgtagagcgtttgctggacagttttgtcgttcggtaaaccagagttactaactacatctctccctcaaccgtgccaatgtaaattatgcaaattctgcagtcctgtcgagatatcgaatatacaggcatatagcggaccatttctatacttagccaagttaaccttttgtttccgc

SEQ ID NO: 13613 - DNA, 950 bp, Zea mays
  Clone ID: LIB143-013-C11_FLI
aatacgtgctcggtattttttgatgaggtagattcattgacaacaaaaagaggtaaagagggggggtgggttgttgaacgtctcctaaaccagttacttatcgaacttgatggtgctggtcagcgtaaaggtgtctacgtgataggagctacaaacagaattgatatgatagatgatgctatgctacggcctggtagattcgggaagaaacattatgtacctatacctggtgctcgcgaaagggtttcaatattaaaggcactagccagacgcatacccgtttcatcaaccgttgatttggatgtgttggcacttcgagaagagtgcagcaatttcactggcgccgacctagcatcactggtggatgaggcagccatgttagctatggcagagagatggatgtacctcgatagcaggacatcaacgagtccatcttctctgattgagccatcacactttgaagaagccttatcaaaggtgaagccatcaatatccaaaaagcaaaagagactttacgaaaaaatgcgcaagaaacacttgtcaacaacctgatcagatcaccatacatccatcttgtgtgtgtggcacaaactatgccatcgctacctatgaaaatggttctgccggcactgcagaatgctactataaatttgtgcattacaatcatgcttgaaatataatgataaaccgtatactccctctgtttttttacttgacattttttagttcaaaaacacactatccggcgtcaaatatataagattggaggtagtaccagacatgccgtggcttatttgtactgtcttcacctgctggaatttttgcacgtgagctaccaatgcatggcttgttagttgtgccgtgcttgttcatgatgtaggaaaaaactcgaatttaattccccacctattgtagcagtccgctttgtccgtgcatgtgcttgttaccat

SEQ ID NO: 13614 - DNA, 482 bp, Zea mays
  Clone ID: LIB143-013-D6_FLI
gcggcggccgtggaggcggcggcggcggcgggtacggtggtggccgtggaggcggcggctacggcggtggcgggcgccgtgatggcggcggcggctacggcggtggcggcggctacggtggtggcggcggcggctacggtggtggtggcggcggctacggcggctacggcggctacggcaactccgacgggaactggaggaactgagcggtggggcccgcgcggccaagttatcctgttcgctaccgtgttgtttaccctagtccagagtgtttatcttcgttcgtctcgtgtttgttgttgcccatctgtgtttttgattgaaggtcgctctgtgtcagttgttagtgctgtgttcatcctcggctccagcagacccatgcatcaaccagcatggactgcggatcgatgggtgctgttacccccgtcaggctttattctaagttaaatcctaaggaaaaaaatggtgcttcttggtgctgc

SEQ ID NO: 13615 - DNA, 843 bp, Zea mays
  Clone ID: LIB143-013-E1_FLI
cacctctaagtttcaaactggccctaaaccgctgctctttgggcttgactctgcccgcttttctccatctccacttggtccctctctcgcatggcggcggcggcatcggcgtcgacgccgcagggggtggcggagcggcggggcatcccggcggcggccttcgtcgaggacgtcgaggcctacctccggcaggccgggctcgacgttaactccgccctcgccttcctccaggaaaggttgcaacagtacaaaatagtggagatgaagcttctagcacaacaacgagaccttcaggcaaagattcctgatatagagaagtgtttggatattgtttcaacattacaagctaaaaaggatttgggtgaggcacttatagctgattttgaattatccgaggggatatactcctgtgcgaaaatcgaggatactgactcagtgtgcctgtggttgggtgcaaatgtgatgctggagtactcttgcgatgaggccaatgccctcttgaagaaaaacttggaaaatgctaaggccagcttagaagtccttgttgctgatcttcagttcttgcgagaccagcaaaccatcactcaggttacaattgctcgggtattcaactgggatgtacaccaccggagaagcaaacaggctgtaaaggaaccttaatgagttagatcacgaggtcaaccaatgtgattgggacaaattttttcgtaccttttggtacctctggcagattagtccatcatagcgagctctttgtttgttgatggtttctttgctgtgtaacaatgtatcggtttattctctttaatggtgtgggaacattagtagaagatgaaacatttt

SEQ ID NO: 13616 - DNA, 303 bp, Zea mays
  Clone ID: LIB143-013-E2_FLI
atggagaacggcgtgctcaccgtcaccgtgcccaaggaggaggccaagaagccgcaggtcagggctgtcgagatctctggttgatcgatccgttcactgcatgcattacgagtgcccgagctgtactacaggtagtataacttttcgaaattcgctggtaggacatctgccaagcaaatacaaactgtctatctgtccatcgttcgtgtatggaagtgttgtgcttttggtgtcaagtacgtctggccagtgttttgtgtctatgtgatgtgtaatgcatctgtgcttttctttttgctgttg

SEQ ID NO: 13617 - DNA, 1740 bp, Zea mays
  Clone ID: LIB143-013-E4_FLI
agtccaggtctcactcgcgaccgagagccacagagaaatggggggccctggtcgtccctggcgccggcacgtcttcctcgtcgtgtcgctgcagcttctccttgtggcgccatggcaggacgagacggccgctcgagctctcaatttcaccaggcaggatttccccagggccttcgtctttggtgccggcacgtcagcttaccagtacgaaggggcaaccgatgaagacggaaggagcccaagcatatgggacaactttactcatgcaggtaggatgccggacaagagcactggcgacctaggggcggacggctaccacaaatacaagggagacgtgcagctgatgagtgacactggcctggaggcctaccgcttctccatttcttggtccaggcttattccaagaggaagaggagccatcaaccccaagggcctcgagtattacaacaacctcatcaatgagctagtaaaacgaggaattgagatacacgtgaccctgtcccacctggattaccctcagatcctggaggacgagtaccacggctggctgagccccaggatggtggacgacttcgaggcgtacgcggacgtgtgcttccgcgagttcggcgaccgggtgaggcactggaccaccatggacgagccgaacgtcaactccatcgccgcctacgacaacggcgccttcccccccggccgctgctccccgccgttcgggttcggcactaactgcaccgccggcggcaactccagcgtcgagccctacgtcgtcacccacaactgcatcctggcgcacgccgccgtcgccgccctctacacccgcagctaccgtgccgaacagcagggcgtcgtcggcatcaacatctacaccttctggaactaccccttctcccccgcccccgccgacgtccaggccacgcagcgctcgctcgacttcatgatcggctggatggtcaacccgttggtgtatggagactaccctcaagtgatgaagaggatagtcgggtcccgccttcccaggttcaccaagcggcagtcggagatggtccgcgggacggcggatttcattggcataaaccactacacctccgtgtacgtcagtgatcgccccaacgacgcagcagccgacaccacggggccccgggactacaatgctgatctgtcggctaccttcagattttctcgcgatgatccagccactggccagttcgtcccaatcaacatgccaagcgacccgcagggactgcaatgcatgctcgagtatctcagccaaacctacaacaacatccccgtctacgtgcaggaaaacggctacggggcgctcttcaacgactccatccatgaccacgagagagccgagtacttgagtgcctacatgggcagcgcactcgctgcactcaggaacggagccaacgtgaaagggtacttcgtctggtcgttcttggacgtgtttgagttgttggctggctactactcgcgatacggcctctaccatgtcgatttccaggacccggagctgccgaggacgccaaaactctctgcgctgtggtacggcaagttcttgaagagtgaaatcgacgacataatagagaacgttgtcgtcagcgctactgacgacgcgcgctcgcatgctgctgaacaatgagttagattgctagcgagcagcagcacacgacatgcatgtcgtagtagcggaggaaaagaatgttgtttcttatccattctttcttttttcacaagtcc

SEQ ID NO: 13618 - DNA, 155 bp, Zea mays
  Clone ID: LIB143-013-F4_FLI
tgttgcttagcctgacaatcggaagagtttatcgatatggggaggatgccatcgaagctaacaggaaacggtccagcagcacaaacatcatccccatatcgataaactgttgcttagcctgacaatcggaagagtttaaatgttaaagatttgat

SEQ ID NO: 13619 - DNA, 838 bp, Zea mays
  Clone ID: LIB143-013-H6_FLI
aagaaagaaagaaaaaaaaactaggcattctgcttgcttgcttggggcgctctagtgctcgcttgctgcacctgcaccggtcgcgcacagcctgggaagaggcgagctgaggtctgaggaagccgagaagccgggctcagcgtgcgtacagggacagagacggcaagccggagcatcgatccgttggtgcaagcaggaccggaggatcaccactcagagccatgctgcagcacggcgaggagaagaaggggaaggtgaagaaggggtggctggcggtgcgcgtcggggcggcggagggcgacggctcccagcagcgcttcgtcatccccatcgcgtacctgtaccacccgcagttccggcgcctgctggaggccgcgcgcgacgcctacggctacgactactccgcggggccgctgcgcctgccctgctccgccgacgagttcctccgcctgcgcgcgctcgtcgagcgggaggcgcaggcgccctcgtcgtcgtcctcgcaccaccaccgcgtccacgccggcggggggtcccacggcggccactactccctctcctccccgtgcacccgcgcaagggtcacctcgtgatcgaccgacgacctcggctttcctacgcgtgtgtggtggtgtctggtggtgtgtgtagagcgagggacagtatagttgttcgtagattaggtagctatctagctagccctgcaggggtgctgtgcttgtgcttcctcttcgatagatttccagttttgtctctttgttgttggcccttcccttgtactcttctctgcatgcgtttgatcctgcaggcgcatgtactatactaatgaattaactaacac

SEQ ID NO: 13620 - DNA, 1148 bp, Zea mays
  Clone ID: LIB143-013-H9_FLI
ggactcaagaaagtgctgaggagattgagacatatcagcggtataagtaccctactatgagcaaaacacaggggaatttcaagcttactgttgttgagggtgaatttaccgattctcagattgttgttatgcttggtgaaaacgggacagggaaaactaccttcattagaatgctggctgggttgttgaagccagacacagtggaaggaactgatattgaaattcctgaattcaatgtgtcttacaagccccaaaagattagcccgaaattcaagaacaccgtgaggcatttgctacaccagaaaattcgggattcctatatgcaccctcagtttgtgtctgatgtaatgaagccactgcaaattgaacaactcatggaccaggaggttgttaatttatctggtggagagctccaaagagttgctatatgcctctgccttggaaagcctgcagatatctatctgattgatgaaccaagtgcttatcttgattcggagcagcgtattgtggcctcaaaggttatcaagagattcattcttcacgctaagaaaactgcatttattgttgagcatgatttcatcatggcaacatacttggctgacaaggtcattgtttatgaggggcgaccttctattgactgttctgccaatgcaccacagtctttagtatccgggatgaataaattcttatcgcatcttgacattacttttagaagagacccgaccaactataggccacgtataaacaagttggactctacaaaggacagggaacagaagtcggccgggtcctactactacctcgatgactaatgaggaagcacagattcttcttggagagccatatggcgcatagtctttcgagggcgcggagagtgcggaaacgagaagctactatgaagctaccacactacatggcatgagacttggttgcaggagtagagtgcgccggttataacttataaagcagagcatgctgtgttgatactggtttttttttccctttttggcttgacctatatgaagagaaggatcggcgttaaaatggtattgtgaagggagaggtttttaagcaaaatactgtaccgtcgttttgccatcgagtatatttgaccctcgattatatagatcacattaaatttttggagc

SEQ ID NO: 13621 - DNA, 671 bp, Zea mays
  Clone ID: LIB143-014-A4_FLI
gtttcagcttgtattcccactctgtcgcacagcgtcgcccgtcgccgctgagatcctaggaagaaatggagctctctcgcaagctcttcacggccgtcctcctcgtcatgctgctgctgctgtccgcaggtacgttggtgcggccggctgaccgtcttacatgtcttctgtgctgtggactcggtactgatgatgagatgtctgagatgctgctgcgtgctgcagaggtcgggccggtggcggtggcggaggcgcggacgtgccagtcgcagagccacaggttccggggcccctgcctccgccggtccaactgcgccaacgtctgcaggaccgaggggttccccggcggcaggtgccgcggcttccgccgccgctgcttctgcaccacgcactgccactgattcgctcgctcgcccagcggccggctggcgtcgccgtcgatcgcgtcgcgaccagtccatggctccatgcatgaataacaagggtgtgcgcggtttgtgatgccaaattgtatcctcgtcgtgtgttgaagcgttcgatcgtcggtctagtagtgtgcctgtgagcagcggcgtgctgttgtacgtacgtctgcctctgttccatgtttcgggattttccatagcaaatgcatgcgtcgagatctacatctactccgagagaaattcgat

SEQ ID NO: 13622 - DNA, 838 bp, Zea mays
  Clone ID: LIB143-014-A7_FLI
cgaagaagaatcgccatcacagcaagctacgcgcactgaaatcctccaatccacaggacacagctctacttccacagttcgcagactcgcacgcaccgagcggctagcgatcaacgagaaatgtcgctggtgaggcgcagcagcgtgttcgacccattctctgtggacctcttcgaccccttcgacagcatgttccgctccatcgtgccgccgtcgttgtcgtcgtcggcggcctccgagaccgccgccttcgccagcgcccgcatcgactggaaggagacgcccgaggcgcacgtgttcaaggccgacctccccggcgtgaagaaggaggaggtcaaggtggaggtggaggacggcaacgtgctgctcatcagcgggcagcgcagcagggagaaggaggacaagggcgacaagtggcaccgcgtggagcgcagcagcggccagttcgtgcggcgcttccgcctgccggagaacgccaagacggaggaggtgagggccgcgctggagaacggcgtgctcacggtcaccgtgcccaaggccgaggtcaagaagcccgaggttaagagcatccagatctccggctgaagaagacatggacgcgaggtgaatggtcgcgtcgcgttcgcgtcgcggcgtcgggtcttgggtttcagcgacgcgactcgtgtgtgtggtactgtggttgctctgctttggtatgtctggtgtgtacgtgtgctgttcagtgtttcgtggtcatcgtctgtacattgtgctgttcggtgagctccccgactcagtgtgttgtgttctgcgagtgaataaataaaaacaaaccagctgtcgtctcgtgtagtat

SEQ ID NO: 13623 - DNA, 1240 bp, Zea mays
  Clone ID: LIB143-014-B11_FLI
ggctcatccttgcttaattaccaaggtacctttgcagctgcaggtaggtaggtagctagccgccatagcaagctaggccgaagcagaggagtgatggccaaggtccaccccaacgccgcggagtccgtcgtcgccccagcagtagcaccagtaggctccgcccaggcagaggccgagggagagctgcccacggtgctgacggtgtggcgcaagtcgctgctcttcaactgcgacggcttcaccgtctacgacgcccgcggcgacctggccttccgcgtggactgctacgccggctcgttccgccgccggcgccgcgccgacgtcgtgctcatggacgccacggggaagccgctgctcaccgtgcgccgcaagacgcggctcggcttaacggagcgctgggtcatctacgacggcgacgccgacgccgacgacggcacgacggccggggccacgccgctgctgtccgtccgccgccgccgcataggcgcgtgctgcaagacgctggcgctcgcccgcccccgccccgccgccgcgggaaccgacgcaccgtcgtacgtggtggagggctcctacggtcggcgcgcctgcgcggtgcgcgacgcccgcgggggcgccgtcgtcgcggaggtgcagaggaaggaggccgtcggcgacgacgtgttccgcctcgtcgtggccgggcaacgcctcggcgcgccgctgtccatggcgctcgtcatcgccctcgacgacatgttccgcggcggctggtcggcgcggtcgctgctgcgcatgagctcgccggcgtagtactttcactagctatagaagccacgagatggagtggagcccatataccagggactctccctgttacacgtgtaccgttacagtgaccccgggcccagttgtcagcgtcagcagagtttataatgcaggctgcagcaggggcagggctaacccaagcaatatttagatactagaattttcagttcgaatgcgtaaaacagtcggttctctgccaaatcaatcaaatatgaaaaaaaactatatgtttgcaagatcctgaaaggaataatcaggggaagatacgatgaagggttcgggtttttttagataggaatagtaatacacctactaaaatattagttacacatctagaaaaagtatttattacataaattttgtaactagataaaaattagaggtagaagtgttttttttgtaagcgatccggataaaatactttgctacccattag

SEQ ID NO: 13624 - DNA, 842 bp, Zea mays
  Clone ID: LIB143-014-D10_FLI
caaaaagctagagggttcctcgagagggagaagcgtacccggcagctccgctccgtcagtccgtccgcccccaagaatgtcagacgaggccaggcgcgggcccgcgggcgccgcgcaggtggtgcttcgggcctcctccgaggaccgcaagccggtgggctcggggtctccgccgccggcagcgaccgcgactgcggttgcgcacaagatccagctcaagagtgccgacatgaaggaggagatgcggcaggaggccttcgaaattgctcgcatcgcattcgagaagcacagtatggagaaggacatcgcggagtacataaagaaggagttcgacaagaaccacggccccacctggcactgcatcgtcggccgcaacttcggttcttacgtgacgcacgagacaaactactttgtatatttctacatcgactctaaagctgtcttgctattcaagtctgggtgattgtcgcagccaatacagtcaaccttgcatgcctacattttctttctctcatgtatgctccatcccctcccctttcccctcagagtcgtctgcagccaagcctggaagccggtaatcttatgagcctgcatgttgatgtatcagcaacggattattcttcgcatgccatagtgtgagatcaggttgcatcttaaaaaaaaaaaatatttttttattactattcaatttaaacatgaaacataaataatggagctgcgtttttattggtataatgtttatgtgtatgataggaatgttgggggtactttctttgtgtgtttagagtgttttaaaggttgggtattggggggtgttgtttttttaaaaaaaggggtccctg

SEQ ID NO: 13625 - DNA, 970 bp, Zea mays
  Clone ID: LIB143-014-E4_FLI
caccttccccctgactcgtgcgtctgtttctcctgcctgggtctggggttgtccagttgccattgccaccaccaaccgagcctagagggaaagaaatcttggaaaggtgtggtgtgacccctgctgctgctggtgccagatttgctcgcgttcgaggcctccttttgtttccgctagattctgccaagatcagcgattccctccgccagcagaatcgctcgctctctttccatcgagcgtgcattcttttctgctgctgagtcgggcaggatcggcgtaacccctccatccaaaccccagacctttgtccagcagcctcgcgccctcgccgcatcggtatggtttttccttgccccccgtcctagttgctctgttcgcttgatttcctggtcgaggttctcgtgcgctgttccaatttcgagctaatcgtcctgctcctgcctaggaataggattaatccccttctgttcttggagttcacacacatcccgtgcgcgcggattgctggtgcagcagtcggcggcggcgcgtgcattttgcaaccgctttccaagcaccagctgcaagctttggccttttcatcctcccctccccgaaatcccgcaagaaactcgtcccttctcacgagtcacgagtttggtgaggctttgaagcgagcatagttctcgtgaatatcgcaggggaggtttggaatccggcatctctgtcggtcaggctggggtgggagtttcctcgtcggagatggatgggaatttgccgccgcgcaccctgatgccaggcggaggtccaggccacttcgatctggggcagccgttccacttcgccgcccagccccaggcggtccgggttcaccagggcgtcttcgccgtccccgccgcgaaccagatgccggagctcggcaatgtggtgaaggcatcgctgagcgacgaggaggaggaggacgacgacggccacctcgaccacggcaagg

SEQ ID NO: 13626 - DNA, 821 bp, Zea mays
  Clone ID: LIB143-014-F2_FLI
cttccccttcccatctccgccgccgccgccccttcctcctccagagtcgcgcctcttcctcctcctctccagtcgcgcggtcgcgccgtcccattgcgccccttcctcctcgcagtcacggccgcgcggcacgtgctccgcttcgccgtcgccgtcgccgttgccgttgccgtcgccgccgccaagtaaagagagactgggaagcgcagtcgacgggggcgtggtgaggagggagttactcggaggaaggaaggaaggaagggggactgcggccggcggcggactaccatgtcgtctctgggaacttccaaggggatcctggagatcgccaagttcggcgtctacgtctccgtgcccgtcgcactcacctacctcgtcgccaccgactccaagaccctcaagaagctcatgggcctccgcccttacgtggtttacccgcctgaaggcccacgccctccaccgccagaagaactgcgcgaaagggcacgggagattgcccggaagaggcagcagagctgaatgtatgctgtgggttctctaggtgcctgtgtgtgtggctgtgtctatggaacagcacggacgacgaatcttcccatctcacgagaacagccctggtctttagcatcctttcactgctgctgttgttacaataataataataatatactgagaagcgagaatcggctagatataatataatcccgtgtattttctccttgggagccaggtcatattgcacgcttgacttccaaccgtgctgttgtaatgattaagaacttgtgatcctgtctgtggccaaggctaaccatttggtctctccc

SEQ ID NO: 13627 - DNA, 1442 bp, Zea mays
  Clone ID: LIB143-014-F5_FLI
ggagattgttagtgcatttggcccattggctgcataccgctttctttttaacaatgagctcggtggaccctgtgcatttcttgagtacgccgaccgctccgttacttctaaggcatgtgctggcctcaatgggatgatgcttggtggacgtgtactgactgctgtgcatgtgtttcctaatcctcatgtggaggctgctaatgaggcttccccattttatggtattcctgacaatgctaaattgcttctgaaagaaccaacaaaggtcctgcagctaaaaaatgtgtttgaacgagaagagtatatgctactttcaaaatctgagctggaagaaacattggaagatgtacgtgttgaatgtttggagcagtcaaatctgtaaatgtagttgagtatcctgctgctggtgtcagtgctgcagaggagaacatagttgagctcaagattgaatgcactgaattttctgatacggaaaacattgcaaaggctgtatcagaatattctgtaccgattattccgagcatagatgttctaaatcattctgtcgcttcggatactaaagatgtggatcttattccagagagtcaggatcagaaggacaaacacctcccttcaaatgcagcactttgtgagagtgaggcacctgtagcagatgaggacgcagagcttgatgaaactcagtctagagctgctctccccacaccgcaacatgctgaagctgatcatacggaagcagctgtggatgagaataaacatacaggagcagggaaggttactgctactgcaacggacgacgatgcagtagaaaagagtcatggagacccaagaacctcagagacctgcaatcctgctggacctacagacaaagcggagaaacctggaaggtactccgaacaaggcgctggtgatgtgactgaagatcgtccagaaaaagaagcccaagctgttgggaccagcgacactggtttcgtgtttgaacctggttctgtgcttgtggagtttttgcgggaggaggctgcttgcatggccgcacattccttacatgggcgtcgcttcgggaacagaactgtgcatgctggatatgctccgtatgatctctacttgcagaaataccccaggtgattctgcgtttgcgactgcatgagttgcgatacgagctttgcctatgtgccagtatttcacagaaacttcagacttgtagttttggcttttgagcctttggatggttcttccggtccagatagtggtaccattagttgaacgaaatatttggaaatgttgttccacagtagatatcggatggacaataggatataagtactggatagagacacaagttgtcgttaacatcgttctttacttcgctattaatgtttttgatgacgtcagacattagtgtggatggatggatggaatggatttattgcaagattttgactgct

SEQ ID NO: 13628 - DNA, 762 bp, Zea mays
  Clone ID: LIB143-014-G7_FLI
cgcgctctcctcgcgttcgggaaggtcgtttcgccatggcctcggagacggagacgttcgccttccaggcggagatcaaccagctgctctcgctcatcatcaacaccttctactccaacaaggagatcttcctcagggagctcatctccaactcctccgatgccttggacaagatcaggtttgagagtttgacggacaagaccaagctggatgcacagccagagctgttcatccacattgtccccgacaaggccaacaacacgctgacaatcatcgacagcggcattggtatgaccaagtcagaccttgtgaacaaccttggtaccattgcgcggtcaggcacgaaggaattcatggaggcacttgctgctggtgctgatgtgtccatgattggccagtttggtgtcggtttctactctgcctaccttgttgcagagagggttgtcgtgaccactaagcacaatgatgatgagcagtacgtgtgggagtctcaggctggtggctccttcactgtcgcacgtgatacctctggggagcaacttggcaggggtacaaagatgaccctctacctcaaggatgatcagttggagtaccttgaggagcgccgcctcaaggatctgatcaagaagcactccgagttcatcagctacccaatctctctctggattgagaagaccactgagaaggagatctctgatgatgaagatgaggaggataagaaggatgaggagggtaaggttgaggatgttgatgatgaaaagg

SEQ ID NO: 13629 - DNA, 630 bp, Zea mays
  Clone ID: LIB143-015-A11_FLI
gaaaagaagcccgcagtgtccttctccatgttctcgcccaatggcaagtttatcctcgttgccatgctcgataactcactgaagctatgcaattttgccaccggcaagttcttgaaggtatacagtggacatgtgaacagacaatactgcatacagtccgcgttttctgttacgaatggaaaatacattgtcagtggatcagaagacaactgcgtgtacatatgggacctccaagggagaaatatccttcagaaattagaaggccatacggacactgtcatctcggtgtcctgccatccaacagagaacaagattgcttctggtggccttcataatgataggactgtaagattatgggttcaagatagctaatcaacttgcaggtgtggactacgctcataaacagcacttgcctatcaatgagaaaatatgtctgcttcccatggatatggatcgctattccagatacgtttacaacttacacaaagacattaaccatgcgagctttgttttaatctgatgtgttatcctaagttgtgaatgctgaataaatcaacatctagtcatctctaataatgttgtgatatgttatgcccaacggctgtattccaatcaatattgatttatttt

SEQ ID NO: 13630 - DNA, 1426 bp, Zea mays
  Clone ID: LIB143-015-B2_FLI
cttgtccgcccggcctcttccgtctcggagcgagaaatcagcggcatcgccgcgcgcatccgaagcgcacacgacaatgcagggcggatccagcggcatcgtctatggtggcctcaagtaccaggcacggtgtatcgccgacgtgcgcgcggacgccagctcgaccaccttcctcgccgggaccctcagcctcaaggaggagaacgaggtgcacctgatccggctttcgccggcggagagtgagctggtgtgcgatggagtcttctaccaccccaacgagatctgggatctcaaatcatgtcccttcgatcacagggtcttctccacagtctacacatctggtgagggctttggtgcgtcagtttggaagatcccagagcttaatgggcaatcaaactcaccgcagcttgagcagctctttgagcttagtgggcatacgggcaagattagacgtgtgatctggtggccacttggaaagcatgataaactaattagcattgatgaccgaaatatttttctttggaacgtagacatgtcaaataaatcagctaaggtgatctcacagggatcagctgacatgcttccaaatttgagtggtggggcttgggatccacacaatcataattcaattgcttcaatatctgattcatcacttcatttgtgggatctacgttctatggaaaaatcatctgcaattgaacatgcacatatacgggatgtggattataaccccaagaagcaacacattattgcaacaacagaagatgactttggaatttgcttgtgggatctcagaatgcttaagcttcctctgaaagacctccctgggcactcacattgcccttctggttcacccaatagacaagaagaaccattacttaactcatatactgactatgaagacagcatctatggtattgcatggagctcccatgatccatcattattcgcttctttgtcctatgatggaagggttgtcttggaatcagtcaagccctacttgcagagaaaatgaatcttgctggtctaacttttggattgtaagcaatggcagaaaaaacataataaggatgttgcagaaatcatcctgcttgacatcaggtcttcaaccctcttgattgaagccagcaatggctccaaaacactcagatctagcttcagttgagatattacagcacagttgagattgtcagcagtttcctttcctgtatcttcaaattttgtccactaggatttcatgttcagttgctagaaatttggctgtgaagatctgatctgtatgttaataactgttgcccatctgtctgaaatagttttctatacttgattcttaggatgttgtatatttgaaaagtgttcacaaaaagatattgcggtatatgatgaggtggagttggactgaatttgtaaaaccattcagaatttc

SEQ ID NO: 13631 - DNA, 1791 bp, Zea mays
  Clone ID: LIB143-015-C11_FLI
agcctttactctagcatgccgctggacccacaacggcttccaaaatcatctgtgtctgctgtgccaaactatgctgattccatgatgcatgctcgtaatcataacctgcttgcttcactgggtggtactactacacagcttcctgcaacatcccgcgtaggctcaatgatgcctgaaagatcgtattatgatccttccagcgttgatgggaatgaaaacgctggttcacctgcttactcaaaaaagtaccacagctcacctgatatgtctggaataatcgctgcaagtagagctgcactcttgaatgaagcaaagttgggtgctgccattggaccacagtcatacctcagcaggctggcggcagaaagatctcaatatgcaagctcaacagccaggcccgcggctccattagcatttgacgagctttcacctcctaagctccagagcgatatcttctcggcgcagtcaagcatgagaccaagtgctagatccctttgggctaagcaaccatttgagcaattgttcggcatgtcaagtgcagagctcagtaaaggtgacttcaatcttccaggcagatcaggtggcgtggccaaggacgatttctcttataaggaatctgagacgaagcttcttcagtccctcaggctctgcatcatgaagctccttaagctagagggatcagggtggctgttcaagcaaaatggtggttgtgatgaagatctaatcgaccgagtcgctgcagccgagaagctattgatgcaagggactgccgagaatcaactgctgcttcatggtggtgatctccagcaacattcttccgatcaggctggcatccagtacatgcgcacgcttcccaactgtggggaggactgtgtttggcgcgcgtcactcgtcgttagtttcggtgtctggtgcgtccgccgagtgctggacatgtctctggtggaaagcaggccagaactttggggcaagtatacctatgtccttaaccgtcttcaggggatcttggaccctgcgttctccaagcctcggggtgctctgaccatatgcacctgccttcagaaagacaccagagtgcgcaatagcccaccccacagtgggctaacagccatgggtccggtccccacaccgctccggggcgccttcacgaccgcaggcgtggttctggagatgatcaaggacgtggaggctgcggtctcaggccgcaagggcaggagcggcacggcggcgggcgacgtcgccttccccaaggggaaggagaacctggcctccgtgctgaagcggtacaagcggcggctcgccagcaagggccagtagcgcgcgggtgtcagacaggcaggcgatcgcaagcaatgttaggagcctgactattgttctccaggggggctgccactggcgccggcctccctgagccctggattttttcgttgcacgacgttcctagggaccggtggttgcccgatggtcgtcttggtcccttccagcagttttttttttcttccctctttctgttggtttctttttgttggctttgtgatgttttgtaaggggcaactagggtatgtgctcagaaggactcaagatgtacacgcgaagatgtactagtctgctgatgcagcgttgtaaagtccacactctgcaggttaaccctttttggggccgtcaagtgttagtgcgtgccctatgtatgttaatcacccctgcagagaggttgcgaatactgaactactcacagacctgcacctgtcgagatcgtttgtaatatccgacgtcttgttcagaattgttctc

SEQ ID NO: 13632 - DNA, 2120 bp, Zea mays
  Clone ID: LIB143-015-D8_FLI
gtgtcggtgtgcagtgtgttgtcatctccatctccagctccagcgccgccttgctctgtgtgcttccgcccgctctgtgttgctattgctaaactagtgtgttctgtcgctatgggctccctggccaccgcggacgggccgttgccgccgctcaagtaccctcaggctcgccgggacgaagacatcgtcgacgactaccacggcgtcctcgtgccggacccttacagatggatggagcaggtggattcgaaggaggtgaaggagttcgtggacgcgcaggcggccgtgaccagcgccgtgctgtccagctgcgaccaccgcgggcgcctgcgcgggcagctcaccgcgctcttcgaccacccgcgcttccgcgcgcccttcaagcgccggggcagctacttctacttccacaacccgggcctccgcccgcacagcgcgctctacgtgcagcacgggctgggcggcgagcccgacgtgctgctggaccccagcacgttcagcgaggacggcacggtgtcgctcggcgtggtcggcgtgagcgacgacggcgagcacctggcctacggcgccagcgccagcggcagcgactgggtcaccatcagggtcatgcgcgtgcgcgacaaggagcacctgcccgatacgctgtcctgggtgaaattctcgcgcatcgcgtggactcgtgacggccaagggttcttctactcgcgttttccggctccaagggatgcgctggattctgggatgaagactgacgtcaatctcaaccacgaagtctactaccatttccttggaacagagcagtcacaggacgtgttgtgctggagagaccctgatcatcccaagtacatatacatccctcaagtcacagaagatggcaagtacgtgatcctttcggtctcagaaacgtcagagccggtgaacaagctgtactactgcgacctgtcggctctgggcggcgtgaagagcgcccatggcaacggcatgctccccttcgtgaagctcgtggacaggttcgaggcctactacgggctcatcgctaacgacggcacccagttcacgttcctcacgaacaaagacgctccaaggtacaagctggcgagggtggacgtcgacgacgacgagccggccgggtcgccgtggaccgacgtggttcccgaggacgaggacgggaaggcggtcctggagtcggcgtgcgccgtccacggccacaagctgctggtgagctacctgtcggacgtcaggtgcgatgtcggctctgcggtcccggagatggacgtctacagagagatctcggttccaggcttcgatcgaaacgagtttgaagcgaagcaggtgttttatccgagtaaggatgggaccaagatcccaatgttcatcgtatccaagaaggagatcagcctggacggatcgcacccggcactactgttcggctacggcggcttcggcgtgagcgtgacgccgcagttcagcgtcgcccgcgtggtcctgatgaggaacctggggttcgtggcgtgcgtcgccaacctcaggggcggcggggagtacggcgagggctggcacagggccgggtcgctcgccaagaagcagaactgcttcgacgacttcgtcgccgccgccgagttcctcgtgtccgctggctacaccagccccgcgaggctgtgcgtcgagggcggcagcaacgggggcctcctggtagctgcctgcgtgaaccagcgccctgatctgtttggctgtgccctggcccatgtcggagtgatggacatgctacggttccacaagttcaccattggtcgtgcatggacatgcgacttcgggtgttcggagaaggaggatgagttccagtggcttatcaagtactccccactccacaacgtgcggcggccgtgggagaaggagaacaaacgggcagccgcagccgacgcaagctgccggggcttggcggccagtaccctgccaccatgctgctgacggcggaccacgacgaccgcgtggtgccgtcgcacacgctcaagttcctcgcgacgatgcagcacgtcctgcgccccggcgcggagggcagcccgcagacgaaccccgtcgtcgcccggatcgagcgcaagagcggccactgctgcggccgc

SEQ ID NO: 13633 - DNA, 1450 bp, Zea mays
  Clone ID: LIB143-015-E2_FLI
cgacgacgatccatccatcttaaagcaagcagagacatggagtcgtcgccgctgctgcagctgccggcggcacgcgtggaggctctgagcctcagcggcctctccgccatcccgcccgagtacgtccgccccgccgacgagcgagccggcctcggggatgccttcgacctggcgcgcacccatgccaacgaccacaccgcgccgaggatccccgtcgtcgacatctccccgttcctcgacagcagcagccagcagcagcagcgggacgaatgcgtggaggccgtgcgtgccgccgccgccgactggggcgtcatgcacatcgccggccacggcatccccgccgagctcatggaccgcctgcgcgccgcaggaaccgccttcttcgccctccccgtccaggacaaggaggcctacgccaacgaccccgccgccggccgcctgcagggctacggcagccgcctcgccaccaacacctgcgggcagcgcgagtgggaggactacctcttccaccttgtgcaccccgacgggctcgccgaccacgcgctctggcctgcgtacccgcccgactacatcgccgccacccgcgacttcggccgccgaacgcgggacctggcctccacgctgctcgccatcctctccatgggcctccttggcacagaccgtggcgacgcgctagagaaggcgctcaccaccaccaccaccaggacagcagctgacgacgacctcctcctgcagctcaagatcaactactacccgaggtgcccgcagccggagctggccgtcggcgtggaggcccacacggacgtcagcgccctctccttcatcctccacaacggcgtgccgggcctgcaggtgctccacggcgcccgctgggtgacggcgcgccacgagccgggcaccatcatcgtccacgtgggggacgccctggagatcctcagcaacggccgctacaccagcgtcctccaccgcggcctcgtcaaccgggaggccgtgcgcatctcctgggtcgtcttctgcgagccgccaccagactccgtgctgctgcacccgctgccggagcttgtcacggaaggccaccccgcaaggttcacgccgcgcacattcaagcagcacctggatcgcaagcttttcaagaagaaacagcagcacaaagcaaaagcagaggaagaggatggcggcaatggtgaccaccaccgccacgagccgccgccgcagaccaactgatgggctgcacatgtctttccatccgcccacgcatatcttctctcgcgaaattaataaggatccatcagcattttccatatatttatattagtttcatgctcctacgttactacgagaaaaaaaatagtatctatgatatataaaatccatgtgttaaaatattactgtaacactaatattatatatgttgttacgaaatcaatataataaaataatttgatatacc

SEQ ID NO: 13634 - DNA, 2224 bp, Zea mays
  Clone ID: LIB143-015-F10_FLI
gtctgctcaagaagtacttgacaaagttgctcaagagactccgaattttggaacagaacaggataaggcccattgtccgtttcatctcaagacaggggcttgtcgctttggattgcgctgcagcagagttcacttttaccctgataaatcaatcacattgctaatgaaaaacatgtataacggtccaggccttgctttggagcaagatgaagggcttgaggtttgttagaggaaattctctaatgcataactttgtatccttaaactactgtttatttacgtttaaggatgctcaattttggtttcatgggcagtgccattttaagttgtgatagtttaatactaaagcaagctcatgtcaaaataacaagtattccactttaagcttgtaagcctttataagaagacatgagtataaataactgactacttggaaccatttgaatttttttaatctactgctcaagataactcttaccccaagttttccttggctactatcagactcgcgacagattgcatgttctttcgtgttatcttcagaacttcgacttgaggcatacagtgatcagaccagttgatttcacttgattgaggacgtcttgaactttgatctgctcatttcacagatgaagagattgaacaaagctatgaagaattttatgaagatgtacatacagaatttctgaaatttggtgaacttgtgaatttcaaggtatgtagaaatgggtctttccatcttcgagggaatgtttatgtgcactataaatcgttggattcagctcttcttgcctacagcagcatgaatggacgctattttgctggaaaacagataacatgtgaatttgttgctgtgacaagatggaaggcggccatatgcggtgagtacatgaggtcaagatacaagacatgttcacatggagttgcttgtaattttattcactgcttccgcaatcctggaggagattatgagtgggctgattgggacaatcatcctcctagatactggattaggaagatggttgctctttttggtccctcagttgatgagatgaatgaaaaggcgagtcataccccagattttagaagttcagtgggctctgataggaagaaacttaaaatttcctgcaacagatatgtttcaagaggatctaggaacgaagatgtgcatacacgacactctcctcaagattattcacattctaagcaagaacgaagtagccacaacatgaattatgagtacagacgacataaaagagattcttcagcagcagataagcaccgaagacaagatgttggagatacaaatgacagacaattttcaacaatgggaaatgacagcaagtcccataggcataagcatgaagaacggcatagaagtgatcatggtaatggagaaaaagaagatgacagcaaaactaggcctaggaagcactgttctgttaggcgtggaagtttggaggttggatattctgactggtctccagacttcactggtacagacatcagcaagggcccttcaggtgagaagtccactagcaggtatgatgatgccaaagggagcaggaggggatcatcagagtattacaatcttgaaagacaccactctacagctcaaaaacaatcaagaaatgagcacagcactacaagacgcaggagacatgacattgaagattatcatgatgaaaaaaatgacggaagaggggaatcccgaaagcataaccgccatgaatcaaacgaccggtgggtagccacaaatagtgatgttgattcggatgtagatagatatcagagttcaagctgtaaaggcactaggctgggaaggaaggatgatgatccaggcattgaagttcggcatcagaggtcaggtagaagtacgaaggatgacaagagaaggaagcatcacagtggaaacaggtggcacagcggcactgaagagggtacctcagattcaagcggtggagatttgagctctgattcgtggagtggtagatcgagaaacagtgagaacttttcagcacacaggtcaaggaggaagcgaagtcggagcaaggagtctggttagttgtaaatagttagcctctttttggagcacatgaattcgtaggaatcgtgcagaaattttacaggaatcggtttaacttcgcacgaaaaatttcccgcactccgaacatgcggtagtggcttcttgatattctactgtatgctttcaccgtttcgccct

SEQ ID NO: 13635 - DNA, 2066 bp, Zea mays
  Clone ID: LIB143-015-H4_FLI
cccacccatggtgggtttgattaaaacaggataaccgattttatcaaacccacccatggtggagggggcaaggggatgagaatagtcgaaaggcctgatgaatttgtggattctgtactgagcgctcaacgggaagctgcagcatcgtttggtgtaaacacactattgattgagaagtatattactcaaccaagacacgtagaagtccaggtatttggcgaccaacatggaaatgcgatatacctttatgagagagactgcagtctacagagaaggcatcagaagatcatcgaggaagctccagctccaaatgtgccagctgagtttcggtctcatattggtggagctgctgtatctgcagcaaaggcagttggttactacaatgctggaacagtggagtttattgtggacactctttctggagagttctacttcatggagatgaatactcgactccaggttgaacacccagtgacagagatgattgttggtcaagatcttgtggagtggcaaatacgtgttgcgaatggagaacgactaccattatctcaggagcaggttccattaaatggacatgcatttgaagcacggatatatgctgaaaatgttccaagagggtttctccctgcaacaggaaccttacatcactaccgaccagtcccttctgacccaactgtaagagttgaaactggagtcgaagaaggagataccgtcagcatgcattatgatccaatgatagccaaacttgtagtatggggtgaaagtcgcacggctgcactagtcaagctaaagaagtgtttatcaacctttcagattgcaggtttgccaaccaatgttgatttcctccaagaactcgcaagccacagtgcctttgaaaaaggcctagttgacactcacttcattgaacgttataaagatgaccttttgagtatttctacaaagtcctcaaaagaatctcatggtgtagctgagcttggtgcaattttggctgctgcatgcatttgcaagaaggaacacattacatctaaagaatcactacgagccaacaagtcactatctgtatggtacaataatccacctttcaggatgcatcactttgctaggcatcccctggatcttgagttggaagagaatgatggattcagtgagaaacttcttaaactgttcattactcataagtttgatggaagctacttcatcgagacagaagatggcacttctggtttagatgtcaaagttgatcacaagggtgaccacgattttcgtgtggatgtttctggtctgcaaactgatgtgactctagcatcttattcaaagggaaacagcaaacacatacatgtctggcatgggaatcatcaccaccattacagacagactgtaagagctgagcatgcagttgaagatagctcccaacctagtcatgcttctgaagggaagtcgcatccaaaagggagtgttctggcaccgatggctggcttggttgtgaaagttttgcttgaagacggggctcaggtggacgcagggcagcctgtcatggttatggaagcaatgaagatggagcatgttgtgaaggcgcctcgtgccggatacgtgagtggcctgaaggttactgcaggccaacaagtttttgactccagtgtccttttcacaatcaaggacagctctgcaaactgagatggagcgatcactgccctagagtagttgcactgcaactgcatcaagcacccagcggatgctcgtccagatagagaagcgaaggaaataaactgctgggttcgtctgcgggcaatccaatccggcagggcaagcagacggcgcatggtgtttcccggcttgatgcgaatccatcatccgccgcaacaattccattgcgcagtgtacacgaacatggaactgtaccacgctgagcaagaggaattcttgtttgatttgtgcagtgaaataagttgatttcatcaccgttccatttctcatatgttaataattagtaataataatgaataattagtataatataatgagaaatgtgctcagtttaccaattttatggaatggatttgtaatgt

SEQ ID NO: 13636 - DNA, 2136 bp, Zea mays
  Clone ID: LIB143-015-H8_FLI
gtggggagtctggatctcaagcaaccagcccaagaactgttctgctccccagttgtatacgatcgaaggaaaaaaaaaggatcccaaaccctagcatctctcatggacgacggcgacggcggactgagcttcgacttcgagggcggcctcgactctgccccggcggccgggggccccgtgccgtcctccaccgaccctggcgcgggaggcggcgacgggccgggtatgcacgggcgcggccgaggtcgcgggagctaccgccagacggtgtgccgccactggcttcggggcctatgcatgaagggcgaggcgtgcgggttcctgcaccagttcgacaaggcccgcatgcccgtctgccgtttcttccgcgacttcggcgagtgccgcgagcccgactgcgcgtacaagcactcgtacgacgacgtcaaggagtgcaacatgtacaagatggggttttgtcccaatggtcctaattgccggtacaagcatatcaagctacctgggccaccgccttctgttgaggaagttcttcagaagattttgcagatgcgctcttttaacagatacagtcagaatagaaatagtaattataatcagcaaggggagaggccacaacatccacagggttctgcgttgcctaaccaaaactcagcagaaaatgctactgctgcagctccaccagctggtggacaacaagcacaaacgctgaatcaacagccaccacagcagcagcagaagccaaatacaaatgaccaggcccaaggtgtttcaaatggccatcaggccactagaatcgccacaccccttccacaaggaccatctaggtatttcattgttaaaagttgcaatcgggagaatctggaaatatcagttcaacaaggaatttgggccacacagaggagtaatgaggctaaactcaatgaagcttttgaatccactgagaatgttattttgatattctcaattaatagaactcgcaatttccaggggtgtgcaaagatgacttctaggattggtggctacattggtggtggaaattggaaatctgctcatggaacagctcattttggtcggaacttctctatgcagtggcttaagctttgtgagttgtcatttcagaaaacccatcatctccgaaatccatacaatgataacctccctgttaagatcagcagagattgccaggaactagaacctttcgttggtgagcagttggcttctctgctttatctggagccagacagtgaactcacggctatgctaattgcagcagaggccaagcgagaggaggaaaaagcaaagggagtgagtgctgatgaggcagctgataatcaagatattgtgctgtttgatgacaatgaagaggacgaggaagaggaaagcgaggaggaagaaggcaacgcccaagagtctcaaggaaggggaagaggaagggggatgatgtggccgcctcaaatgccgatgatgcgtggggcaatgttggcagggcgtggcttccctcctaacatgatgggtgatggctttggttttggcggcggtttcggcatgcctgatccatttggcatgccacgcggcttcccgccattcgttggcccaaggttccctggtgactttgctagaggcccgatgccagggatgggtttccctggcaggcctccgcagcctttccctctgggtcttgacatgatgatgggtcctggccgtggtccgctgatgggaggcatgggaatgggtgggcctggacggcctaatcgtcccatgggtatggcgcccttcatgcccccgccacctccaaataaccgtgctgcgaagcgggagcagagaaggccagggggtgaccgaggggacaggtttgaaacagcatcagcattagaccagggcagcaggggccatgataacactggaaaccctggagcagatggagccagagcccagtctggagacaggtacggtagaagcgcccttcgggacgatgacagcgagagcgaagaggaggccgctcccaggcgatcaaggaaacgatagagcgtctctgacatttcatgctgttacttgaaatgagatgtactgttgaaagatgagtagattgtcttcacccagattagagctaagataatgaaaatgtggattgtgtat

SEQ ID NO: 13637 - DNA, 1089 bp, Zea mays
  Clone ID: LIB143-016-A11_FLI
agctactccgatccgtccggttcccagcacctgagcagctacgtatacctactagctacaacgggcctgccgcagatgcatgccagctaggcactagctcggcctccgggcggtcggccggcccacaatattgtccttgtccatctccgattctccataaatcctcgctcgcctgccaccagaaacgaccttctgcacgtacgcacggtggctgcaggccggccatgagacgacctcacgccgccgctaccgctctcgctgccctcctcctcgtcctgtgcctcgccgccgcgttgacccgccacggcagcggaatctgccagcaggcggggaggacgccgacgaggaagatgctgctggccatgacaagcttcgacgacgacgacgctgccgcctcgccctcgccatccggtcaccaccgccatcctcaccaccaccaccaacaccaccaccaccaccaccaccacgcgggcaggcggcgatggaaccggcggcaggggaccattccaccaccgtcagatgctggcgaggccgaggcggtcgacccgcgctacggcgtgcagaagcggctggttccttcgggccccaaccccttgcatcactgaggtgtgaggcggagctagcaagcaacaagtcgtctcggcgccggtggcacccgcaacgcaacacaattattagcagcaacgccggccggccatgcgcgtgcgtggatccagcatgcagctttataattttcatggaggccgctcaactagcatgcatgcacaggctggttcggccttccacggtgagtatatatacctctgtctacgcgtggcgcacatcatgcatcttgctgtgtggatccgatcgatcgggttcgagccaatcttttgttgtggagttggagctactagctgaactgctgacgaagcatgctgcgtgtatttcgctcccgcgtgtcagcaggcatcgcacaaccttattaactagtagctagctatagtattattcgtttccattcgtgtgttcatgtatgtaaatgtaatctttgtcatctccagctgcaaaagcaagtgaaacaaaaggagagagagagggtaattgatc

SEQ ID NO: 13638 - DNA, 817 bp, Zea mays
  Clone ID: LIB143-016-B12_FLI
ctcatgcttcggtccacgcacccacccagccccaccagcggcagctccgcggcgccggcgtccagctccgacgccgcggcgatggtcgggggcggcgcggcggcgggcagcggcggcgcaccgagcggcgccaagctgctgcagatcctcaacgtgcgggtcgtgggcagcggcgaccgcgtggtggtgctgtcccacgggttcggcacggaccagtcggcgtggagccgcgtgctcccctacctcacccgcgaccaccgcgtggtgctctacgacctcgtctgcgccggcagcgtcaacccggagcacttcgacttccgccgctacgacacgctagactcgtacgtcgacgacctcctcgccatcctcgacgcgctccgcatcgcgcgctgcgccttcgtcggccactccgtctccgccatgatcggcatcctcgcctccatccgccgccccgagctcttcgccaagctcgtactcatcggcgcgtcgcccaggttcctgaacgaccacgactaccacggcgggttcgagctgccggagatccagcaggtgttcgacgcgatggcggccaactactcggcgtgggcgaccgggtacgccccgctggcggtgggcgcggacgtgccggcggcggtgcaggagttcagccgcaccctgttcaacatgcggccggacatctccctccacgtgtgccgcaccgtgttcaacaccgacctccgcggcgtgctgggcatggtgcggtccccctgcgtggtggtgcagaccacccgcgacgtctccgtcccggcctccgtcgccgcctacctcaaggcccacc

SEQ ID NO: 13639 - DNA, 839 bp, Zea mays
  Clone ID: LIB143-016-D7_FLI
cataaataaagcagctcctccgggggcggcgaactactcctcgtcgccaaaaccctagccctgcttctttgccatggcgagcagcgctagccaggcgagcctcctgctccagaagcagctcaaggatcttgcgaagaaccccgtggatgggttctccgccgggcttgtagacgacagcaacatcttcgagtggcaggtcaccatcatcggaccgcctgacaccctatgatggaggctacttcaatgcaataatgaccttcccccagaactatcccaacagcccgccatcagtaagatttacttctgagatgtggcatccgaatgtttatcctgatggacgtgtttgcatttctattcttcatccacctggtgaagatcccaatggttatgagcttgcaagcgaacgatggacaccagtgcacacggttgaaagtatagttctgagcatcatttcgatgctctctagtccaaatgacgagtctccagcgaatatcgaagctgccaaggattggagagaaaagcgggatgagttcaagaaaaaggtaaggcaatgtgtccgcaaatctcaggaaatgctctgaaggagaaacatatggggagttgaacgagtgctgcaacttcacaaccagttacctagccagcattcttttgcttttcccctgtatattttccattcagtgtcattcgtatggtggtgttgggtctctttagacaaactggggactgttgcttatcctaaaaattcgattgtattgtgtggcatgaaatgatcgatgtcaaagaatattttgaacatgctgccacctaattatacttttcatatgaacatcataaagaag

SEQ ID NO: 13640 - DNA, 938 bp, Zea mays
  Clone ID: LIB143-016-H4_FLI
ggacaaggaaggcattccaccagaccagcagcggctcatctttgctggcaagcagctggaggatggccgtacccttgcggattacaacatccagaaggagagcaccctccacttggtgctgcgtctcaggggcggcatgcagatcttcgtgaagacacttactggcaagacaatcacccttgaggtggagtcctcggacaccattgacaacgtcaaggccaagatccaggacaaggagggcatcccaccggaccaacagcgcctgatcttcgccggcaagcagctggaggatggtcgcactcttgcggattacaacatccagaaggagagcaccctccacctggtgctccgcctcaggggtggcatgcagatctttgtgaagacattgactggcaagaccatcaccttggaggtggagtcgtctgacacaatcgataatgtcaaagccaagatccaggacaaggagggcattccaccggaccagcagcgcctgatctttgctggcaagcagctggaggatggccgtaccctcgccgactacaacatccagaaggagagcaccctccacctggtgctccgcttgcgaggtggtatgcagatctttgtgaagaccttgactggcaagaccataaccctggaggttgagagctccgacaccatcgacaacgtgaaggcgaagatccaggacaaagagggcatccccccagaccagcagcgtctgatcttcgctggcaagcagctggaggatggccgcaccctagcagactacaacatccagaaggagagcactctccacctggtgctccgcctccgcggtggtcagtaagccatgggtcatttaagctgctgctgtacctgggtatctgcgtcgtctggtgccctctggtgtacctctatatggatgtcgtcgtctaataaacatctgtggtttgtgtgtc

SEQ ID NO: 13641 - DNA, 995 bp, Zea mays
  Clone ID: LIB143-017-A6_FLI
ttccagaactgcgcctaaggtttcttgcacgcgcaaatgaagcggcagccaccacatcctcgaggcggcggcggcgcggcggtcggcgagagcggaagcggcggagggttccataagggggaggggaaagggaaagggaggtggggcggcgggtgccggcggcggaacgagcagcggctgggtgtcggcggcggcggcggggccctctccctcgctgctttcgccagcgccaagtcccggactaccggctacaacccggccgtcatcaagaagcaaaaggagttctacaagaatgctaaactaatcagcaaatacaaaaggacaaagaagcaacaaagtcagtcaaacgaccatccgcagattccaatccatgaggatggtggcgacaatgcccaatatgtaccgaaaccgcgctaccaaggcaagaagcgcaccgcgcatagtttgaaggaagagtacgagaagaaacgcgcagaggatgagaaggctaagaaagagcaggatgcagcagttcaggcgaagagggaacaccgggagaagtccgaggcaaagcggagggaactgagggagaagatgttcaagaagacgagatctggccagcctgtgatgagataccggatcgagcatctcttggagacggcactgagcaaataacacgatgccaccgtcatcttggcagattttgtagttccgctgtccaatcgatttgttggttttaactgactttgtcacctttttagtttgcaaaaatggacaatctaagtgacaaagccagttaaaaccaacaaattggttgggctgcggaactacaaaatttgttggtcaatataccaaggcgatggtggccccacctagagctaggccagaaaagcctcatccaccggcagcccttaagccgtagtagtagggttctattctgttgtcggcagcccttaagaagagactgttcaccagtggagacacttccacttaaccaataaattacctgtgaaatc

SEQ ID NO: 13642 - DNA, 1565 bp, Zea mays
  Clone ID: LIB143-017-D4_FLI
gcttttgatgtcagtatcttgaccattgataacggtgtgtttgaggtgctggccaccaatggtgacacccatcttggaggtgaggattttgaccagaggatcatggaatacttcatcaagttgatcaagaagaagtacagcaaggacatcagcaaggacaaccgtgctcttggaaagctgaggagggaagctgagcgtgccaagagagccctgagcaaccagcaccaggtccgagttgagatcgagtccctctttgacgggaccgacttctcggagccgctgacccgtgccaggtttgaggagctgaacaatgatctgttccgcaagactatgggccctgtcaagaaggccatggaggacgctggccttgagaagagccagatccacgagatcgtcctggttggtggaagcaccaggattcccaaggtccagcagctcctgaaggactacttcaatggcaaggagcccaacaagggtgtgaaccctgatgaggctgttgcctttggtgccgcggtgcagggaagcatcttgagtggcgaaggtggtgacgagacaaaagatatcctcctccttgatgtggcccctctcaccctgggtattgagaccgtcggtggagtcatgaccaagttgatcccgaggaacactgtcatcccgaccaagaagtcgcaggtgttcaccacctaccaggaccagcagaccactgtctccatccaggtctttgagggtgagcgcagcatgaccaaggactgccgtcttctgggcaagttcgacctcaatggcattccgtcagctccgaggggcacaccccagatcgaggtgaccttcgaggtggacgccaacggtatcctgaacgtgaaggcggaggacaagggcacgggcaagtcggagaagatcacgatcacgaacgagaaggggcggctgagccaggaggagatcgaccgcatggtgcgggaggcggaggagttcgcggaggaggacaagaaggtgaaggagcggatcgacgcccgcaaccagctggagacgtacgtgtacaacatgaagaacacggtgggcgacaaggacaagctcgcggacaagctggaggcggaggagaaggagaaggtggaggaggccctgaaggaggcgctggagtggctggactacaaccagtccgccgagaaggaggactacgaggagaagctcaaggaggtggaggccgtgtgcaaccccatcgtgtcggccgtgtaccagcggtcgggcggcgcccccggtggtgatgccgacggcggcgtcgacgacgaccacgacgagctgtagatggtggtggggagcggtgacgtggagtgccgggaaccaagccaaattttgtaatggtgtttaggggggagggtggtggacaaaaaaactaatcttggtgctgctctgccaatagacgggctgagcatagaacttttttcccttctacttccttgtgattgttctttttatagaggattcgcattggaatgtaatgtaaaaaaaaaaaagaagacgcccttctgaaacttgttactacaagttaataatgaaatggtgcatcacagtgt

SEQ ID NO: 13643 - DNA, 456 bp, Zea mays
  Clone ID: LIB143-017-F1_FLI
atgatggtggtgatgagggatcagatgacaatgagaatgaggaagatgacgatggagatgatgatgatcctgcagccaatggcgaagggggaagcgatgacgacgaagatgatggtggagaggatgaagaggatgatgacgacgacgacgatgatggggacgatggcaatgaggaagaggaggaagaatctgaagaggatgatgatgatgatgaagtcccccaaccacctactaaaaagaggaaatgatcaacggctgcgacgagtggttgcttatacgcaggaatgctgcctgttcgtccctgcgcagcagtttactgtttagtgggtagagttttttagcttggtcgtggacaattcatagcctagtttggaaacgaaaaagaaacatttaattgtgcatgtactattaaaccattcctttaatcatgtatctcagattgctatcatggtttct

SEQ ID NO: 13644 - DNA, 599 bp, Zea mays
  Clone ID: LIB143-017-H1_FLI
caggtctatatgttaaaggctgaaggtatcgcatttaggttcttacccgaccctcttcaaataaagaatgcactggagatgaaatcgggcttaactgcttttgatggtgttcctgtttttcagtcagatctgctggttgtgaagaagcagaagaagcgctactgtccagtatattttcaaaaggaagacatagaaagagaacttacaagggcttccaaaggttcaagagggtcagccttatctaagaaaattatggttggaagtttggaggatgtcctgaagaaaatggagataaatgaaagagattctggctgggatgatttgatctttataccccctgggaagagcctcaaccaacatatcaatgaggtatcagcatgattttgttccacggtgatagctcagagtttgaacagactattcactttaaatgctatgatggtcagccaaacgaaatatcaaattgctgcctgagcttttcctttggatagctattttcatggtcagctttgtcagggaaaattaactaaagtgatagaatatggctgtgaaacaattttcttgttgcttcgattcacaaaattaacacaggttacaca

SEQ ID NO: 13645 - DNA, 1366 bp, Zea mays
  Clone ID: LIB143-017-H3_FLI
catgaattgcaactcatcagcatgcagcagctagtaccccggctgttctgttctgttctgtccgctagtgtcgtcttctgctggtgagcgaggcaaactatgcgtgcgtggatgtggatggtacaggaggcactggccaagggcagcccagccgagagcaggatccgcgcggacacggaggaggccgtcaagagcatgcgcgccgcggcctgctcctgctcctgcacggggcggcccgccgcccgggactgccggccgtgcatgctccggcacgtcgccgaccggctgcgcgacgccggctacgacagcgcgctctgcaaatccaagtggacgcgctcgccggatatcccttcaggtaacctgcgtctcgcgcgtcgtgattataacttcgtcttttcgttctttctaccgcaataaacgcaacgttgaggaatatcctgtacaagctcacatggttcacatggacttggtcatcctcctatgacactgacagacgccgcttcccagctgatactcctacacagccgccctaacaaacattccaacaaacagccagccaaatgccaggaacgcgtctctttctccgacggttcagcgttagcggaggcgtccacaccaaccctctaggtctcggacccaaggatgcatgttacctgcccaacatcctaaaaaaatctgaacccagatattcgatgccgaacaggttggttcgttcgtttgctgacgtgttctcttccgatccgccgaaacgcgtgtgcaggcgagcacagctacgtggaggtggcggtgcagacgaggagcggcaagtccgtgcgcgtggtggtggagctcagcttccgcgccgagttcgaggtggcgcgcgccagcgccggctaccgcgcgctggtgaccgcgctgcccgaggtgttcgtcggccgggccgaccggctgcgcggcgtcgtcaaggtcatgtgcgccgcggccaagcagtgcatgaaggataacaacatgcacatgggaccctggaggaagcacaagtacatgcaggccaagtggctcggcacgcccgagcggggagcggcggcggtggcggcggcggagacgccggtggtggcggttccgtcggtgacggtcggctcgccagagaagcagaccaagttcagggcgtccatgctgaccttcgactttggccggaccgcgctggaggtcgcgtgatgaacgcacatacgctgccggtcgagcggcattagtagttctctaaatatagacagaggaggtaactttcgagaagaaaaaaaagttatatagagtgtacctgggttttaggtttttgtcaggattcagaaagctgaatctgtaatatcaatcgagctaggtgtaaacagat

SEQ ID NO: 13646 - DNA, 2961 bp, Zea mays
  Clone ID: LIB143-018-A10_FLI
gctttactgatatcagcatagaaaaagcagttgagtatgatgaatactgtcatagccaccagccgccaattgctttcattaagtccgaagtttgtggcctttttggcagtgttttctgtgactttggtcctgagttcactgttttggatgtcgatggcgaggaaccacatacaggaattgtggcatcaatcagcaacgacaatccagcacttgtttcttgtgtggatgatgaacgtctggagttccaggatggtgatctagttgttttctccgaagtgcatggaatgaccgaactcaatgatggaaaaccaagaaagattaagaatgcaaggccttattcttttactctagaagaagacaccacctcatatggcacttactttagaggtggtattgtcacacaggtgaagccaccaaaggttcttaaattcaaaaccttgaaggatgcaatcaagaagccaggagaatttctcatgagtgatttctccaagtttgaccggccacctcttctacatttggccttccaagctttggacaagtttaggtctgagttggcacgatttcctattgctgggtcagatgatgatgcacagaagctgatagatcttgctattagtattaacgaaactcttggtgatagtaagcttgaagaaattgacaagaagctcctgcagcatttcgccagtggttccagggctgttttgaatcctatggctgcaatgtttggcggtattgtaggtcaggaggttgttaaagcatgctcagggaaattccatccactttaccagttcttctacttcgattctgtcgaatctctgccagttgaaccgttggagcctagtgatttgaagccagagaacagtagacatgatgcacaaattagtgtctttggggctcagcttcaaaagaaactggagcagtcaaaaatcttcatggttggttctggggctcttggatgtgaatttttgaagaaccttgcgttaatgggtatttcttgcagtcaaaatgggaagctgactgtgacagatgatgatgttatagagaaaagcaatctcagtcgccagtttctcttccgtgactggaacattggacagcccaagtccacagttgctgcaactgccgctatggcaattaatcccgagcttcatgtggaggcccttcagaacagagcaagtcctgagactgaaaatgtgtttaatgatgccttttgggagagcttggatgctgttgttaatgcattggacaatgtcactgcaagaatgtacattgactctagatgtgtatatttccagaagccacttcttgaatcaggtactctgggtgccaagtgcaacacacagatggtcattcctcacctaacagaaaactatggggcatccagagatccaccagaaaagcaggcacctatgtgcactgtacattcatttcctcacaatattgatcactgcctgacttgggccagatctgagttcgagggtctacttgagaagactcccactgaagtaaatgcttttctgtcgaaccctggtggatatgcaaccgcagcaagaactgctggtgatgcacaggctagggaccaacttgagcgagttattgaatgccttgagacagacaagtgtgagacattccaagattgtattacctgggcccggttgaagtttgaggattatttctccaaccgtgtaaagcagctgacattcacttttcctgaagacgcaatgactagctctggtgctcctttctggtctgctcctaagcggttcccgcgaccactggagttctcatcttctgactcaagtcaccttaacttcttgttggctgcttctatattaagggcagagacatttggaatacccatacctggttgggcgaaaaacccaaagaaactagctgaagctgtggacaaggtcattgttccggatttccatccaaaagagggtgttaagatagagacagatgagaaggctactagcctatcctctgcgtccgttgatgatgctgccgtcattgaagagcttattgcaaagctgcaagcaatttctaaaacattgtcaccaggattccgtatgaaccctatacagtttgagaaggatgatgataccaatttccatatggacttgattgctggttttgctaacatgcgggccaggaactacagcatccctgaagttgacaagttgaaggcgaagttcatagcgggaagaatcatcccggccatcgccacctcaactgcgatggccaccggccttgtctgcctggagctttacaaggtccttgctggtgggcacaaggttgaagactaccggaacacatttgcgaacctcgcaatccccctcttctccatggcggagcctgtgccgcccaagaccatgaagcaccaagacatgtcctggaccgtgtgggaccggtggaccgtaactggcaacatgacgctgagggagctcctggagtggctgaaggagaaggggttgaacgcgtacagcatatcctgcgggacctcgctgctgtacaactccatgttcccgagacacaaggagcggctggacaagaaggtggtggatgtggccagggaggtggccaaggtggaggtgccttcctaccgccgccatctggacgttgtggtggcctgtgaggatgacgatgacaatgacgtcgacatcccgcttgtgtctatttacttccggtaaagaggagggtgtcgctacctgtttacatgaaacctgtctgtgcgacgtttgtcagaaggatcgagtctataagttgcgcaagcaaccgagaactaggctgtgttcaatggaaacacatacttgttgtgttcaatgtaaacacatattgatgagtctataagttggctgggaatcgtcgccgagatttgggttcaccgttatggaattcttggagcatataaaacatcgtgatagttattgcatgtcaatgtcactgctagatgttgttgtcctc

SEQ ID NO: 13647 - DNA, 1550 bp, Zea mays
  Clone ID: LIB143-018-A7_FLI
gggctcctctgtttcctttcgtcaccgtcctcgccgttgtgttcccctctcagtctcggggttttcttctcgcgggcacctccggctgcttcctttgccaccgcagcaccagcgctgtccatgaagcccccgccgctctcctcgttgcaggaggagggggaggaggggcctaccgtcgaggactcgtccgtcttctccgcagccgttgtgccgcctcgccccgccacgcacagccactcgctccacaagtacgcgccgctggactggtccgcctacttcgacgaggagcgccgcgtagccatccccgacaccgacaacgttttcaatgcgtacacgaccggatcggaggggcccgtcgtgttctgcctgcacggaggcggttattcggggctttcatttgctctagcagcaagtcaaatgaaggacaaggctcgtgttgttgccatggatctaagggggcatggaaaatcaacaacgaatgatgatctagatttgtccattgaaactcttaccaatgatgtcatagctgttatacgtacaatgtatggagatttgccaccagcaattatacttgttgggcatagcatgggcggttcagtggctatacatgtggctgcaagaaaagaaattagaaatcttcatgggcttgttgtcgttgatgttgtcgagggaacagcaatggcttcattagttcatatgcagaagatcttagcaaaccgggcacagcattttcctagcattgaaaaagcaattgaatggagtgtcaaaggtgggccattaaggaacatcgagtctgctcgtgtgtccattccatctaccctgaaatacgatgaatcacgagaatgctatacatatcgcactcctcttgagcaaacagaaaagtactggaaaggatggtatgaaggtctttcagacaagttcctatcttgcccagtgcaaaagatcctgttgttagctggtaccgacagactggacagagctttaacaatcggtcaaatgcaaggaaaatttcaaatggtggtgattcggcacactggacatgctatacaggaagatgtacctgaagaatttgcatcgcacatactgaagttcatatcccgcaacaaaatagggcctaacggtgttgagatacctgggctcattaaaaaatggcagcagtagacataatgtacaagttaccgttctggaaaatgttcaggaaaatgatgagtaggtctgcctatccgagttctcttcatatcgaattaaaaaaaggttcaagatgatcatgcgatcgttaacaatcagtcattggtttcgtcatctgttggcaactctcccatgtcgcttgagttgctttgtttctgacatcactctgcgacctgccggcgtcttttgtacgagggttcttgtatgtttttaggtagagctgagtgcagtgcgttgtaatgctttccgtgaggttattatactgctatcaagcaggatcagctcgttatgacagctctgtttcgaatttctgctggcctcggcaagcttgatgggaataaatcgaagaagccttctttgat

SEQ ID NO: 13648 - DNA, 1111 bp, Zea mays
  Clone ID: LIB143-018-B1_FLI
gccagccgatacgaatccgacgagctcgatcgctccacttccccgatcgcacgccaatcagcaccagccaccgtggcgatgacggaggaggcggaggcgaaggcgaagggcaacgcggcgttcgcggccggccgtttcgaggaggctgtccagcacttcagcgacgccatcgcgctcgcgcccgacaaccacgtcctctactccaaccgctcggcggcgtacgcgtcgctctggcgctacgcggaggcgctagatgacgccaagcggaccgtggcgctgaagccggactgggccaagggctactcccgcctcggcgccgcgcaccttggcctcggtgacgcgcccaaggccgtcgaggcctacgagaaagggcttgcgctcgagccgtccaatgaggcgctcaaatccggcctcgcacaggcgcgccagtccgcatcggcgccgagacgtccggtgggctccggggctgacgccgttggcaagatgttccagggccctgagctatggagcaaggtcgcggccgatcccaccacgcgtggctacctcgaccagccggacttcgtgcagatgctgcgggaggtgcagcgaaaccccggcagactgaacagctacctttctgaccaacgaatggttcaggtgctcaccctcatgctgaacatcaagttccagaaccagagcagtggggcgcctgacccggcagcagcacaatcgaacccgccgccaccaaagcagcagccagaggcgaaggcaagagaaccagagccggacccggagcccgagcctatggaggtgacagaggaggataaggagcagaaggagaggaaagcgtcggcgcagaaggagaaggaagcaggcaacgccgcttacaaaaggaaggattttgataccgcgatccagcactacacagaagccatggagctcgatgacgaggatatctcctacatcaccaatcgtgctgctgtttaccttgagatgggaaaggtaaggactcgtaggtccctagttctaaatcacaagttatttacatatatatgtagtctttagttaaagaaaaaaaacgtaaaatgtgggttgtctgaattttgtcaatgtgatcagctaccgagaactt

SEQ ID NO: 13649 - DNA, 1666 bp, Zea mays
  Clone ID: LIB143-018-B5_FLI
cttcagcaaaattctctctttatgtgtttcctacttcacttctgtgtacgtaatgaagtggaaagacttctttcctaacaaagagctgaaggagccaccatattttgatgctcgagctgtatgttacccgaatttgaagactattcgtgattatttggcttggagacaagtggactgtaagctactggaattgattcaaattatcttgtatagcaaacgccacctcatatttgttcacacaacttttttgtttgccctgaagtcctacaaggaaactgcattatatacaccaaagttgtacaaagcatgaacctttgtgaacataaaaagaaaagtgatctatgtacgtgtcagaatcaaacagtaattttgttagttcactgatatgcatattctttgtttgtgccttcaggtcatataaataatcagtacaacacctgcttctggatgttggtgaaatctggaaaaagtgaacaagaggcccagctagctttgaagggaacatttgcaaaggacaagaatgagctgcttgctaaacaattccaaataaactatgatgatgaactggctatgttccgcaaaggatctagtgtttaccgagagaaggtagaaacaattgtgaagattgatgactatggggagcccataaaaagaccaagattgaaagttacagtggcacatgttgatatcatagggactgagttttgggaaaaccatccacacattcttcgagaaggaaaatttatgcatgggtttgtaaagaaatttggcatcaatcacatattttcaccttgtaattggatcattgtccgcatcattgcttgccaatttgaccaattctcaagaattcattcatttgacaagccaaatgatgagactgcactaaggctgatgaatgaatctgcaactttgatgatggagcaataccctgacattgtctttggctatggttttagcaatgagtatagttttgtgttccatgagaagagtgaactataccagagacgggaaagcctaatcctttcatcatgttcttcatatttcacttctctttacatgacgaaatggaaagagttcttcccctacacagaattaatgcagacaccacactttgaggcagatgctctatgttatccaaaactaaagatcatatgtgaatacttatcatggaggcaagcagagtgtcatgctggcaaccaatacaacacatgcttttggatgctagtgaaatctggaaaaagcgaaaaagaagcccatgagatattgaagggaacgttgtctaaagataaaaatgagttgctttttcagcaattccaaatgaactacaacaatgaacctgctatgttccgaaagggttcatgtgtctatcggcgaaaggtggaagaacttgcgggggctgaggacggcggcaatgtcacatcaagagagcggtggcatgtgaaggtggaccacgttgacctagggcccgggttctggcgaaagcacccggggttaatgactgatcgcactcagtagtcccgactgatacatggtttttgtactggtttatcagtgtatgtaactcttgctgacacaggtctagaaacgaaaggcggttgtttgttcacagatcgagccttctcttcaccctctatatgttctgatggttttctgagtcgtctgcctg

SEQ ID NO: 13650 - DNA, 521 bp, Zea mays
  Clone ID: LIB143-018-C6_FLI
agaggtttctgatccaaccgagagtagaggatgcagtgcttggccgtcggaaggctgaaaaggcaatggcttggcgggcagtttttacatcggctgggtttgctccagtgccactcagcaaccttgcagaggcacaagctgactgcctcttgaagcgggtgcaggtccgaggattccatgtggagaagtgtggaatgggtctagcactctactggcagcggggcgagctcgtgtctgtctcggcgtggcggtgctgatcatagcaacctcatccgtcaaccatcgtcgtcgtcgcgcctacactattcgcaggcatgtttaactccggtaatatgcgttttatcttgcaaacattgcaaagaaactattgtcatggttgttccacgcctctgattgctttactgctgtttttggagtattagctaggcctaatgaatgttgcaatcttggtgtgggtgtccccctacaatgtaacatgttggtactagggtctcaacgctgttcgtgctctcttcttggtt

SEQ ID NO: 13651 - DNA, 1513 bp, Zea mays
  Clone ID: LIB143-018-E12_FLI
cagacatgatcattggtgatgacactgtgtactactatcatgacatgatagtggaaatgattaaatggggatatcaagaaggaaaaactctctttggatttggttatgatttccgtcaaagcaacaggctctcagagacacttgacagattttctaaaaagctggagtcagtgtacacagcttctggtggaaagaagatcaatctcattactcattcaatggggggattacttgtgaaatgtttcatctcactgcacagtgatatatttgaaaaatatgtcaagagttggatcgcaattgctgcaccattccaaggtgcccctgggtacataactaccagtctgctgaatggaatgtcttttgtcgaaggatgggaatcaagattctttatttccaaatggtgtatgcagcaattgctacttgagtgcccatcaatctatgagttgctggcaaaccctaacttccagtggagagacatcccactgctacagatttggagagagaatttggataacagtggcaagaaaagtgccctgttagagtcgtatgagcctgaggaagcaataaagatgattaaagaggctctttccagtaatgagatcattgctgatggcatgcatattccggtgccccttaatttggatatattgaattgggcaaaggaaacttatgatcttttatgcagtacaaagcttccggaatcagtgaaattctacaacatttatgggattgattatgatactccacatactgtctgctatggcagtgaacagcagccggtttcaagtcttagtagcctcttatatgctcagggaaaatacgtctatgttgatggcgacggatctgttcccgcagaatcagcaaaggctgacggatttaatgcagtggcaagggttggggttgctcctgaccaccggggaatcgtgtgcagtcgccgcgcgttccggatcgtccagcactggctgcacgccggagaacctgacccgttctacgacccgctgagcgactatgtcatactcccaacacgctacgaaatcgagaagcatcgtgagaaacacggggatgtcacgtcagtagcggaggactgggagatcatctcccctaacgacggcaagaccatgaggccaggcgagcttcctcctatggtcagcacactgaccacgagccgggaaggcaaggagggagcactggaagaggcgcatgccaccgtggtcgttcacccggagaagaagggacggcagcatgtgcaagttagggctgtgggtgtcagccatggtggctaaagccgtaggagccacgttggttgtctactctatctagcagtagcagctatacctctgtgcacgcactgtaaaattggatgtacatatatggctatgacctctgtagggatctggttttagaagtataaatgggcaccctgcctgcttgtaaatgttcagaaccgaaaacacaggccctgttcttttttttcctttttaaaaaaaataaaaagatggtaaaggattccatt

SEQ ID NO: 13652 - DNA, 1724 bp, Zea mays
  Clone ID: LIB143-018-G4_FLI
cggaacgcgtgggttcccctttcgtccactgcattttatccttcctggtgctctgtccacctctctcgctctgggccgccgccgccgccctaagccacgtgctgaggctttcgttggtctcttcgccggcgacgagcacccagcagttctgtagaaatggctgatggtgaggacatccagcctcttgtctgcgacaatggcactggaatggtcaaggctggttttgctggcgatgatgcaccaagggcggttttccctagcattgttggccgtcctcgccacactggtgtcatggtagggatgggacagaaggacgcatatgttggcgatgaggcacagtccaagagaggtattcttacgctcaagtacccgattgagcacggtattgtgagcaactgggatgacatggagaaaatctggcatcatactttctacaacgagcttcgtgttgccccagaggagcaccctgtgttgctcaccgaggctcctttgaacccaaaggccaacagggagaagatgacccaaattatgtttgagactttcaatgttcctgccatgtatgttgcaatccaagcggtgctctcactctatgctagtgggcgtactactggtattgtactcgactctggtgatggtgtgagccacactgtgcccatttacgaaggatatgcccttcctcatgccattcttcgtttggatcttgctggtcgggacctcacagactccctcatgaaaattctcactgagaggggttactccttcacaacctcagccgagcgagaaattgtaagggacatcaaggagaagctagcatatatagcccttgactatgagcaagagttggaaactgccaagaacagctcttcagttgaaaagagctatgagctacctgatggacaagtaatcaccattggtgcagagagattcaggtgccctgaggtcctcttccagccgtcgatgattggtatggaggctgctggaatccatgagacaacatacaattcaatcatgaagtgtgacgtggatatcaggaaggacctctatggtaacattgtgctcagtggtggttcgactatgttcccgggtatcgctgatcgtatgagcaaggagatcacttcccttgcaccaagcagcatgaagatcaaggtcgttgcaccgcctgagaggaagtacagtgtctggataggagggtcgatcctagcctcgctcagcactttccaacagatgtggatatcgaaggaggagtacgacgagtctggcccggcaattgttcaccggaagtgcttctagggtttcacaagttcctcgtcgttacctagtctcaaattatgtcccctccatttctcgagatatgtgtggcagatttgcatgatacgtttgtttgtttccatcggacctgaagtcttcttggggataggctcccccctttgtatgttgtggctccaatccatgtgcgagcacgctgtgtctgtcgtgacacctggttcgtgagatgggttgtcaaacttgattggtttgttgtgcgtggctggaagagctgatagttatatatttggcttggactgtgccgcttgtatgtatctgaattctgaaagcgttgtaatctgagcatccgtgcaaagtatgaatggcccttttatatgggctggattttccggtttctatacaatttggtgtttgtcgactgccaagacttaaaatataaacatgattgtattgcagat

SEQ ID NO: 13653 - DNA, 1490 bp, Zea mays
  Clone ID: LIB143-018-H8_FLI
ctcacctccattccaagcacatattcccggcccggcagctcaccaactaccttgcacttcaattcatcttatcgcggcacgcacagatatatatagattagtacctagctagatgctcatttagctgcagaggcgccatgattggggtgcgcattgtcagttataagtctctgatcatggtgctactgctggtgctcctcgtctgcgttgtctcgccggcgacggccgcggccggccgggcggaggaggcgcacctggtgcccgcgttgtacgtgttcggcgactccaccgtggacgtgggcaacaaccagtacctgccggggaactccgcgccgcagctcccctacggcatcgatttcccgcactctcggcccaccgggcgcttcagcaacggctacaacgtcgccgacttcgtcgcgaaactgttgggtttcaagaggagcccgccggcttacctgtccctgacgccaagaacgagccgtcagatcttgagaggcctccgcggcgtcaactacgcgtccggagggtccggcatcctcgacaccacggggaacacgatcacgttgacgaagcaaatcgagtacttcgcggccaccaagtccaagatggtggcgaacagcggcacgtcggccgtggacgagctgctgtccaggtccctcttcctcatcagcgacggcggcaacgacgtgttcgcgttcctgcggcggaacgggacggcgaccgaggcgccgtccctgtacgcggacatgctgtccagctacacgcggcacgtgcgggcgctccacggcctcggggcgcggcggttcgggatcgtggacgtgccgcccctcggctgcgtgccgtcggtgcgggccgcctcccccgacggcgcgtccaggtgcgtcgacggcgccaacgcgctggcgaggggcttcaacgacgcgctcagggcggcgctcgccaacctcacggcctcgggcgcgctcccgggggcgcgctactccgtcggcagctcctacagcgtggtgtcctacttcacggcgcacccgggagcggccgggttcagggatgtggccagcgcgtgctgcggcggggggcggctcaacgcgcaggccccgtgcgcgcccaacgccacctactgctccaaccgcggcgagtacctgttctgggacggggtgcacggcacgcaggccacgtccaagaagggcgccctggccatcttctccgcgccgccgcagatgggcttcgccgcgcccatcaacttcaagcagctggtgtcttcttgatgcttggaatccggagctttccaccggtgtgacacaaatcactacacctagcagcctagcactaccaaaacagcttttgattattacacaaatcagtagagaatacaaactaataaaccatgtaatgtagagccatagagggagggagcagcatgtacacagattgagtccagcgagacaaatttctcgccatgtacgctcgcgaataaactagcaggttgcact

SEQ ID NO: 13654 - DNA, 1255 bp, Zea mays
  Clone ID: LIB143-019-A10_FLI
catcgcaccaagccaccagtccgcagcacgaaagcttccccccctctcttctcctgctggttggctcatcaggcctgcccgaataatcctcctgcggattcccctcacggcaggccaaaacccgcacctttcccccgtcgacagattctcaaacccggcgaactccgggcagggctcacgtcgccgatcccgctcccggattctctttgccgccgcgaggagacggcgtccagtccaggccttcagcagctccgtctccgtgtgtatctgatcgggggattctttgcttgagaaactgctagcatgggcgcggtgcttggacggcatgacacgcacaagcggagttcccatggttcgaagctggaggtaaagatggtcgacgctatgcagcagagagcatcgcatggaacctcactgaaatcgttcgatagcattatcatgaagttccccaaaatagacgagagtttcagaaaatgcaagactatcttcgaacagtttgatgaagattcaaatggcgaaatagataaagaggaactgaaacattgttttcaaaagctggaaatctcattcacagaggaggagatatgtgatctctttgaagcttgcgatataaatgaagatatgggcatgaagttcaacgagttcattgtctttctgtgccttgtctatcttctcaatgaagcagctgtcttggaagcaaagataaagatgggactaggaaatcttgaggcaaccttcgagaccttggttgatgcgtttgtcttcttggataagaataaagatgggtatgtgagcaaggatgagatgatccaagcaataaacgagaccacgacaggagagcgctcttctgggcctatagccatgaaaagatttgaggaaatggactgggacaagaacggaatggtgacattcaaggagttcctgtttgccttcactcgctgggtaggaattgatgaaaatgaggatgaagatgacgatgaataaggactgtgaaggctggttattcttcaagggttagggccagatcagccttggagaagctggaaatggatggcggataaaagcagttgacgtttattggttgcttgttgatcgtaatattcatgccattgctaatagaatgtctcgacattatactcctagtagggtgacttgcatgtctgaacactggtatcaatgttacagttgctgtctactttcttccatgccattcagccattgttctactctgcgctagcccgcgccgatccatttc

SEQ ID NO: 13655 - DNA, 497 bp, Zea mays
  Clone ID: LIB143-019-A3_FLI
cgcacccggttccgcgtgcctttccccacctactctcgcggctctcgccagccagtctagggtttcggtcccggcgtgcttatccgcccccgccggccatgtcgaagcaaggagggaaggccaagccgctgaaggcgcccaaggccgacaagaaggagtacgacgagacggatcttgcatatctgcagaagaagaaagatgaggaaaaagcactgaaggagcttaaggccaaggcacagaagggcgcgattgggggctcgggtctgaagaaaagtggaaagaaatgagactggtcacccgtctccaatacctagaggatgataaggcagctgtctatctgtgttgcgcttcactaagtgtgattgtaacagtggtacctcttgtgttctgtgttccgcgatgttgcagttggttgcttgatcgaaagatgtttcaacctcccatctgctagctatgatacagatggtcccctgataataatgatgacatattctgtg

SEQ ID NO: 13656 - DNA, 741 bp, Zea mays
  Clone ID: LIB143-019-B4_FLI
gctggcttctcctccccctcttatcaagtcctcctcgggttagggttccttagggttttgtggaggggcgatggcggcggctgatgtggagtaccgttgcttcgtcggcggacttgcctgggccaccagcaacgagtcgctggagaatgccttcgcctcctacggcgagatcctcgactccaaggtcatcaccgaccgggagacggggaggtcccgcggcttcggcttcgttaccttctcctccgagaactccatgctcgacgctatcgagaacatgaacggcaaggagctcgacggccgtaacatcaccgttaaccaggcccagtcccgtggcggcggcggcggcggcggcggcggtggctacggcggcggtcgcggcggcggcggctatggtggcgggcgccgtgacggcggttatggcggcggtggcggctacggcggtcggcgcgagggtggtggcggcggctacggaggcggtggcggctacggcggtcggcgcgagggtggtggtggcggctacggcggcggcggcggcggctggagggactgatgtgtggccccatcctggcttcggccgagttatcttatctatctatagtatcgtgttaccgttcgcttctgtcaccgtgttagtgtccgttctacctttggattaggtgttggtaccccttttgttcgctttggttgctcccgctatgaaacgagacgagagaagaatgagcaaggtttttgttcgcatct

SEQ ID NO: 13657 - DNA, 1253 bp, Zea mays
  Clone ID: LIB143-019-D3_FLI
gacaacgtcaaggccaagatccaggacaaggagggcattcccccagaccagcagcggctcatctttgctgggaagcagcttgaggacgggcgcacgcttgccgactacaacatccagaaggagagcaccctccacttggtgctgcgcctcaggggaggcatgcagatcttcgtgaagaccctgaccggcaagactatcacccttgaggtggagtcttcagacaccatcgacaacgtcaaggccaagatccaggacaaggagggcatcccaccggaccagcagcgtttgatcttcgctggcaagcagctggaggatggccgcacccttgcggattacaacatccagaaggagagcaccctccacctggtgctccgtctcaggggtggcatgcagatctttgtgaagacactcactggcaagacaatcacccttgaggtggagtcttcggataccattgacaatgtcaaggccaagatccaggacaaggagggcatcccaccggaccagcagcgcctcatcttcgccggcaagcagctggaggatggccgcaccctggcggattacaacatccagaaggagagcactctccacctggtgctccgcctcaggggtggcatgcagatttttgtgaagacattgactggcaagactatcaccttggaggtggagagctctgacaccattgacaatgtgaaggccaagatccaggacaaggagggcattcccccagaccagcagcgtctgatctttgcgggcaagcagctggaggatggccgcactctcgcggactacaacatccagaaggagagcacccttcaccttgttctccgcctcaggggtggtatgcagatctttgtgaagaccctgactggaaaaaccataaccctggaggttgagagctcggacaccatcgacaatgtgaaggcgaagatccaggacaaggagggcatccccccggaccagcagcgtctgatcttcgccggcaaacagctggaggatggccgcaccctagcagactacaacatccaaaaggagagcaccctccaccttgtgctccgtctccgtggtggtcagtaagtcatgggtcgtttaagctgccgatgtgcctgcgtcgtctggtgccctctccatatggaggttgtcgaagtatctgctgttcgtgtcagtgttggtttaataatggaccggttgtgttgtgtgtgcgtactacccagaactatgacaaatcatgaataagtttgttgtttgaaatt

SEQ ID NO: 13658 - DNA, 1312 bp, Zea mays
  Clone ID: LIB143-019-D8_FLI
atcctaaaatgtgcatttgaggctgctggtcacagcccagaatatgaaggttcatttgctgatgcaggaaatccagttatagcactagcagcgtatttagctggtcttgtggaagatggtaacgctaccacttcattccgtagttcactaaaatctatatctgaggtgcctcctgcactccaattagcaagtaggcactgttttattcttgaggatccaccaaatgaactcaaagacatttgtgttagtgtaagtaagaaaaatacagatgctgatcaaacaaaagatgaggatatgatttcaaattcaatcgccaatgagaaaaaagagatcaatgagaaagaagataagtctttatctgtggaaaagacaaataattcatccatgtcacaaaatgaccatcaagaatcaaacattaagagtgtctcacgtgatgattgctcctcagtggagccaaaaggcaataatgctaaggagtcaagtgattcaactggtattggggatatgagtgcaatcggcactacaaaagatgttgttgcaggcaattctaaacaagtgaacgactcacctagtgttgaggtggaggctcctgatgactcttctttaaaaagcaaggatgagctcaatgatactgaagatgcagtggcgacaccagctaccgtacaggaacagaaacacagccaaacattggaaaatggtgataaggcagaacctaacaatattgaacgtgtagttgtcgatgagaagggctctatagtgactgccaaccaaaatgattccataactaggctcaaacgagcagcagccactgctgtttcagcagctgctgtcaaagctaagtttctcggtgatcaggaggaatatcatattcgaaggctgacagcacttatgattgaaaagctgttccagaaattagaagtgaagatgtcgttgttttcagagattgagcaggtggtccttcgaacaagagagtacaccgagaagaccagaaaaaaactcctaatggaacgaaatgcgattattgcagctcgtatgggtgcattgccgtctaggccaaaccagcctggtgtagccggcaacaggttaccacctggatatggcaaccctcctttgaggtctccaaacgcaatgccgcggccttccagctgaggaaaatccggattccggacacccagtggtctatactccattcatttagaagcatacggacctcaaaaacctcaaacctgccagtttgttgtagcattttttagaaagtacattgtacaattgcctgtataactgcttatatgaaaattcaccattttcactt

SEQ ID NO: 13659 - DNA, 515 bp, Zea mays
  Clone ID: LIB143-019-G1_FLI
gccgctcgcgtctcgctcacgcgaacgcagcctccgtgcatatcaccagcctcctcgcgcacgcggtcccgcttgcctttccccacctactcgccgtcgcggtgccgtgcgccggtgctggccagtctaggttttcggccctcgcccgccgatccgtcccccccgccggccatgtcgaagcaaggagggaaggccaagccgctgaaggcgcccaaggtcgacaagaaggagtacgacgagagtgatcttgcttatttgcagaagaaaaaagatgaggaaaaggcgctgaaggagctgaaggccaaggcacagaagggcgcaattggaggctcgggtctcaagaaaagtggaaagaaatgagcattgcccacccacccatctccaaaacacctaagagaacgataagacagctgcttatctgtgttgcgcttcactatatgatatatgtggctgtgagacaatgttgcctcttgtattccgtgtttcgcggtgttccagttggtttgcttgatccg

SEQ ID NO: 13660 - DNA, 1762 bp, Zea mays
  Clone ID: LIB143-019-G10_FLI
ctcacttgcatttttggcacaccagaacagaagaagaaaaaaaaaacaggcactgagctgagatggcgaagcacttggctgccatgtgcaggtgcagcctcctagtgcttgtactgctctgcttgggctcccagctggcccaatcccaggtcctcttccaggtacctgcgcagcgtcctcgtctcttcccggccgatcgctcaaaaaatactcatcaatcaggcgtgctagaaagcacaagtctggatttaattttgatgctgatacatatatgctgcgtgtctgcgtgcagggtttcaactgggagtcgtggaagaagcaaggtgggtggtacaactacctcctggggcgggtggacgacatcgccgcgacgggggccacgcacgtctggctcccgccgccgtcgcactcggtggcgccgcaggggtacatgcccggccggctctacgacctggacgcgtccaagtacggcacccacgcggagctcaagtcgctcaccgcggcgttccacgccaagggcgtccagtgcgtcgccgacgtcgtgatcaaccaccgctgcgccgactacaaggacggccgcggcatctactgcgtcttcgagggcggcacgcccgacagccgcctcgactggggccccgacatgatctgcagcgacgacacgcagtactccaacgggcgcgggcaccgcgacacgggggccgacttcgccgccgcgcccgacatcgaccacctcaacccgcgcgtgcagcaggagctctcggactggctcaactggctcaagtccgacctcggcttcgacggctggcgcctcgacttcgccaagggctactccgccgccgtcgccaaggtgtacgtcgacagcaccgcccccaccttcgtcgtcgccgagatatggagctccctccactacgacggcaacggcgagccgtccagcaaccaggacgccgacaggcaggagctggtcaactgggcgcaggcggtgggcggccccgccgcggcgttcgacttcaccaccaagggcgtgctgcaggcggccgtccagggcgagctgtggcgcatgaaggacggcaacggcaaggcgcccgggatgatcggctggctgccggagaaggccgtcacgttcgtcgacaaccacgacaccggctccacgcagaactcgtggccattcccctccgacaaggtcatgcagggctacgcctatatcctcacgcacccaggaactccatgcatcgtaagtccccaaccgggtcggtccatcaccaaatccagaatcctggccgacacactgacactcttgtccttgcatctgtaattcagttctacgaccacgttttcgactggaacctgaagcaggagatcagcgcgctgtctgcggtgaggtcaagaaacgggatccacccggggagcgagctgaacatcctcgccgccgacggggatctctacgtcgccaagattgacgacaaggtcatcgtgaagatcgggtcacggtacgacgtcgggaacctgatcccctcagacttccacgccgttgcccatggcaacaactactgcgtttgggagaagcacggtctgagagttccagcggggcggcaccactagactagacccattccgcccagcaacccctacagataattctcttttcaggtccattttgaacctggaaaagaaatttaagagaggctaaataaccggaatacgattgtgtactgagcttctttcagctaattattgaaagaagattataatgtttggatgcact

SEQ ID NO: 13661 - DNA, 1137 bp, Zea mays
  Clone ID: LIB143-019-G9_FLI
gaagcagcaaatattttctgacttagagaagtactgtccttcacattgcatccttgctactaacacatctacaattgatcttaatctgattggggagaaaacaaaggctcaagatcgtattgctggtgcacacttctttagtcctgcgcatgtgatgccacttctggaaatagttcgtactcagcacacttcaccacaagttgttgttgacttgctggatgttgggaagaagattaaaaagacaccaatagtcgtcgggaactgtactggctttgcagttaataggatgttctttccatacactcaatcagcactcttttatgttgatcttggtatggatgtttataagattgatcgtgcttgtaccaaatttggaatgcctatgggtcctttcagactggcagatctggttggttttggtgtggctgtggccactggtatgcaataccttgaaaatttcccagagagggtctacaaatcaatgctacttcctctgatgatggagggcaatagggcaggtgaagccacccaaaaaggattttacaagtatgagggcaagaggaaagcgactcctgatcctgaaattatgaaatatattgaaaaatctaggagcatggcaggagttacaccagatcctgagctgatgaagctaagtgagaaagacatagtcgagatggtgtttttcccggtgataaatgaagcctgccgagtccttgatgagggtatcgccgtcaaggcttctgacctagacatcgcttcaatctttggcatggggttcccaccttataggggaggtgtcatgcactgggcagattccatcggcgcaaagtacatccatggaaagttggaggagtggacaaagcggtatgggggcttcttcaagccctgctcttacctcgctgaaagagctgcaaaagggattcctctgagtgcaccaacaaagaaagttcaggctcggctataagatgatttccttgtggatggaggagacaataatggattccggtgaagcatttggaatgcgtagagctgtaggctaccactatcacatgcatgtaacgcaatatactactgtgaaaataaagtgcactgcacggcggtttttttatatataaatacaaggatttttttcttgtc

SEQ ID NO: 13662 - DNA, 350 bp, Zea mays
  Clone ID: LIB143-020-F2_FLI
agcaggtcgagcatcttcgacgccaaggccgggatcgctctgaacgaccacttcgtcaagctcgtctcgtggtacgacaacgagtggggctacagcaaccgcgtcgtcgacctgatccgccacatgttcaagacccagtagaggggttttttccccctgcttctcatggatggttgctgcttgtgtatgccgagaataaatgtggatggcgcgtgcctctgggtcgccaggttcatgctgagtctggacatgttttgcacttttgcttcccttcctgctaccatctgtgacagaaccgctcgctaatatgggacctgagattagctttttgctgcttgtggtgaggttgc

SEQ ID NO: 13663 - DNA, 1788 bp, Zea mays
  Clone ID: LIB143-020-G2_FLI
ccaattgggaaagaatatattgaccctgaatgatgcgaatttctgtcagttgcttgttccgtctgggacagccgtgccataattttgagggtcttccgtctttaattggttgctagtatatcaaggttttcctcctacctatgcatggaaacatggatttaattgttctctgtacgtatatccatctcttgctaacggaacctgtggatcaaaatcatctcatgttcgattggtatactactttgtcatctcacttctatgtgtagattttagctttttttcatagggctgccgtctagttttacttctgtacgtatttcattcactagataggtatctagatacttggatggcgcaattgtcttgattcccaacccaacagcatagtctcggagtggctagtaccttgcctgttatagttatctaactaataatgtacatcaattcattatgtcaaagtcgtttcattaatttgttcttctatatattcatcccctgcttcatttcccttcacctgctgctgccccccttctcaacttaattatctcctctcttgccacagtgaaggagccttatgagctggttggctggggctttactccaattctggtgctactaagatgggccagggcctgctcagcaacaagtctgggacaagactaagcatagatgaaatagcaggcgcttaccatttcttgctcttgctctcccccgtggtttccttctgggactgcatcttccgcaagataagatactcattcagacctgagtgggtgtagcagcatcctgcactcacccacccatcttagcaacagttcctttccttttcttcctcgttattaaaataaaaaaaagttagacaaaccaatgaggccaaagaatgaagtttgaacattttgttttctttcttccctaattatacctagtagtgagtagaggagtcaggtctaccagaggtaatagtgaatagcagcaggcacggctgtcatggacagggctaccatgagcagcaatcaggcaggcaaagtgttgaagaaaggaaaaaagaagcaggccaaggacgagctggaccgccagaagcaggcggagaagaagcggcgccgacttgagaaagcgctggcaaactcggctgccataatctcggagctggaaaagaagaagcagcagaagaaggaagaacagcaaaggctggacgaggaaggtgctgccatagcagaagcagtcgctcttcatgtcctcataggcgaggactccgatgaaccctgccatttgatgctgaacaagcaccatataaggtgcaaccattgggccccctcggctgcttttgaattcaccgtggacgcacagcccgccgaggtgtacccgtctgaggatggactggtatgcggcagccatgcgtatgctcccagagcccccaaggggaggcgggctgattgggggattggacaggcactgccatgctggggagaagtgagtgacctccaaggcccgtactaccaaggaacgttccgtcagtctgttacctgccctggcttcatagccgctcaggctgtgtcatcgttgcagatcagggaagagtcgccagaggtcacctctccaagccatggggccgatgctgctgcgaccgtggttaaccggatgcttggtggcaccagcaggctcaacctttacagggggatataaacatttacacttgtcaaagaattgtattgtatatataaaaaagaagatgtgtttggctgcattgcctgcaatatatatataatatagtcttgtggtttccgaaag

SEQ ID NO: 13664 - DNA, 503 bp, Zea mays
  Clone ID: LIB143-020-H2_FLI
gtcaccagctgccattgccatctactgacctgtgacctccgcattcccaaacagcccgagcgagcgagctagcagagcggcggcaggcacctccctcctcaaggaacatggcccgcacgcagcagttggcagtagtggcgaccgccgtggtggccttggtgctgctggcggcggcgacctcggaggcggccatcagctgcgggcaggtggcgtcggccatcgcgccctgcatctcctacgcgcgcggccagggctcggggccctccgccggctgctgcagcggcgtcaggagcctcaacaacgccgcccgcaccaccgccgaccgccgcgccgcctgcaactgcctcaagaacgccgccgccggcgtcagcggcctcaacgccggtaacgccgccagcatcccctccaagtgcggcgtcagcatcccctacaccatcagcacctccaccgactgctccagggtgaactgaaccctaaacgacgacgacggcgccggcggccgc

SEQ ID NO: 13665 - DNA, 834 bp, Zea mays
  Clone ID: LIB143-020-H4_FLI
ggggtttggttttgttaccatggccgctgttaaagatgcagatcgctgcataaaatatctggaccgttctgtgttgcaagggcgggtcataactgttgagaaggcaaagagaagacgaggtagaaccccaacacctgggaagtatcttggcacaaaatcatcccgtggacggaggtactccacaagctactcacctgatcggaggggccgttacagttcccgctactcacctgatcggagggactgtcatggtagagaccggtcatactctccatatgacagaaggcgatcatactctccctacagcagggatggatcatactccccttactatggccggcgatcatactcaccttactacagcagacggtatcgttcaaggtccccatactgctacagaagacgtaggtcaccttctgtttcgccatactaccgccggcacaggtacagatctgtgtccaagtcatccagttcatctccaagggccagaggacggagctattcgtgcagtttatcaccacagagaagctactcgcgcagccattccccagaatccgagagatcaacaagctattctcctaagaaagggagtaaaagggaaccctcgcgtagcagatactctggcaagagtcgtcattcaagggaaagccactctcatagccgcagttcgtactccaggtctgtgtccagggagcgctcagcttgatctgcgaggtgtgtcgtcctaggtggttataagatatgcgctgtatttgcatctatcagaacttgtgtacttcgtatattacgaacttgagaactgtatggatgtgtgcattgtgccaaattatgttc

SEQ ID NO: 13666 - DNA, 1215 bp, Zea mays
  Clone ID: LIB143-021-B8_FLI
gcgcacgcaccatcgtcctgccgatcgatcgcagccagccagtcttgctgagagacgaactgaagcctgaagtgaaccgatcgatcgatcgatcgagcgagcgagctcccatgaaggcgttgattctggcggcggtgctgctgctgcagcacgggggagccgcgagcgccggcggcaacttctaccaggacgtggacatcacctggggcgacggccgcggcaagatcctcgacaacggccagctcctgacgctgtccatggacaggtcctccggctcgggcttccagtccaaggcccagtacctctacggccgcttcgacatgcagctcaagctcgtcccgggggactccgccggcaccgtcgccaccttctatctttcgtcgcagggttcgcagcacgacgagatcgacttcgagttcctggggaacgcgagcggggagccgtacacggtgcacacgaacgtgtacagccaggggaagggcgggcgggagcagcagttccggatgtggttcgaccccacggcggccttccacgcctactccgtgctgtggaaccccgcccacgtcgtcttctacgtggacggcgtccccatccgggagttccggcgccgcggcgacgggaccgtgccgttcccgacgtcgcagccgatgcgggtgtacgccagcgtgtgggacgcggaggagtgggccacgcagggggggcgcgtccggaccgactggtccaaggcgcccttcgtcgcgtcgtaccgcgggtacgccgccgccgggtgcaccgcgccggacgccgccgcctgcgcgcgctccaacggcgcatggatgtcgcaggagctcgacagcgccggccaggagcagctccgccgggcgcaggccagctacatgatctacaactactgcaccgataagtaccggttcccgcagggcccgccgcccgagtgctcgtcgccggccaagtagtagatgagtagaattgatcggatacagagagcaatcaattaattaaatcgacccgtcgcttggtttttggtttacacattgtactacggcataagttcggcggatatatgtatacgtagacggctagacgccatgcatgtgtcttggcatgtatcgtattcgtatatatcgtaattcgtatgtacctcagtatacctgcatcgtacatttacatgcatatatatctccctatatataaatatatatggttttattacacggg

SEQ ID NO: 13667 - DNA, 683 bp, Zea mays
  Clone ID: LIB143-021-D12_FLI
aaacataaataaatgctcataatatttatgcttcattgatacattcagttcgacaaatgatgaaaatgtgagagacgcaggaacgattaccatgcagcatgaatagtacggggtactgttcatctatttataggcgcagaacgtaacccagacgaaattatatccatgtcattaataactaattatgatcataatacagactaccaagggctatacagtattttcctctttaagtcggtatcgtccttcgtctttagcatgacaccaagccgaagctctttcgatcgtagcttcgacttatatcttcatgttgcacctgcctttgtactgtcttgccgaaggtgtttttgcctagaggaccttcggcggagaaaaagaccccaacactagcgaagctcagatctttggaaaatgaacatcattgaagcattgcagcacacttcaaacctagctacttggatagttcagttgaagtttgaatgataacccagtcctggatatcctttctccgtcatttggtacagcaagaaacctttctctcaagatggcctaaactggacagtggacgtctagtgatcttgtcgtcacctcaatactctcttctccggcgcttgaaactcgaaggtacggtgaactgattttgggagttctggagggatgtaatttcaggaacaaacattgtg

SEQ ID NO: 13668 - DNA, 757 bp, Zea mays
  Clone ID: LIB143-021-D3_FLI
cgaagtcatgcctggacaggtagtagtagtacttgatgcatgctgctgatctgaactgctggttctgttctgaaccaccggccgggttccttccttgtcaaacagtgggagttccaagtcgggccgtccgttgggatctctgccggcgacgagatatgggtcgcccgctacattctcgagaggatcactgagatggccgggatcgttctctccctcgacccgaagccgatcaagggtgactggaacggcgccggcgctcacaccaactacagcaccaagtcgatgagggaggccggtggctacgaggtgatcaaggaggcgatcgagaagctggggaggaggcacagggagcacatcgccgcgtacggcgagggcaacgagcgccgcctcacgggccgccacgagaccgccgacatcaacaccttcaaatggggcgtggcgaaccgcggcgcgtccatccgcgtcggccgcgacaccgagaaggagggcaagggatacttcgaggaccgcaggccggcttccaacatggacccctacgtcgtcaccggcatgatcgccgacaccaccatcctgtggaagggaaactgataaaaccactgttcttctcctgcacgcatgcatccgccccgtgctgtcactttttgtttttcaaatttcgattcccgtcctaaagtttgttaccacttattattacggtctccagtgtactgctcggaaagtccgaataaaaacggctctaatgattttgttttttttt

SEQ ID NO: 13669 - DNA, 2902 bp, Zea mays
  Clone ID: LIB143-021-D7_FLI
cgatgcacgatggactcggttatttcttaaaattgggaagaatataatggatatggtgagattacattttcaggcaaactatatatatatagtatttagagccctgagctctctctaactattggaagacccgaccagcaaaccactaggtgcgcggaccgcaccgtactgaccaggtgcgcagactttttggctcactgtaccacctacttaattataactacgtgttatgctcaattgtggtttacacacttttttggtatgcgcatgttgtacacaagtttacgcttattttgtcatactgtctgaaaccacttcctgtactatcatataaaaccgaccgcgacgactgctttgcccgaaaggactagggtttcagcggcggcggctgccgagccccattccccgatctgaagcacctcaaaccaccgctctgccccagatccagatccacccagctactgcggcgagcccgtggggacggtggcgggggaggacccgagtgcacggagatgctcaactacgaccaggtcttcatcagggacttcgtgccctccgcgctcgccttcctcatgcacggcgagaccgagatcgtccgcaacttcctccttcacaccctccagcttcaggtgacctgatcccgatcctgcttaatagtttctcgtatggaccattccttgatacctttcggaaaccatttgtgatgctgccgtgaaaggacccgacctcaaatctgtgtgcgcccacagttttggaacagcagcagccatagtcgcctgggggctcaggtgtggccgtcgtcgcggggcctagccccagccgcgggctcggccgcgatccgcggacgctctgctgccagccgcgggcgtgcgctctgccgccagccgcgggtccgaccgcctacgggtgcgcatccggccgccgccgtcgagtccatcttggaggcaaggagtgagcaaggcatcgagcttccccaccaaattattccctgacggtgcacgggaatggccagggaaatccatggtcgccagatatgcgcctacttattcctctccagtccccaacgagagattcaggtaaggactatttacttatttcagtaccatattggttttggtcaagattagagactaatatgcagtggtttagaaactattgtgttattatttttattacttcagatttagttttttgattgtttttatctagacttggggccctcatttaatctcattactaatatgtggcctgcacatcaatacatcaatagagtccctaatgtctattgtattgttctgattctataaagtgtacaatggttcacaatatctgtgtgaacaggtgaaacgtgaagagctgcttgagtatgcccaaagtatcatttcaggattgaagagaaatgatgaaattgtgaggtgatataatagaatcagctaattacctgtgaatatattataacgatataatagaattttgaggtaatactacttctgttacatctagtgcttcctgttttggacatacatgtggtcaggctttctaaatttttgctaccaatatagttctggaaattagttggaaaatatgataattgcatgtagatttgtaatttgaagtactattatacaatttcaagttattaaatttaaaccttccttttgtaatagtgcatacatatgctacacccacctccgccagcatttagcatcattgtattatcataaaaccataatttctaggtagtatttagttgttctagtctattaggtgaatgcttttaatcattataccattttctgttgagctttactaaggaaagtagtgacacgactcgtgaatagctgaacaagactgatctcagtatgctggcgaaaaaatggtgaattagagtaatcaatcatattatcttccatatttgcatataattatacttttacaggtggtattaatggagaaatatcagaaatagctgaaattgaagcagcatcaacaggtgaagctgctcgacttagctgctctccggcgtgctccacccggcgctgttcggcaacctcaccagccttttgaacggtaagatttgttattctttagttatacaatttctagtagagacaacttaagtattacagctatgtgttagggagggttcaagaaaaagaatgaattttgtattcagcatatgtgcataatagggctttgattctcaagtcctgcaatattggaagtatgcataacagagtttattaaagaaagaaatgtccttacttgctggcagtttatccattgtatttttgtaaattaaggttattaaagaaagaaatgtcctcactttcttcgaaaaatatagtatctcatgggttaatttatgatattagcacttgctacggcctatagggtttatataggttcacaacttattattgtccactaggcttctccagctgcattgttttgtaagggacataaactagctaattgttgtgacttaattactcctccattttccctattgattaaactggtatataggttcgtggatttacttatgcttattctgacgtgtctttatgatttatacaggcttacacagacctgttttgataagagccaagcagcgattcttccatttcggaccacgacctagctaaaggctaatgattccaaatgtctgaagtaccgaagacagggcttagctcctcgttttttgtcatgtcaaataaatcgtgtatgaatgcaacaatattggcaaaatatcgttgtgctttatattttgatatactgtgaacaaaacaagtgccctatgagaccatcatgatttatgcattttcaaactaaattttacgacacttcttgttgtgttttatgctttcattaaaaaaacagtcttactgcgttttacgcc

SEQ ID NO: 13670 - DNA, 1235 bp, Zea mays
  Clone ID: LIB143-021-D8_FLI
cgcaggtcgtaggctatcctcaatccccgatcccgtgcggcggcggttccatagcaacacagtacggcaagacggcaagtccaagtttgcagcgattgcagctccactgctccccaccttctcgccgtgcacgcctgcgcagcgcgcggcgaacggttcgtcggtgccgtggtcgtggtcgtgcgcgagcgcctgtccacggcgggcccacggcgaggtgcgaagccgctacagggcccacggcgagcactgaccgccgagcgggcgaggccgtgacaagcacccactaggtgtccagcacaacagcacgccaggaacagtggtccagctcccactatggttctaaccagcaatatttcggttcagaagaccttgtacgaggttttatctgtgagtgaagacgctacatacgatgagatccgcgcagcatacaggtctgccgctctgaacacgcaccctgacaaagcgcagacaactctcgagtcatcatccgtgccttccactgagcaacaggaattttctagcgtgcagaaagcatgggaagtcctacgacatcctacatccagagcatattatgacaagcagctgcagtcatccagacaaagcatcgagatcatcgcatctgaaatccaagtcggggacatgatcgtcgagagcgctgctggtgctctagagctgctgtacccatgcaggtgtggcgattatttctccatcacttcgggtgaacttagcgggatggggattgtcgtcactggggatggagaagaggtagaagggctgcaggcgtcggattccgggtcggcttctgtcgttctgggctgtggctcctgttctctcaaaatacggctggttatagatggaacctcatgatcacatttcaggctctggttgcgcgctattcagcagtgtggtcagtttgaatgcttaacaaccaccaccacatgtttgtcaaacagtatgcaattcctgctctgctgaaaatcgtgcagcttatcccaatggtggttgcattgtgataaatggcgttttgaccgttgttatcagctaaccaccatcgtcaagtccagctgctgggagttcaaagccggtggtggttattcggtagatgtttagttaatgttgttttttctaggccaatttaatggtctcatctgtcagccattcacttaaacgatggctaaactaacggttttttttatttggtatcagctgaatgaatgcctgttgtttttgat

SEQ ID NO: 13671 - DNA, 1317 bp, Zea mays
  Clone ID: LIB143-021-F11_FLI
cctcctctgagagaagatgacagggatgggcattatgtttttgctgttggagataacctcacatctcgctataagatcaatgcaaaaatgggagaaggtacctttggtcaggtgttggagtgttgggacaaggaaaggaaagaaatggtggctatcaaaatcattaggggcattaaaaagtacagggatgctgcaatgatcgaaattggcatgctcgagcagcttggtaaatatgatgaaagtagatctagttgtgttcaaattcggaactggtttgactatcgtaaccatatctgtattgtctttgagaggcttggaccaagcttatatgattttctgcgggaaaacagttaccgctcattcccaattgccctagttcgggagattgccaaacaactgttggaatgtatagcatttatgcacgaattgtgtctcatacacactgatttaaagcctgagaacattctccttgtttctccggagtacattaaagtgcctgattacaaagtttcatcccgatccccaaaggagggatcctattacaagcgggtgcccaagtctagtgctatcaaggtgattgattttggtagcactacctatgatcaacaggatcagagttatattgtgtcgacgaggcattatcgggctccagaagttatactgggacttggatggagttacccatgtgatatctggagtgttggttgtattcttgttgagctttgcacgggtgaggcgatattccagactcacgaaaacttggaacatctggctatgatggagagggttcttggacctttgccataccatatgttcaagagggcagatcggcactctgacaaatacatcagaaaaggacgcctgaattggcctgagggttgcacttcgcgtgaaagcatgaaagctgtgatgaaattgtccaggcttcagaatctggtgatgcaaaatgtggatcaggctgcaggagatttcattgaccttttgcaagggctgctgaagtatgatccatcaagccgtttaacagcacgagaggccctgaggcatcccttcttcacccaagggttttggcgaagatgatgatactccttgcattctacctttgtctgacttgatgtcttgcatttgacagtttgtacttttcagtggtgtatgtaggcggtagatcaatctgtataaatccgtagtagagttgtttcagtcttgtttggaacgtcgtgcagctatagctgtagcataatggaagtcaaatcgatgcttttgactttaaatcctgacttgtttgaatttggaatgtcaatggaaatctggtttgaggag

SEQ ID NO: 13672 - DNA, 1110 bp, Zea mays
  Clone ID: LIB143-022-B1_FLI
agagatgggcagtgcagtgacgaagataaggaccccccctttggaagtgcacacacacaaaccaacactgacatcacagcgggttcaggggaggaggagagggagagacttctttaagatcaccacaccctcccctcacccctcctcctcatcgtcctctctccctctctctctctccattgcactcgctctatactaggtcctaggtaactagcaattgagctatgaaattgttgcttgaggtgcagcagcaaggcacactgctacaaacaagctgatcagctgatgcccggtggcttcaggactttgccaaggttagcgaggtcccgccccattttgcttctcccctgggcttgcggttgcgtttgagtgcacttctgaggctttgattgggccctcccgctccgcacttaagctctccgcctcgtccatggcgtcgcagccctcaagacttgctgtctcttggtagctgccgcttctagctactccaccacctaactgaaagagcgtatagttagttggtcttggattcttggtccggtgctgccgccgccatgttcctgagatcgaagatccaggagatgatcctgcggaggagatcgaggtcgatgaacagcgccggcgcgcagaggggccacgtccccgatcaagccccgagctcgtcgaccgttccgtgcgacgatgacagtgccggcgccggcggcagcaggagcgcgggtgcgcgtgccctgttcgcctccccgaggctgctgcactcgtcctccctgcccgccggcgccggcgccggcgtcgtggccttcgccaggagccccgcggcggagcccgagcccgagacggcctcctccctgagcccgacctccgtgctggacgcggcggcggccttcgtgccacgcacgggaggcgccgcgggcaagcggcgccagcgccgcccgtggcgcgcgcgggacaacaacggcggcctcgcggacgtgctggactgcaccgatgaccagcagcaggagcggatcgtcctcgcggctacgtcgtcctcgcgctctctgctcaggtcgtgctccctggaccgccgcgtcgagttcggcgtcaagaacaagagctcgtggctgcccctcc

SEQ ID NO: 13673 - DNA, 1218 bp, Zea mays
  Clone ID: LIB143-022-B2_FLI
tggagtcaccacagaatcaaagaaaagctttcccccgatcctctcgcggacaccagcgatgggttcccgctacgaggtggaggtcaccgtcggctccgcccgggacctcaagaacgtcaactggcgcaacggcgacctcaagccctacgccgtggtgtggatcgactccggcagcaagtgctcgacccgcgtcgacctcgacaacggcgagagcccggcgtgggacgagaagctgctcgtcccgctcccccccgaacctcccaaccgaaggatggagtgggttgtacagcggcctcaagccctctctcatcggcactgccgcgtcgcagggaatctattactacttctaccagatcctcaagaacaaggtggaagatatagcggttgctcgtagcaagaagggccttggggatggtactgtcgggatgctttcttggcttggtattgcagctgttgctgggtcaatcaatgttcttctaaccaatccaatatgggttcttgtgacacgtatgcagacacatactcaagcgaaaagaaaaatattggagtctaagagggagcttttactgaaagaaatgtctagggcgaattcgttggaggttgcaattctgaaggataggctggttaaattggagtcagaaaaacctcgtccatatggtactcttcaagcggtatgtaatccatcgattcagttcatgatctatgaaacattggcaaagcgtctgcagtcaaagcgttctggaaagcagctaccaaaaaggcacctcacagctatggaggtttttttattgggtgcattagcaaaacttggagctactttagtcacctatccattgctagtcgtgaagtcaaggttgcaggcaaaacaagaaattggcagcaatgtgatgtccagatacacgggtacaatagatgcgataataaagatggttcgctacgaaggactacacgggttttacaaaggaatgggcacaaagattgtacaaagtgtctttgctgcctcggttctctttatggttaaagaggaattggtcaagttagcagtgcttttagttgggagtagtaggactattcttattactacatccaagaaacaataggtggtcgtgtatttgggagaaaagttcttttttttttttgcctcaacttgtaatgtatagggtcccattatacatatcctgttcaagatcaatatgaaattctttactggttactagg

SEQ ID NO: 13674 - DNA, 1614 bp, Zea mays
  Clone ID: LIB143-022-C7_FLI
cgaccgcctcgtcgccgacggctacgcggaggcgtccgacctcgagttccgcgacaggctcgccgcccatttcggccggctcccgcacagctatcagctggatatcaatgttgacaaagcatccgatgtcttggtccaccagaacgtcttagcggaagcaaaggatcctgataggcgccctgcattctatgtccgtttcttgaggattgaagatatggattcagcatacgactccgatgcatctgaagaaggggatgatgatggtgatgatctctctgtaaggcaggacacaccatatactcacattcatgagatagttttctccacaatcgataagccaaagctccttagtcagctatctgcattgctatctgacattggattgaacatcagagaagcacatgttttctctacccatgatggctattctcttgatgtttttgttgttgatggctggcctgttcaggatgctgatggtttgcacaaagcactggaagcatccattctaagaaatgagggttcatggtctggttcatctcattcctcagccgctgaaagaacactgcccttccaagttaaaggtggtgagtgggaaatcgacaaacgacttctgaagatgggagggatggttgcttctggttcttgtggggacttgtatcacgggacttaccttggtgaggatgtagctgttaaagttataagagctgagcatttgaataagaatgtttggaacgagtttacgcaagaagtatatatactaagagaagttcaacataaaaatgttgtgcgattcattggtgcatgcacaaaaccaccccaattttgcataattacagaatacatgtctggaggaagcctatatgactttgtgcacaagcagcataatgttctaaacctcaggactttattaaagtttgcagttgatgtatgccgagggatgtgctacttgcatgaaaggggtatcatccatagagacttgaagactgcaaaccttctaatggacaaagatcatgttgtgaaagtggctgattttggtgtagctcggttccaggatcaaggaggtgtcatgacagctgaaactggaacatacagatggatggcacctgaggttataaaccatcaaccctatgataacaaagcagatgttttcagctttgctattgtcatctgggagctgataacgtctaagatcccgtatgaaagcatgacccctctccaagcggctgtaggtgtgagacagggattgcgcccaggactcccaaagaagacgcatccaaaggtattggacttgatgcagagatgctgggaagcagacccatctgcccggcctgctttcccagacattttagccgaactggaggatcttttggcacaggttcagggaacaccgggaaagacggcccatgctccatcaaataactcgaacacgaaagattaacccccatgcacacatacctgacgtttttctgaattcagtgatctgccatgtttaggattcgagtcgctaattacgaggaatgtagcatatcgattttttttccctggatggttttgcttgtgtacatttgaacaatcttcttggggcctattttttatggtcacctcattgttctt

SEQ ID NO: 13675 - DNA, 1419 bp, Zea mays
  Clone ID: LIB143-022-D3_FLI
acctgggctggacccagccgcgccccgtctgcctcctgcttctctctccgcttccgcttcctgcgcctccaggctccacttctccgctcggcagtcggcactggaaggacagcatgtcggtctcggcgtcgtcaccggcggcggcggcgggcgatgagaagcaggaggcggcgcccgtcaggcgctgcaagggcgtcaacgacctcgacaaggtcgttctccgcgaggtccggggcagctccgcagaggtgtacttgtatggtgggcatgtgacatcatggaaagatgagcatggagatgaattactttttgttagcaataaggctattttcaagcctccaaaagctatacgtggaggaataccaatatgctttccgcagttctccaactttgggaatctggaaccacatggatttgcaaggaataggacatggagtgttgatgatgatcctccaccatttccagtgccaacctccaatagcgcttatattgacttgatcctcaaacctactgaagatgatttgaagatctggcctcatagttttgaataccgcctgagggttgcacttagtcctggtggtgatttgatgctaacttcacgtataagaaacactaatgcagacgggaagccattctctttcacttttgcataccacacatacttcaagatttctgatatcagtgaggtgcgagtagaaggattggaaactctggattacctagacaacttacaagatagagctcgttccactgaacaaggcgatgcaattgtttttgaatccgaactggacagaatatatctgggcacaccatcgaaaattgccattattgatcatgagaagaaaagaacatttgttgtgaggaaaggaggccttcctgatgctgttgtttggaacccctgggataaaaaagcaaaggctatgtcagattttggggatgatgaatataaacgaatggtatgcgtggaggcggctgctattgaaaagactgtcactctgaagcctggtgaagagtggactggaaagttggaactttctgctgtgccatctagctattacagtggtcagctagaccctgaccgtgtgattcaggattccactgtcccggaggactccatcagctagtccttattctatttttgcaggtagagcattgtatcattatgcataagagatgctggcaacaagggctgtccacatgtttcttccattctgttcaaatcttcggtgtttttttattccgaatgcatatccgaaccaaggaatgtgaaattggtttccgctttttgaggatctatgtagcataatggataagtcggtgtttcgtaccctatttagggatgcttgaagcaagaaacatcttcatgggttgtaaaataaaagaaaaattatctttatatttgatcaattcttttgcctt

SEQ ID NO: 13676 - DNA, 1809 bp, Zea mays
  Clone ID: LIB143-022-D7_FLI
gggaatcattggcagaccatggatactaaattttcacttacaaaaggtgtggtctattggccgttgcaatagatttatgcatggttctgaagggatggtacaccttgaagatatttgttcatatgttccatataacaaaaagggttacctcgtgaaaatttggagcattcttctagattcatgtgttgatgcctcacctttgcttgtcataaacaatggaatgatgtccatctttattggttctcattcatatttgtttctttgcattgatggttatagtggttcagtgaggtggagtgtcaaattggaaggccgtatcgagtgttctgccgctataactggtgatttctcagaggttgttgttggatgctataaagggaaaatttacttccttgatatgtctacgggaaaattatcctggacctttcaaactgatggggaggtaaaaatgcaaccagttgtggacaagatgaggaatttaatatggtgtggctcgtatgaccattacttgtatgcgttaaattacaaagatcgctgctgcacatacaaagttttttgtggtggaagcatttatggatctcctgctattgacatggcacaaaatgtaatctatgtcgcatctacgagtggccttgtgactgcagtatcatttaaggaaccatccttcagagttctttggcaatatgaagctggtgcgccaatttttggttctctcgccatagatcatcaaagtggaacagttatttgttgtttagtgaatggcctagttatgacattgaactcacaaggttctgttgtttggaaggcaactgttggtggtcctatttttgctggtgcatgtttgtcacccaccctccctcatcaggtgcttataccttcccgtgatggcaacttgtactcttttgatactgtgtctggtgcccttctttgggtatacaaggctggggatccaattactgcatccacttttgttgatgagctgttaacatcagtgtcatttggaccatctgagagatttgcttgtatctgcacgagttccgggaaggtccatgtcatcagaattagagtagacatcagaactagagtagatgctaagtacaatcaggagcaaggtggtgacggtgttaaatctgaggagttagttcaaggactggatgctaagtacaatcaggagcaagctggtgaaggtgctaaatctgaggagttagttcaaggactggcatccattgatcttccgggggacatattttcgtctcccttgatggttggtggacgcatctttgttggatgccgagatgatcgattacattgtctcaccgtcaccacatagtttcaagtgattttgctggaggtgatatagttttgcccatgcctgctgcccgacaacctctcttccgcgacaagggcctttggcctttcctattggtaaggtgcgtggcaggctggcagcacaacacaggccacgaatgagtttggttgaagctcctgattgcatttggtgatttgggtctccaatgattgctttccatgtctacacaagaagctttccacagcctgctctcgcctaagcaagtgctacttgatgtcttgatcaaagtgagtggaaacctctcaacctcacattctccttgcagcatctgtattcagcccatgtggaacctttgccactgtcctgcaaggctggtcagtcatgccgctgttcccttcagtggaaattaactgataggaagaccagtgatttgcggagactgtaaaaattgttccacatagatctatactatttcctaaaaggagtttatgacagggccc

SEQ ID NO: 13677 - DNA, 946 bp, Zea mays
  Clone ID: LIB143-022-F8_FLI
cattgatcatatctgttctggtgtctgttgggtggattggctatgaggtatgcttatttatgtcaaagccgtattctaactccagaattatcaagggaatattgttgcattgcctcacaaaattagattggtttctcggcagtgtttgaagctggagaccaggagtgttactttaaactgcacctttctactttcaagaacctgtccattttgtattgtttggattcatttgtttgcaccttacttgtttatgcatatgtttcattatttcagaagtcattgatatccctgcaatttctttcttgcagatttactccaaatcaacagatgtatttaatgaacgatggcagcatgcctggattattcctgccttctggcatgtcttgtctttcttacttctttgtgtcatttgctacctgtgggcaccttcacaaaactcaatgagattttcttatgatgcaagtgaattctttgatcgaaaggataatatctcattaattaggccagcacccagtgcatccaagaatggatggaatttatcttctacaccagagcccaaagctacaaaggatgtgaataccgtagcagattttgaaggtgatgatgaggaaaacaaaagggagtagaatgtactgtcgatttgattacggagggtatatttgagatcctttgaagtgtgtgctagagcaattttggtatttaggagaggattggccatgctagttattattaatggagcactccgctcgatgttatttcttcgattcgttaccactacagtagttcttcacatggcgagttatgctgttatcttcatagtcttaatgatggtatatgatagaaacaattagtctggtgtataatatttataataatggcaccatattgcttctggttcctgtgaactcgacatatgttatgaatgtcagagaataaattacgatag

SEQ ID NO: 13678 - DNA, 1391 bp, Zea mays
  Clone ID: LIB143-022-G4_FLI
catcttcttcttccccgcgctgcctgctgcctgctcgagcttggagatggcgttggtgcggcgatgcctctgtggatccgaggaagactgcagagcgcttttgggcatggaaaatctccggctgttctcctacagagagatcagagcaggcacaaacaacttcgatcagagtaacaagcttggacgaggtggttttggaactgtctacaagggagttctaagagacggcactgaatttgccgcgaaggttctgtcctcggaatccgagcaggggatcaaggagttcctagctgagatcgagagcatatcccaggtgaagcacgcgaacctcgtcaggcttctgggctgctgcgtacagaggaaaaaaaggatactggtgtacgagtaccttgcgaacaacagcctcgatcatgcgctcaaaggagcagcagcagatctaccctggagcacgaggtcgggcatctgcttgggcaccgccaaggggctgagctacctgcacgaggagcacgagccgaacatcgtgcacagggacatcaaagccagcaatgttcttctcgaccgagactacctgccaaagatcggagatttcgggctcgcgaagctgttcccggacaacatcacccacatcagcaccgcagtggtcggaacgagtggatacttggcgcctgaatacttcgtgcatgggcagctgaccaagaaagccgacgtctacagcttcggggtgcttgtcctggagatcgtcagcgggaggagggtctcgcaaacgatccagtcggacatgttcccggtgcgagaggcatggatgatgtaccagcaaggcaggctgctagagatcgtggacgcgagcatggggagctacccggagaaggaggtgctccggtacatcaaggtggggctggcctgcacgcaggccacgcccagcagccgccccacgatgcgccaggtgcttgccttgctgtcggaacggagatgctcccgccgagtttcgccgagcaccgcggccaccacacggcccctgccctggggggtttgcccgccggtccgctaatccatgcgtcgccgagggcgaggtggccggcggcggcgccgtcagcagcaacgtcgccgaagcaggtcctgagcctgaacgcgcaaccggcaatccggcatgtaactgaaactgatatagtcacgtgtgaggcggcgttcgttctgtcacgtaatcacttgcgttagaatttgattttctagtcttgttcgtgctcgcagtttggaccgggaaaaaagggtaggaggggctaggcaggtccataaacgagcatattgtttttaatctcaatccatatgagttagagaggattgagaatctgttcattttaatctcaattcatgtggattgaaagaaattgagt

SEQ ID NO: 13679 - DNA, 1059 bp, Zea mays
  Clone ID: LIB143-022-H3_FLI
aaaccagagagctcgagcagcaaattgcataaatacagagcgaggatccccacccccaccagcaagtcgtgcgctcaacataaaccctcgtcacccccacatgccaatcttcgcaccggctgccttccaagtgttaaattaccttgatgaacaaagccctcttgcaacatagctacatgcctccccttgacaacaaaactttagagcaggcacttatccaaagtacaatggcagtgtaaacacaactcagtacatctataaaacactaatttcctactttccatttctgtccattttacaaaaaaaatcctaatatttatttctgatcttaggacccaccatttttgtgagtcatcaaatgactcgtatcaatatcttccataccataccgttaaaggacaccaacacaacacgaagccatatgtaacactcccatcgcactagataaagaaaaagagcaaccatcttagctaaaaaaaagtgcatatctacttttcaacttatatcttttttaatattttagttaagataaaatatattatgtaacatccactttatttttaaatttatttatttgaaaagggtccactttaattttaaatttatctttgagtgtcgtaacaaagcattagtatttttatttattttgttatttgtataaaaagaatagtacacatcagtttttgttggaaaaagattgttttatttatatttatttaaattttgaattcattagttcatcgtctcgatcagttaaattatgagttgtgcatctaccgtcagcggccagcgagttgaggagaagaccaatgcgacagacatgaaaaagaaatcgagagacaacaagtgcttctctggcgagttatgtttggttcgtgtttaaatgtgtcacactttgtctaaatttagtcgttcgaattaaagaactgaccttagcagaaaagttaccttagcagaaaagttaaaagtgtggcaagttcatcgaaccaaacaggcactagatgaagctcctccaggggaaggcgtgtcagcgaaactcccaggggacatcgatgtcgg

SEQ ID NO: 13680 - DNA, 812 bp, Zea mays
  Clone ID: LIB143-022-H7_FLI
gcttcttaagcttggttaccaagctgttgcatatattgaagcttctgcggtgatttaccaagatggaaagattttaatagaagttgaccatctacaaggagtgtcgactccatatcttcaaattaaagggacaaataaagaaattgttacctctgctggttctgcactctgcttggatggttcatacacaacaaagagttatcttcaaattattttggagagcttaccagctgatggtaatgtatctattggtattcacaatcaacaagctgcaaggctgcaggaactggttgagttcatccagtcacagggagggagctttaattcagatttatcgtcaccaatacgagaaacttcctctacagatagtgtgattgatgatatgcagtccaggataaggaagcttgagagatggaatacgataaacatggttttgtggactatattattgtctgctcttgttggatattccctataccagaaaaaacgtcactagttttactgatagggtaggacgcatacctcattcatggcgtctgcagaactgacttgcacgcttcaggcacaaagttgtaagtgctagagaaaatgaaaagcagcatgtagatacaagatctaagacgtgagagatggcctgcgctcatgccatccctgatggcagtcttatttgtttgatcactcaatgtctgtaataatcttctcgtatgagatccatcaaaaaaatttgtgcagttaatgtgtatgaagcactaacgttgataatcttctcatatggtccatgggcgtttatgtattgtcatcaccacttaagt

SEQ ID NO: 13681 - DNA, 1597 bp, Zea mays
  Clone ID: LIB143-023-B2_FLI
acgcagcgccgaagcacctaggatggcgcccgagattcagagcctgtgtccgagtacgacggccgcgctcctcctgctggccgcctgcctcgccgccgcggtggcagcgctcgacgctgcggactacgccaggccgccgctgcctgcaggcggaggcggccggcgcgtcctcttcgccaacgggctcgggctgacgccgcagatggggtggaacagctggaaccatttccagtgcgacatcaacgaggcggtcgtccggagcaccgctgatgcgctcgtcgccaccggacttgcaaaggctggctacacgtatgtcaacttagatgactgctgggcggattccgagagaaccaaagagggatacatggtcgctaaccccaagacattcccatcaggaatcaaggccctggcagattacgttcacagcaaggggcttaagcttggcatctactcttccgctgggacaagaacttgcagcaacaggatgcctggatctctgggctacgaggagagggatgctaagatgtttgcgtcatggggcgttgactacctgaagtatgacaactgctacagagacggcacgcctgaaaccgtgaggtttgggcgcatgtcccgagcgctggtgaactctggccgcccaatcttctactcgctttgcgaatggggcttcatggaagttcccaaatggggcggcatgtacggcaacagctggaggaccaccggcgacatcaacgacacatggtcaggcatgctggacaacatcgacctgaacgacgcctacgcccggtacgccaagcccggcggctggaacgcagaccctgacatgctggaggtcgggaacggaggcatggcgtacaacgagtacgtcgtgcacttcagcctgtgggccatcgccaaggctcccctgatcatcggctgcgacgtgacgagagtctccaatgagacgctggggatcctctccaacgcagaggtcatcgcgatcagccaagatcggctgggtgtccaaggacagaaagtgagcaagtacggcaacgatctcgaggtatgggcagggcagctctcggggcacaggaaggcggtgctgctgctcaaccggggggccacgcgctccgcgtccatcaccgcggcatggccggacgtgggcatccgccgcggcgtcgccgtgcaggcgagggacgtctggaagcacgagacgctaccgggctggttcaccggcagcctcacggcggtggtcgggccgcactcgtgcaagctcttcgtcctcacgcccgttcctagctgacggcgccgctggagatctgtccatccaatatctgcccgtggatccagctagagttattaattgtatgatttcagatactgtaactgccttgtgactgctccgacaacaagagctcatcaccatctgtctaatgatttgacatggtgcaacgctcagtttggcctagatttgagatccgaacgtggcgaataaaataataaaatgacgtctcctgacttcttttagccgtttaggcagactggttcacttatactgtaaaaacgccatttcttcgttcttcggtgaaagtaacgtgtaaacttcgcttacaaatct

SEQ ID NO: 13682 - DNA, 2853 bp, Zea mays
  Clone ID: LIB143-023-D11_FLI
ccgcggcgctacgacctgcgcctcacgcccgacctccccgcctgcgtcttcactggctcggtggcggtttccatcggcgtggccgcgcccacccgcttcctcgtactcaacgcagccgagctcgacgtcgcgaccgggggcgtcagcttcgcgcctcagggctccgaccaggtgctacaacctttggaggttaccaacgtgccagaagatgagatcctgattattcgcttcaatgaggtgctttctatcggggagggaactttgacgattgcattcaaggggactttgaatgataagatgcatggattctacagaagtgtgtatgagcttaatggagagaagaaaaacatggctgtaacacagtttgaaccagctgatgcaaggcgctgcttcccttgttgggatgagcctgctttcaaggctgttttcaaaattactctagaagttccttctgagacgattgctctgtcaaatatgccagtaattgaagagaaggtcaatggccctaccaaaatagtctacttccaagaatctccgataatgtctacatacttagtggctgttattgttggcaattttgactatgtggaagatttcaccacagatggtactagggtccgtgtttacacacaagtcggtaagagtgcgcaggggaggtttgctctagaggttgccttgaagacattggtcctgtttaaggagtattttgctgtgccataccccctccccaaaatggacatggttgctattccagattttgcagctggagccatggagaactatggcttggttacataccgtgaaacagcattgctatttgatgagatgcactctgcagctgccaataagcaacgggttgcagttgttgtagctcatgaattagctcatcaatggtttggaaatcttgtcacaatggaatggtggacacatctgtggcttaatgagggctttgcgacttgggtgtcttacttagctgcagatcagttctttcctgaatggaatgtttggactcagtttctagaggaatctacaataggtttcaagttggatgctcttgcaggttcacatccaattgaggtggacataaatcatgttgatgaaatagatgagatatttgatgctataagctataggaaaggagcttctgtcattcggatgctgcaaaactatcttggggctgaggtctttcagaattctttggctgcatacatcaaaagatttgcgtattcaaatgcaaagactgaggacttatgggctgcccttgaagaggggtctggtgaaccagttagaacattaatgcattcatggaccaaacagcaaggttatcctgtcattactgtgaaactcaaggatggaaagttccaactggagcagacacaatttctttcaagtggatctacaggagttgggcaatgggttgttcccatcacactatgttgttgttcctactcgcgccaagcgaagttcctttttcatgggaaacaagaagattttgatttgtcagcgtccgggtttacggactgccaaaagaaagatggcttctggattaaacttaatgtcaaccagaccagcttctatagggtgagctatgatgaggaacttgcagcccgacttcgatatgcaattgaaaccaacaaactgggtgcagcagacagatatggtgtacttgatgatgcctatgccctctgtatggctggcaaacaaaagctagtctccttgctgcatttgatttctgtgtacaaggatgagactgagtatactgtgcttgcacacataatcacgacaagtctgcacattgccgagatgatggctattgctgctccagaggagttggttcatctgaagaagttcctaattgatttcctggagccatttgcgctgaaacttggctgggatgctaagagtgacgagggccatctgaacgctttgttaagaggtacactcttaaccgctctggcagaacttggccatgaggctaccataaatgaagctgttcgtcgatttaatgtctttctggaagacagagagacaccactccttcctcccgatgttcgaaaggcagcatatattgctttgatgcagacagtgagcaaatcaaacaaaactggctatgaatcactactgagggtatatagggaaaccgatctaagccaggagaaagttcgtgtgttaggttctttggcatcatcccctgaccatgatgttgtccgtgaagtattgaatttcatattgtcacctgaggtgaggaatcaggacgcaatatttttgctaagaggggtgagttcaggggcacacgaggtagcatggcaatggctgaaggaaaactgggattacatattgggagcctactctggaactctgctcacctatttcgtcaacataactgtctcgccactggccaccgatgaacatggtgatgaggcggaggagtttttcaagagcagaaccaaggcgaacatcgcgaggactgtgaggcagagcatcgagagggtgaggatcaatgcccaatgggtcaagaacatcaaggccgaggctgacctcggcaacgttctcaagaagctggcttacaagcactgatcagagacggtccactttcatttctgtgttagtcctagtaccgagatgtaactttgttctctggaataagtggattaataaagggcactttcgtttgtgtgtcgtcctgagctgccttgtccgtagattcttacaaactgttgtgcgaaagctatcatgatagatatgcgtcgaattgattgattctatatcctgataattgattgcgtatcgcccatgtcgcacaggagaacgataaatttgttccaataattgactgactgcgtgttggctttc

SEQ ID NO: 13683 - DNA, 1674 bp, Zea mays
  Clone ID: LIB143-023-E9_FLI
ggtaggtggccggacggtggtggcatcgccaattcaactccgcatctgaatcggcactcggcagcgcgccagctccataggaggagatggcgctcacaagaatcggtcttgctggccttgcggtcatggggcagaaccttgccctcaacattgcagagaaagggttccccatctctgtgtacaacaggacaacctccaaggtggacgagaccgtgcagcgtgccaaggcagaaggaaaccttcccgtctacggcttccatgaccccgcgtcctttgtgaagtccattcagaagccacgggtggtgatcatgctcgtcaaggccggcgcgccagttgaccagaccatcgcgacgctcgcagctcacttggagcagggcgactgcatcatcgatggggggaacgagtggtacgagaacacggagaggagggagaaggccatggaggagcgcggcctcctgtatcttggcatgggtgtctctggaggagaggagggtgcccgcaacggcccgtccttgatgcccggaggctcgttcgaggcttacaagtacgtcgaagacattgtcctcaaggtggctgctcaggtccctgacagtggcccgtgtgtcacgtacattggcaaaggtggatcgggcaactttgtcaagatggttcacaacggaatcgagtatggcgatatgcagctgatttccgaggcatacgacgttctcaagtcggtcggtaagctcaccaacagtgagctgcaccaggtgttctccgagtggaacaagggcgagctcctgagcttcttgatcgagatcacggccgacatctttggcatcaaggacgagcatggcgatggctacctggtggacaaggtccttgacaagaccgggatgaaagggacagggaagtggacggtgcagcaggccgccgagctgtcggtggccgctcctacgatcgaggcgtccttggactcgaggttcctgagcgggctgaaggacgagcgggtggaggcctccaagatcttccagggtgactactactccaccggctcgccggtggacaaggcgcagctggtggaggacgtgaggcaggccctgtacgcgtccaagatctgcagctacgcgcagggcatgaacatcatcaaggccaagagcgcggagaaaggctgggggctcaacctcggcgagctggccaggatctggaagggcgggtgcatcatccgcgccatcttcctggaccgcatcaagaaggcctacgacaggaacccgggcctcgccagcctgctcgtagaccccgagttcgcgcaggagatcatggacaggcaggcggcgtggcgcagggtggtgtgcctcgccatcaacaacggcgtcagcaccccgggaatgtccgctagcctggcctacttcgactcctaccgcagggacaggctgcctgccaacctggtgcaggcccagagggactacttcggggctcacacctacgagagggtcgacatgcctggctctttccacaccgagtggttcaagattgcgcgcaacatctccaacaactgatgagctgctcaacggatggcatgcccggtgttgactactccagtcggtaatgagatttcctgcaggaacttgtctattgatctttgtaagttaattatttatatgaataaaataagagcagacatgcttgtgtttgggc

SEQ ID NO: 13684 - DNA, 872 bp, Zea mays
  Clone ID: LIB143-024-A5_FLI
caacaaccacacttgcaccgagctagcagccaagatggcgaccaaacacttggctctttgcctccttgttctccttagcataggcatgggcatggccaccgctgctgcaaaccgcaaactgggttatggccccgggggaggaggtggcggtggtggtagcggtggaggcggtggttacggaggaccaggctatgggtccggatcagggtatggtgagggcggtggcagcggaggtgctgctggagggtatggacatggtggcggcggcggtggcggtggtggtgagggcgcgggagctggtggctctgggtacgggtccgggcaaggatctggctacggagctggcagcggtgctgccggtggatatgggagtggcggaggtggtggaggtggaggtggcggtggccagggtggtggttccggatatggccatggaggtggtgaaggatacggctctgggtctggctttggtggtggtgctgctggcggcggcggtggacatggtggcggtggtggcggcggccaaggtgggtctggctatggctctggctctggctctggctcgggatatggatcaggtgaaggatacggacaaggtggtgctcatggaggaggctatggaagcggtggtggcggtggaggtggtggtggtcaaggtggtggtggctctggctatgggtctggatccggctccggttatggaggtggcaacgacaacggacattactaggctctttttcagagctaggaacatgttatacaaatatgtcaccagacatgagtaggtcttgctgcatgggatgctagttgtgtccatcgtgtgtgtaacaccgcaaggcttgtaatttgtcctgtaaactgcttgctgcttt

SEQ ID NO: 13685 - DNA, 1273 bp, Zea mays
  Clone ID: LIB143-024-B5_FLI
cttagtggaaagtttattcttccattgaacatcccactgagtgtaatgcatatgcagaaatgcatatgcagaaattgaggtagcatataactgccgcaagggaaaatatggtgtagcagatgaggatataatcttatatggtcaatgtgtttgaattggtccaaccattgatatttcttcgcggttgctagacttgagagtcgcagttttgcatagtcctatattctatctgcactaagagtaatatatacagccaagcggacgtttggtttaacatttacaaggtatgtttggtccttttgttttttggaattaatggttgtccgatgcttgtcattcatatgagttctaatatcatgcccccttaaagtactcatcatcaaaagtttccatgtgaatgttttaaatgtagatttaaagggttgaaagacatcaaacagttattcaaacatgatcttaagtgtcgtgaaagactacaagtgaggttcaacttggcaaattgtttttctagtaactaaggagcaacaatgctatgtattttagcttgacttatatatctaagtacttacatttttggaatcgggcaaacagtgatagtttgaatcacatgttttgccaaaaggaattattagaactgttcaaaagttaggaaaaaatacatatttatgctttcttatgcacgggtaaattgctctgttcatatataaaaaaaataattgtagtattattgcttatattgattttaaatgatgaccttattagatgtgccatcgagaccacatatattagcattttgtaactaaatacaatgcatgaatatatatagatagcctttacatcgtgctacatgcttcctagaaataaggaaccattacaacatatatatttttgatgatgtacaacttcgtcatcggatataccgttccttcttttttacatacattttgataagaatgtcaaaatgttaaaaaaatagcgcgcgcatggcgcgcgttagacactagtagatttcagaactatcatgaagcgcgtgctcgctggttgttagttgttacagagcaacagcccagggaggccaagatgctacttagctactaaaaccaactgacaacaagtgcacagcccagtgggccgctaagctgcaagaaaaccctcgcccctcgttctggattgagattctctgcagaggctgcgatgttgggccgtcctgccctgcccggtgggtatatgtaagctcagaccgccaccggaaccttctcgagcccgcggccgc

SEQ ID NO: 13686 - DNA, 1451 bp, Zea mays
  Clone ID: LIB143-024-C4_FLI
gcgcgacctcctcccccggcgtacctccggagatccaccccgacccaccaccgcgtgcctcggcaatggccggcgctccgactaccgtaaccaagtccccgccgtccctggtcccgccggcggggcccacgccaggcggctccctcccgctctcctccatcgacaagactgccgccgtccgcgtctccgtcgacttcatccaggtcttccccgcccctacatcggtgaaggacgactggagcccctcctccacgatcgcggctatgcgcgagggctttgccaaggcgctcgtgccgtactaccccgtcgccggccgcatcgccgagcccgttccgggggagcctgagattgagtgcacaggggaaggggtgtggttcgtggaggccgaggccagctgctccctcgaggaggcgcggaacctcgagcgcccgctgtgcatccccaaggaggagctgcttcctcgtccgccggccggggtgcgcgtggaggacaccctgctgctcgcgcaggttacaaagttcacatgtggtggatttgctgtgggcatttgcttcagtcacttggtgttcgatgggcagggtgctgcacaatttctgaaagcgggaggtgagatggctaggggcctccctgagccatcgatcaagccaatctgggctcgtgatgccatccccaacccacctaagccacccctaggtccaccgccgtcattcaccgcattcaactttgagaaatcagtcgttgagatctctctggacagcatcaagagtgtgaaggatcaggttgcaagtgaaaccaaccagaagtgttccactttcgacgtggtcacggccataatcttcaaatgccgcgccttggcagtcgacttcgcgcccgacgctgaggttcgcttgggcttcgcagccagcactcgccacctgctgggcaatgtgctgccctccgtcgaaggctactacgggaactgtgtgtacccaggtggtctcaccaagaccagccaggaggtgaaggaagcttcgcttgtggagattgtgaccacgatcagggaagccaaggaagctctgtcatcgaggttccttgactggttgagcggcggcgccaaggagaaccactacaacgtgtcgctagactatggcaccctcgtcgtgactgactggagccatgtgggcttcaacgaggtggactacgggttcggtgagccgagctacgtgttcaccctgaacgacgacgtgaacatcgtcccctccgttgtgtacctgaagccgcccaagccgaagcagggcatcaggctggtgctgcagtgcgtggaaggccatcactctgccgtgttcggcgaggagttgcagaagcatgcatagagtgagtgtattccacagtgggaatctgttgtattttgtttgttgtgtcaaattgctgctcccggaatttgcttgcaataaggcagattggtcgtgttt

SEQ ID NO: 13687 - DNA, 1296 bp, Zea mays
  Clone ID: LIB143-024-D8_FLI
gaatcggcgcagcacgactacaggcatatggacgtggaagcgagccatgagtctccgcccttgcgcagcaagacgatgcgccgcctcctggtggcgaccaactgcgtgatgctcgcgcttggcgtcaccggtgggcagctcctcagccgcctctactttagcaagggcggacaccggcagtggctctccggatggctccagaccggtggctggccgctgctgctcccgccagtggcggcttcctacgtccgccgccgagcgcgcgaccggagcgccccggtgctgctcacccagacccagccgcgcatactgctggccgccgcggggctcgggctcatcgcgggcgtggacaacttgctctacgcctggggcctcgagttcctgcccgtctccacctccgcgatcctcatctccacgcagctggccttcacggtgctgttcgcgtacctgatcgtgcggcagcggctgacgatggcgacggtgaacgccgtggcgctgctgacggtgggcgccgtcgtgctgggcctgcatgtctcctctgaccgccccgcgggcgtcaccaggagtcagtactggctgggcttcacgctcaccctgggcgccgcggtgctgtacgggctgttcctgccgctggtcgagctcacctacaagtgcgccgcggggggcggacgccccgtgacgtacgcgctagtggtggagttgcagctggtgatggggttcgtcgccaccgcgttctgcaccgtcggcatgatcgtcaacaaggacttccaggtgatgcatgataactccatttatcaaatttagggtttaaagatagttcagtttttaggggctagttttagtcactctattttattctatttttagtttctaaattgttaaatacagaaactaaaataagttttaattttcgtatttagcaatttagggataaaagtaaaatacaataaaataaaatagatggaaactaaaatatagttttaatttttatatttaataatttagggataaaaataaaataaacggactaaaattagtctaaaaaacaaacacgcactcccttagtggtacggtacagcttctccggtacctcctctttctactttattttttaatccgaaaatcaaagcggctcctttctacgatgacaaacagagccaccgtcatagtacagtaccaaataaggtcttggtggaatgagtccatttcttatatgctacggtagtagttaattattaactttgacaaacgcagtggtaatgcatcaacttactgtattccgaatcaaataaactg

SEQ ID NO: 13688 - DNA, 388 bp, Zea mays
  Clone ID: LIB143-024-E11_FLI
ggcgcctacgggcagcagggacacaccggcagcgcctacgggcagcagggacacaccggcggctcctacgccaccggcaccgagggcaccggcgagaagaaaggcattatggacaagatcaaggagaagctgcccggacagcactgagcggcgcctatacgtggctgtgctgggctgtgctggcgcgtcaaagccgtaatgttcagtgttccatagataataagataaacccatgaataagtgtccctacccttgatcatgtgacagggacagggacagtttcctgtacttgtggggtgaatttgtacgtgtgatacggtaactgggtccgtgtactgttcatgctacgttttcctacgtatatagtacagcacttgcgagtggcttt

SEQ ID NO: 13689 - DNA, 1611 bp, Zea mays
  Clone ID: LIB143-024-F10_FLI
gccatggccgcgcgcgccaaggccgccgccgtcgacgaccacgaccccatgccgccaccgctgccgctcccatggccgcgcccagcgccgctcctcgtcatgctgtccctgctcgccacggcctcctacctggccctcacgcgctttcccgccgcgctcctcccgatcgcccctcgctctcgcccccacgacgcgcccgcgcacgcgcccggggacagctgcgcggggttctacgcgggcgcggggccggcgcgcgaggtgtgggcgtccgtcgaggagttcggggccgtgggcgacggggccacgctcaacaccgcggcgttccggcgcgccgtcgcggagctgggcgcgagggccgtcggtgggggaggggccaggctcgacgtgccccccgggaggtggctcacgggcagcttcaacctcaccagccgcttcaccctcttcctgcaccgcggcgcggtcatcctcggctcccaggatccagaagagtggcctctcattacccctttgccgtcttacgggcgcgggagagagcggttaggaccacgccacatcagcctcattcacggagagggcttaaacgatgttgttattaccggtagcaacgggaccatagatgggcaaggtcatatgtggtgggagctatggcggaaccgaaccttgaaccacacgagaggccatctcatcgagcttgtgaactcaaccaacgtcctgatatccagtgtcacgctgagcaactcccctttctggacagtacacccggtctactgcagcaacgtggtgatgaaggatttgaccatactggctcccctggatgctccaaacacagatggcattgatccagactcgagctctgaagtttgcatcgaagactgctacatcgaaagcggagacgacctcgtggccgtcaagagtggctgggaccagtacgggatctcatttggcaagccgagcacgaacatcgtcatccagagggtttcgggcacgactccgacgtgctcgggcgtaggcttcggcagcgagatgtcaggaggcatatctaacgtgctcgtccgtgacctccacgtgtggaattcggcgcaggccgtgaggctcaagaccgacgtagggaggggtggctacatcaccaacatcaccatagccagtgtggccatggagaaggtcaaggtgccgataaggttcagccgaggcgcagatgaccatcctgacgacaggtatgacccggccgcgctgccgaggatcagcaacgtgctggtcagcgacgtcgtcggtgtacacctgcagcgagcaccgatgctggaggcagtgcctggcgcagtttatgaggggatctgcttcaggaacttcagcttcagagggataaggcggcagcaggacagcaggtggcattgcgagtctgtgtatggagaggcgcatgacgttttccctgcaccgtgtgaagagttcaggagagatggatcctcctcctggtgtggacttctttgaccaactactctatctagtagtagtacatactacagcgcccacaagttttgggagtggatgatataggttttttagattatacagacaaactcaattttttaaactttaattagtcttctgttttcg

SEQ ID NO: 13690 - DNA, 876 bp, Zea mays
  Clone ID: LIB143-024-F4_FLI
gctaaatccctgccattagtagcaagcaagaaagcagtggtagtaggtgccacccacacggttttcacggctgccggctgggagcgaccgaggagatcgtcgtcacgctcgatggaggccctggtggggaggtactggggtctggggggacggcggtgcggggcgtgcggcgggtcgccggcggcggcgcactgccggacgtgcccgggcggcgcgtacctgtgcgcggggtgcgacgcggggcacgcgcgggcggggcacgagcgggtgtgggtctgcgaggtgtgcgagtgcgcgccggccgccgtgacgtgccgcgccgacgccgccgcgctctgcgccgcgtgcgacgccgacatccacgacgccaacccgctggcgcgccgccacgagcgcgtccccgtgcagcccatcggcgccgccgctgatcccgccgcggagaaggcggcgctgctgttcggccttgccgcggaagggaaggacggcggcgacgacgacgcggccaaggtcgtcgtcgacgccagtaagctggacctcctgttcgctgacgacgtcgtcgacccgttcctcgcccaagacttcgccaggttcccgcacgccgatagcgtcgtgccgaacgatggatccagctgcggcgccgctgtggacttcgactttggtggcggcgtcgccgtcgccgccaagcagccgtcctacagctcctacacggcggcgtcgctgggccacagcgtaagcgtgcctttttagtgaagtggctctgtcaccgtgcccgtgattattgtttttctattcctaatcttcgtttcggctttggttttggtcgagcagggctcgtcgtcggaggtcggcctggtcccagacgtgatgtgcggccgc

SEQ ID NO: 13691 - DNA, 1101 bp, Zea mays
  Clone ID: LIB143-025-C3_FLI
atccaatccatccccgccaccacaggcaaaggcaacccaaaaggagccgccatgggctcccgctacgaggtggaggtgacggtggggtcggcgagcaacctgaagaacgtcaactggcgcaacggcgacctccagccctacgccgtgctgtgggtggacgacgggcccaagtgctccacccgcgtcgaccccgacaacggcgaggaccccgtgtgggacgagaaggtggtggtccccgtcctacccgcctccgccgcgcgcctgggcgacgccgtcctccacatcgacgtcgtccacgccgccggcgacgacgccgacgccggcgtcaagccgctcgtgggctccgcgcgcctcccgctccgcgacgtcctcgatgacgccggcggcgtcggcggcgccagggtctcgcgcacgctcaggctgaagcggcctcgggccgcccgcagggccggctcgaggcccgcgtcgccgtccgcgaggccgcgccgccgccgcgctactacgacccgaacccgtacccggcgcccgcgtacgggaaccccgccgccgcccgtgacccgtactacgcggcgccgccggtgtacggcgggcagccgccgtacgccgcgccgccggtggggtacccggccgacgctcctcctccctacggcggtggttatggctatggagctgctgctccgacggcgtacggcgctgaggctgctccactacctgcccagcagcagaagagcagcaagatggggatggggacggggctggccgtgggcgccgcggcggggctgctgggcggcctcgcgctggcggaaggggcgagctacgtggaggacaagttcgaggatcgcgtcgccgagagggtggaggaggagacgttcggcgacggagactacgacgacgattactagaatgaagcaggtgggagaggagatcatgatcatgcatacggaaccgaaatccaggcaacaagtcgaagtcgagtagctcaaatgtattcaaattcaaataagtgagatcaccccagtcgagaaaaaaaaatcaaaacttgaaccatggcaatatatgttaatcgccaaccatttgatcgagtacttggtttgattgtcc

SEQ ID NO: 13692 - DNA, 434 bp, Zea mays
  Clone ID: LIB143-025-D11_FLI
gccgcggcaacccgacctgcgtcaatcgccatgactacctcaaggcgtcttgccgataggaagatagcacgatttgagaagaatatcacaaagaggggctctgttcctgagacagtcaagaaggcaaatgattatcctgttggacctattcttcttgggttctttgtctttgttgttgttggatcatctctctttcagatcatcaagacagcatcaaacgctggtttattctgaggacaattgccaattggtcacttacttttagtcactctaaaaaactatacaagtgtatggcgtagctggtactctacaatgtcgcctttctaatgctgtaccatggagagttttaagttataatgtatagtccatatatatatatatatatatatatatatatgtatgtatgtatgtatgtatgtatgtatgtatgtatg

SEQ ID NO: 13693 - DNA, 815 bp, Zea mays
  Clone ID: LIB143-025-H3_FLI
atcgcagagccagagcaagggaagacgacgcagatctcgccacgcgaacacagttagatcgagggagtaagtgagagtgagagccatgacggagctgttcgacacggccgtgaccagcctcctccacctgccggaggtgctggaccgcctcgccgccgcagacggcgaccggcggtcggccggccaccacgcggcgcacggccacggccacggacgcgtccacgggctcggcggcggcggcggagcgccggtggacatcgtggagagcccccgcgagtacgccttcgtgctcgacgtgccaggcctctccaagtccgacatccaggtgacgctggaggaggaccgggtgctggtgatgaagggcggcagcgggaagcggaagcgcgatgaggaggaggacatgaacggcgaagggtgccgatacatccggttggagcgcggcgcggcgccgcggtcgttcgtgcgcaagttccggctgccggaggacgcggacacgggcggcgttgcggcgcgctgcgagaacggtgtgctcaccgtcaccgtcaagaagctgccgccgccggagaagaaggccaagaccgtgcaggtcaccatcgcctagaagtcggcagtcggcagagtagcagcagtagaatcgtagcgcgtacgtagtggcatgtcgtgttgggtgaatgggtggagtgctcttttgtttacgtttgtgctgctgatgaactggtgggtgggtgtgaccgaccgtgcttcttttctgaacaagaattattcaatcgtgtcggtgaagctgtgcatttgtgcaaggagttcttgtggcctct

SEQ ID NO: 13694 - DNA, 656 bp, Zea mays
  Clone ID: LIB143-026-D1_FLI
ccgcatcgaactctacctgcctttctctcgtccctggcggcggcggcaggatggcggcttctactgcgaggacggtgaaggatgtgaacccccacgagtttgtcaaggcctactccgcccatctcaaacgctccggcaagatggagcttcctgagtgggttgacattgtgaagactgcgaggttcaaggagctccctccttatgaccctgactggtactacatcagggctgcatctgtagcaaggaagatctacttgagacaaggcattggtgttggtggcttccagaagatttatggtggccgccagaggaatggctcacgcccacctcacttctgcaagagcagtggtgccatttcacgcaacatcctccagcagctgcaggagatgggcatcattgatgtcgatcccaagggtggacggcgcatcacctcccagggaaggcgtgatctggaccaggtggctggaagggttgctgttgaagcttgagcaatctcatatttggtttctatgatgtcatgtttgattgttgagatggctacactttatttgcactttggattaggatttttgtgttaagagaactcaaggcattctagctatggttcacactgtattttccctgagtacctatttatcaaaacctattcgtatgtt

SEQ ID NO: 13695 - DNA, 970 bp, Zea mays
  Clone ID: LIB143-026-D11_FLI
tgaaaatgccgatcaataggatcgccctggggagccaccaggaggtgtaccacccgggcgccctcaaggcggcgttcgctgagttcatctccaccctcatcttcgtcttcgccggccagggctccggcatggccttcagcaagctgaccggcggcggcccgacgaccccggcgggcctgatcgcggcggcggtggcgcacgcgttcgcgctgttcgtggcggtgtctgtgggcgcgaacatctccggcgggcacgtgaaccctgccgtgaccttcggcgccttcgtgggcggcaacatcaccctgttccgggggctcctgtactgggtggcgcagctgctggggtccaccgtggcgtgcttcctgctccgcttctcgacgggcgggcaggccacgggcaccttcgggctgacgggcgtgtcggtgtgggaggcgctggtgctggagatcgtgatgaccttcgggctggtgtacacggtgtacgccacggcggtggacccgaagaagggcagcctgggcaccatcgcccccattgccatcggcttcatcgtgggggccaacatcctggtgggcggcgccttcgacggcgcgtccatgaaccccgccgtgtccttcggccccgccctcgtcagctgggagtggggctaccagtgggtgtactgggtcgggcccctcatcggcggcggcctcgccggcgtcatctacgagctgctcttcatctcccacacccacgagcagctcccctccacgactactaaaagccgaagccgaccgacctaggggtgcgcagcgcagctagcgcatccagctctctctccccgctcgccgccgtttagtttctctcgtgcacgtgcatgcatcgtcgactgtctcaggccgccgctgcgccggcgccgctcgcatcgtttgcttccttggaccagcagtcgtcgccgtcaggctgaactgcttgtaaccgtgaattccggacc

SEQ ID NO: 13696 - DNA, 688 bp, Zea mays
  Clone ID: LIB143-027-A4_FLI
gcccggggcaacaagcgaaccgacggcggcgatggggatcggtgagcacttcgagggcgtcaagcagcactgggcgagcaacttcgccttcctcgactacttcaagaaggtctacggccgcgccgagcccctccccaagtggtccgacgccgacgtcgacgagttcatcgcatccgacccggtctacgggccccagctcaaggccctgcgggagtcgaggaagttcgcgctcgccggggccctcgtcggcgccgcccacctcggcggcgtcgcgctcaagtactccaaggcgccgcacggcgtcctgctggcgaccggcttcggcgcgatcaccggcgccgtgctgggatccgaggtggcggaccactggtaccagctctacgagatggacaagcagggggccaacctcaggttcatctactggtgggaggacaaggtctcaggccagaagagctgaaccacatcgagtgatgcctattctactgagcacaccagcgtgacaacaaaacattgacgtctctcatgccgagttcttagtttttctttcctagttttctctaataagtgtggaattggttgaggaagccaactggacaatgcatttttcatctccgtcatgggttatgttcatccatggtcaatctggtgtaaacagcaaatcctatccgttttcgagatatgttttctc

SEQ ID NO: 13697 - DNA, 2595 bp, Zea mays
  Clone ID: LIB143-027-H3_FLI
gtcctcacctatcatcgccgctgcgccgtctcctccgctcccgtcgtccggaaagatggcgtcccacattgttggataccctcgcatgggccccaagagggagctcaagtttgcacttgagtctttctgggatgggaagagcaccgctgaggatctggagaaggttgctaccgacctcagggccagtatctggaagcagatggctgatgctgggatcaagtacatccccagcaacaccttctcgtactatgaccaggtccttgacaccactgccatgctcggcgctgtccccgaacgctactcatggactggaggagagattgggtttgacacctacttctccatggccaggggcaacgccactgtccctgctatggagatgaccaagtggtttgacaccaactaccactttattgtccctgaattgggcccaaacaccaagttctcctatgcttctcacaaggctgttaacgaatataaggaggctaaggcgctcggtgttgataccgtgccagtacttgttggaccagtctcgtacctgttgctctcaaagcccgccaagggtgtggagaagggattccctcttctttcccttcttagcagcatcctcccagtctacaaggaggtcattgctgagttgaaggcagctggggcttcatggattcagtttgatgagcccactcttgtcctcgaccttgattctgacaaattggctgcattctctgctgcatacgcagaacttgaatctgtactttctggattgaatgtgcttgttgagacttactttgctgatgttcctgctgagtcctacaagaccctaacatctctgagcagtgtgactgcttatggttttgatcttgtccgtggaacccaaactcttgggcttgtcacgagtgctggtttccctgctggaaagtacctctttgctggtgttgtggatggacgcaacatctgggctgatgatcttgctacatctctcagcactctccagtctcttgaggctgttgttgggaaggacaagcttgtcgtatcaacttcctgctcgctcatgcacaccgctgtggatcttgtgaacgagactaagcttgacagcgagattaagtcttggcttgcttttgctgcccagaaggttgttgaggttgatgctcttgctaaggcattggctggtcaaaaggatgaggcttacttcgcagcaaatgctgcagctcaggcctcgaggaaatcctcaccccgtgtgaccaatgaagaagtccagaaggctgctgctgctctcaagggctctgaccaccgccgtgcgaccaacgttagtgctagattggatgcccagcagaagaagcttaacctccccatccttcccaccactacaatcggttcgttcccacaaaccgttgagctcaggagggtccgccgtgagtacaaggcaaaaaagatctctgaggaggaatacgtcactgccatcaaggaggaaatcaacaaggtcgttaagctccaagaagagcttgacattgatgtgcttgtgcatggcgagcctgagagaaacgatatggttgagtacttcggtgagcagctctccggttttgcgttcactgccaatggctgggtgcagtcttatgggtcaaggtgcgtcaagcctccgatcatctacggtgacgtgagccgccccaaccccatgaccgttttctggtcgaagacggcgcagagcatgacgtctcgcccaatgaaggggatgctgactggcccagtcacaatcctcaactggtccttcgtccggaatgaccagccgaggtttgagacttgctaccagatcgctcttgcgatcaagaaggaagtcgaggatctcgaggctggtggtattcaggttatccaaatcgacgaggctgcactgagagaagggctgccgctccgcaaggctgagcatgcattctacttggactgggctgtccactccttcagaatcaccaactgcgagatccaggacaccacccagatccacacccacatgtgctactccaacttcaacgacatcatccactcgatcatcgacatggacgcggacgtgatcaccatcgagaactcgcggtccgacgagaagctgctctccgtgttccgtgagggtgtcaagtacggcgcgggcatcggccccggtgtctacgacatccactcccccaggatcccgtcggccgaggagatcgccgaccgcatcgacaagatgctggccgtgctggacaccaacatcctctgggtgaaccccgactgcggcctcaagacccgcaagtacacggaggtcaagcccgccctgaccaacatggtctccgctgctaagctcattcgcacccagctcgccagcgccaagtgagcacctttttttgcctttttcgtttccgaggagggcgtcgtcgatgccaatttgtttccaataaacagggctccccccctgtgcccgccgttctgttgtgctccgtctgtggttaggttactagttttcttgatctcgcccccacgcggtacctgttttactatctgtttggtggtttctgaggcaagttgcccgtgtacttgtatcgtaaaaaccgagtgggacatctgcatcgtttc

SEQ ID NO: 13698 - DNA, 1226 bp, Zea mays
  Clone ID: LIB143-028-B11_FLI
agatcctcaaggtcatccgcaagaacctggtcaagaagtgcatcgagatgttcttcgagatcgcggagaacaaggacgactacgccaagttctacgacgccttctctaagaacatcaagctgggcatccacgaggactcgcagaaccgcgccaagctcgccgacctcctgcgctaccactccaccaagagcggcgacgagacgacgagcctcaaggactacgtgacgcgcatgaaggaggggcagaaggacatctactacatcaccggcgagagcaggaaggccgtggagaactcgccgttcctggagcgtctcaagaagaagggctacgaggtgctgttcatggtggacgccatcgacgagtacgccgtggggcagctcaaggagtacgacggcaagaagctggtgtcggcaaccaaggaaggcctaaagctggacgacgaggacgacgaggaggccaagaagcggcgggaggagcgcaagaagcggttcgaggagctgtgcaaggtgatcaaggacatcctgggcgaccgcgtcgagaaggtggtggtgtcggaccgcatcgtcgactcgccgtgctgcctggtgacgggcgagtacgggtggaccgccaacatggagcggatcatgaaggcgcaggcgctacgtgacagcagcatgagcgcgtacatgtcctccaagaagaccatggagatcaacccggacaacggcatcatggaggagctccggaagcgcgccgaggccgaccggaacgacaagtccgtcaaggacctcgtgctgctgctcttcgagacggcgctgctcacctcggggttcagcctcgacgaccccaacacgttcgcggccaggatccacaggatgctcaagctcggcctcaacatcgacgaggacgctgctggcgacgaggacgccgacatgcccgcgcttgacgagggcgccgcggaggagagcaagatggaggaggtcgactgaggtgtccttccttcctataatatgcaagttttcagcgatgagggacgacggtcaatggcgatgcctgtttgtgtgtgtctgcgtgtgggtccaaaggggtcactgttggtacaggtcacggtagtgtctagtagtaccttgattgccaggaggcaggaccgtgtgtcttcttcgtgtcacatttcgggtctgctctgagtgtcgtggaatcctgtgaaatacatccgatccgagtccttagcttccctcatcatc

SEQ ID NO: 13699 - DNA, 673 bp, Zea mays
  Clone ID: LIB143-028-E11_FLI
cgagcgagcgagcgagccaccgcccgagagagagagagagggagagggagagtggggattcaagtttcaaactcactatcgaggggggataggaaggtggtcactcatcggtccacagctagctcgtcgccccccatggctgactggggccccgtggtgatcgcgacggtgctgttcgtgctgctcacgccgggcctgctgttccagctgccggcgcacggccgcatcgtcggcttcggcaccatgcacaccagcggcatcgccatcctcgtccacgccgtcctctacttcgcgctcatcaccatcttcctcatcgccatcggcgtccacatctacgccggctagctagggtgtcttctagtccacacccccttcgtctcttcctctcatcatcggcctcttgcttcctcgtcatgtactactagtctactactactcctagtctactactactactagtagtcttcgtttcgcggataccccgcagtatgttggtatttattatgggattgttatggtgttttatgttccagctccttccgtcgtcttaacgcttggttgcgttgcgcatccatttcattgaagatgatccggccgggctcttgattcagtctgaacagttgtgtatttatacaagactcagaatgaacacttactggctattggtttgatt

SEQ ID NO: 13700 - DNA, 344 bp, Zea mays
  Clone ID: LIB143-028-G1_FLI
aatgaactcgcaaactacaaagatgtagtggtgatggtcacaagcaacggggggcggacgaccgtgagcaggaggagcaaggcggaagacctggaagcgcagctaaccgacctcctggtgaagatgcactcggagcacattgcacagcccaattcgtaggaccatcgagcgagcgagatggttaaattaaatcagacatgccggcggcaagtatgagcgattctacttctactcgcctagcaaattgtgatatacagagttcaccgggtttgtcataaagacgctcatcaatgtgctgcagcagattaattcaaaaaattatagctgaatagctcacaccaggt

SEQ ID NO: 13701 - DNA, 724 bp, Zea mays
  Clone ID: LIB143-029-A8_FLI
atgcgggccaaggcgagagggaggcactcgcactagcttcgtggattggcaggagctacagggcgcacactggatcggagatccgctggtcggacactgaagacgcggcgggctctcccctgacgctgttctggaagcacagcgacgccataatctgctgctctctaaagccggctttcacgctcaagttcgccaaccgcgccggcttcgacatactggagacgacggtggcgaatgtccaggacctgccgctggaggcggtccttgatgacgggggacagaaggccctggtcgcacagctccccaagatcatgctgcagggcctggcgtacctccccggcggcgtgtgcaggtcgagcatggggcggcaagcgtcgtacgagcaggcggtggcgtggaaggtggtgggcgacgacggcgcgccgcagtgcctggcgctcatgttcgtcaactggaccttcatctgatgctcctccgctcttgacgttcacagcctcgatgcctcactcggcagcgtcagatcggttgccgcctttatcctatcctactacgtattactagttgctttccgttgcacctgtgtactacaactgctcgagacaatgcccccctgctgtctgtttatggcctaagtctactgtggtggatcgggagttggagaacaatgcccctgctgtctgtttatgtgtgagacttaaccctattactactgctgttatcattg

SEQ ID NO: 13702 - DNA, 1100 bp, Zea mays
  Clone ID: LIB143-029-B3_FLI
caccgggcacaccccccgagctcagcttagctccactccagctccaatcacagtcgtgaccagagcgcgagagctagctagagggccgtgaaaatgccgatcaataggatcgccctggggagccaccaggaggtgtaccacccgggcgccctcaaggcggcgttcgctgagttcatctccaccctcatcttcgtcttcgccggccagggctccggcatggccttcagcaagctgaccggcggcggcccgacgaccccggcgggcctgatcgcggcggcggtggcgcacgcgttcgcgctgttcgtggcggtgtcggtgggcgcgaacatctccggcgggcacgtgaacccggccgtgaccttcggcgccttcgtgggcggcaacatcaccctgttccgagggctcctgtactgggtggcgcagctgctggggtccaccgtggcgtgcttcctgctccgcttctcgacgggcgggcaggccacgggcaccttcgggctgacgggcgtgtcggtgtgggaggcgctggtgctggagatcgtgatgaccttcgggctggtgtacacggtgtacgcgacggcggtggacccgaagaagggcagcctgggcaccatcgcccccattgccatcggcttcatcgtgggggccaacatcctggtgggcggcgccttcgacggcgcgtccatgaaccccgccgtgtccttcggccccgccctcgtcagctgggagtggggctaccagtgggtgtactgggtcggccccctcatcggcggcggcctcgccggcgtcatctacgagctgctcttcatctcccacacccacgagcagctcccctccaccgactactaaaagccgaagccgaccgacccaggggtgcgcagcgcagcgcagctagcatccagcgctctctccccgctcgccgccgtttagtttctctcgtgcacgtgcatgcatcgtagactgtctcaggccgccgctgcgccggcgccgctcgcatcgtttgcttccttggaccagcagtcgtcgccgtcaggctgaactgcttgtaaccgtgaattccggacccgtttgcttctgtaagatttgtgcatttgcctgagtac

SEQ ID NO: 13703 - DNA, 827 bp, Zea mays
  Clone ID: LIB143-029-C2_FLI
tgaactctcaacatccattgatgggaggattactgaatgctgtagagactgttttgaagctctcattaccaaatgtctacctgtggctttgcatgttttattgccttttccatctgtggttaaacatacttgctgagattcttcgatttggtgaccgagaattctacaaagactggtggaatgcaaagacaattgatgagtactggagaaaatggaacatgcctgtgcataaatggattgttcgtcatatatattttccttgcatgcgaaatggtatatcaaaggaagttgctgtttttatatcgttctttgtttctgctgtacttcatgagttatgtgttgctgttccctgccacatactcaagttctgggcttttttaggaatcatgcttcagattcccctcatcatattgacatcatacctcaaaaataaattcagtgacacaatggttggcaatatgatcttttggtttttttctgcatatacgggcagccaatgtgtgttctattatattaccatgatgtgatgaaccggactgagaaggcaaaataaccatctgtagatcgtttttggtgtttcatttcttccatcatggaaactgaaagcaataatccgtgcacactcagtaaaacagcatcgtgtcttccagtttttttgttggaatctatcctagatctttattatgtgtatggtggataacctcatgtcaccatcgtatctgtatataataagcctaaatcagctgacgttctgtatgtaaattagtaaatgtaatgactaattggtgcccccctttctgcactaccagatctacttcttttctcgt

SEQ ID NO: 13704 - DNA, 518 bp, Zea mays
  Clone ID: LIB143-029-E8_FLI
caggaaaggagatcaccacttcactcaagaaggcaccctcccttgccactccttttccttgagatgacgatgacgacgatgaagaagcagcagcagctcctcctcctcctttctctcatgtttctcgttgctgtgacagcagccgctgttgctgccgatccacatccacagcaggtgcaggtgcagcagcagcagcaagcacagatgaggattaacagggccaccagatcccttcttcctcagccgccgccgaaactagactgcccgtccacctgctccgtgcgctgcggcaacaactggaagaaccagatgtgcaacaagatgtgcaacgtctgctgcaacaagtgcagctgcgtgccgccggggaccggccaggacacccgccacctctgcccctgctacgacaccatgctcaatccacacaccggcaagcttaagtgcccctaggccttcgccactcatgttatgtacaatgtactatcatcacttcaataaataaataaaaaaacttctggttc

SEQ ID NO: 13705 - DNA, 1038 bp, Zea mays
  Clone ID: LIB143-029-H4_FLI
gcgcgggtggtggccgccctagggtacgacgacggcaggttcgcgccggggaggtgcacggggtgcgaggccgggggggactcgggcaccgagccctacgtcgtggcgcaccacctcatcctctcccacgccgccgccgtccagaggtaccgccgcaggcaccagccgacgcagaggggcagggtcgggatcctgctggatttcgtgtggtacgagcccctcacggcggactcagccgccgaccgggccgccgctcaaaggtccagagacttccacgtcggatggttcctgcaccccatcgtctacggcgagtaccccaagtcggtccggagaagcgtcaagggcaggctccccaagttcacggctgaggaggccggtctagtccgaggctccatcgactacgtcggagtcaaccagtacactgcctactacgtgcgtgatcgacggccaaacgctacggcggcgccgcccagctactcgtccgactggcacgctgagttcgtctatgaacgcgacggtgtgccgattggaccaagggcgaactcagactggctctacatcgtgccttggggactgtacaaagccgtcacctacgtcaaggagaagtacggcaaccccacgatgctcctgtcagagaacggtatggacgacccgggcaacgtcacggtgggccagggcgtgcgcgacgcggcgagggtggcctactaccggagctacgtcgccgagctgaaggcggcgatcgacggcggcgccaactgcgtgggatacttcgcctggtcgttgctcgacaacttcgagtggaagctggggtacacgtcccggttcggcctcgtctacgtcgacttcaggacgctccggcgctaccccaagagctcggcgtactggttcagggatgtcatcgccggcaccaactgaccacgtacggtctctcagtccatctgaaaaagggttagagaaggggaaaaaggatggggaaaaaacatgagtgtgtaatccgcgtaccgatatatataagtactcttgtcaaagttgatcttc

SEQ ID NO: 13706 - DNA, 767 bp, Zea mays
  Clone ID: LIB143-030-A6_FLI
cgcatttcggccgttccccaatctcctcccagcgatttgccttgccgaggtcgccttgccgctgttcccgagcccgacgccttgccgcccctgccctgctaggctgctacagaggaggagaacccccagattttcccacccccatggcaacgcgcgcgccgccgcagtcttcttcgaccggatccgtgacggtgacgatcgacccgtccccctcgtcgtcgtcctcctccgccccgcccgcgtcggcgccggccccggccccggctcctgagtcggtggtgctgcgcctgaagcgccgggctaagaagaaggtgtcgtggaaggaggggacggtggacaacgagggcctcggccgcaagagctctaagaagtgctgcatattccacaaggaggtccccttcgacgaggactgcagcgacgacgaggcccccggcggcggcggcggcggcgggcaccggtgccctcgccctcatggtgacgccggcgaggggaccagcggatgctcgtcttcttcccacgaccatggccaccactgatctccgtgcgtgttactcgttcttctctatcctccttaggtatcggaccacaatagatgcttatatgtttaattaatctggcatcatgtaattagttgagtgaatacaccaaatccgtgctctatggttgggagacacatgtttttatgggtacaattgttgtattggtgcttggcgagcaaacatggcaatcgttttgctgaattcaatgttgacacctatgttttgctt

SEQ ID NO: 13707 - DNA, 1949 bp, Zea mays
  Clone ID: LIB143-030-C3_FLI
cccttgcacaccattgggactcgttacccatctcgtggactcttctgtttcttctccttttctccccccgtttattggaccagcggcggcttgctcctcttcgtgtaacgggatttggttttctgcggatgagtgtttattgttcgatgcggagcttcgatctggattcgtgcttgtcctcttggtctctgctcgctttgtaatgcttgggtacggtgcgctgaaggtgtttggggggtatgattgttgttgcacctgaataactgaggtgggtgtggcgcgaacttgggggtgtcttctctttggcgatcagtgcaatcgaatggtcagttgagttagatagtttttacatcggcgttgatggacttgcataattatgtgcgaatcatgggatcattaacttggtataaggggacgatcagtgatatgtgaagctgtcatgtttaggtgcttgattcagcaaagtggttaggcatccgacgctacgttttggggattgagatgcaaaataaagttcagcacttaactatggatcaagggttgtagagcgcaacccagctcttctgaatccaaactgtaggttgatacgtcggtgccatgaaactgaaaaccgatagttgtggcataggctcagggcaagaatcattttttttttcattttctgacttttccgtaactataggtcacacgatgattattttctccgcgacattatccgggtattaccgtgacagatatttttattggctccatttctgccatgtagtcaggttgatggcgatggagggaccagttttatgccgccctgcaatgcaagccaaatcgcctgctgctgcgctggtcaacaactccctgaccagattcgggcagcttgggaccatttcaaaatacaggaacgtttcaagattcatttctcccatctctcagccatctacgaagaacataggtccatgctgtagcttcagctcgtcttctgatggcaatggatacatggctggaaactttagcgacagtgatgaagattatgttaattctactgtgctagaagcagttgaggtgagaagtggatcggaaggatatgtgataaagatgcgagatgggaaaaacttgcgttgtgtccataacaattctcaagggagaaatattccagagagtgcaccccaacctgctattgttttgaggattgaagatggaagcgaaactttacttccaatcattgttttggagatgccaagtgtacttctgatggcggctattcgtaatgtccacattgcacgaccaaccatatatcaagttgtcaaggaaatgattgataaaatgggctatgaggtaaaacttgttcgggtaaacaaaagaattcaagaagcgtactgtgctgaactttgtctaacaaagattgatgattctacagacagcatcaccttcgatcttcggccttcagatgccataaacattgctgttcgttgcaaggttcctgtacaagtccatagaagtcttgcatacagtgacggcatcagaccagtcgagccagcaagaatggcagtagcagctggcctatcagatgggttgttatttacagagcttgacagacccgatggacaggcatctgttgaggctcaagagtttggattggtgaagaacatgctcattgcagccgtagaagagagatacaaggatgctgcatcatggaaggacaaactgatgcggctgaggtctaagcggaagaactgggcctgacagcgttgcatgtctggatggtgtaaataaagatgatgcccagctgaattccagtacgcattccagataattgatgctgggttatggctatgtaactagctgtacatattgtatggacccgaggatggtcttctgtaaattcagactaagctttgaagtgaaacactaatccttcggagaaacttggtaccttgtccgtgttcacttgtggt

SEQ ID NO: 13708 - DNA, 1486 bp, Zea mays
  Clone ID: LIB143-030-C6_FLI
ggcgattgctctcagaaggcactagcacgcaaaaaccccacgagagagacgaatcttccgaatctctcggtggcgatggcgctctccgaccgctcccgcgagtcgctcctcccgagcttcctctacgcctcctcggcgcgctctttcgctgccacaggagccgccgcgcgcctccctgtctcctccccagcgcctgccacggctggagcaggaggcggcgtgccgttctcgatccaggcgcccaaggagaagatcgagatgtactcgccggccttctatgccgcctgcactgccggaggaatcgccagctgcgggctcacccacatggccgtcacgcctctcgacctcgtcaagtgcaatatgcagattgacccagcgaaatacaagagtatctcatctggatttggtatcctgttaaaggagcaaggggccaggggtttcttcaggggatgggtgcctactttgcttggttacagtgctcagggggcttgcaagtttggcttctatgagttctttaagaagtattactcggacattgcagggcctgagtatgcccaaaagtacaagactctaatctacctcgcaggatctgcatctgctgaggtaattgctgatgtggctctctgcccttttgaagctgtgaaggtacgtgtgcagacacaacctggatttgctcgtggattgagtgatgggctccccaaatttgtccgatctgagggtgttcttgggctctacaagggaattgttcctctctggggtcgtcagattccttataccatgatgaagtttgcttcctttgagaccatcgttgagcttatctacaagcatgctgtgcctgttccgaagtctgagtgcagcaagactacccagttgggtattagctttgctggtggttacattgccggtgtcttctgtgctattgtttctcacccggctgacaaccttgtgtctttcctgaacaatgccaagggagctacagtgggagatgctgttaagaagcttggtctctggggtctcttcactagaggacttcctcttcgtatcgtcatgattggtacccttactggtgctcagtggggaatttacgatgcattcaaagtgatggttggactcccaacaacgggaggtgttacacctgccccagcagcagaggctgaattgaaagccagtgcttgatttttttttctgtgttccctgagatcatatttggtggagtggaattgtatcagccggtcgagagcttagttcccgaatcttttttaatcttaacggaaaatttgtccgtcatccttctgatgagaggaactcattaaacaggcgaaataggtcttttttgcgctgggaaaagtttacgcttgatgcataataatttgtaggacggcaacgctctagagcgcaggttttgttcacctcctgtaccgaggaatgcttaaagttacatttcacattatggtctttatgaaagagtgcacctcggttgatgttc

SEQ ID NO: 13709 - DNA, 695 bp, Zea mays
  Clone ID: LIB143-030-G4_FLI
cagtgtccggagcattttccgaggccttggccgagcttgcgcaaggcaacccttccatgagaactgacgttcctttctacaacgttgtgcccgtagccggagctggccgctctgcgtgtacgaacgacataatgacgtgcgagttactggcatccaacgtctccagtgcaaagtccaaaccagccgaaccgttcgctgtgacgcctgcttgaatgcagctttccttcggaaattggaggtgggcgcacgttggaatttttgccacaggagccggcggccagtcaacgccagttggacgacgacggttgaccagcttctctagggctggcggcggtagcttcgtttctgtgctggcggtcgattaaaaaaaagaccgtacggtgatcatcacagatgcacccatactgtattattctgtttcagcgtcctatacaaagtatacattgggtctgaattctgattagcctgtgctgatgcttgcaatgacattggttcttctgtgtacagactacggacagagtcccggtcagtaacgtgtgtgtacttgttcttcctctgtgttgacattcttgctcgatggtggaacctgtcgcagttggcagaggtgaagccgcgtagctcacttaggtctgccaaacacttcacttcttagattgtttctgtgaaaatcgcttctgatgaatgcaaaatctatt

SEQ ID NO: 13710 - DNA, 1759 bp, Zea mays
  Clone ID: LIB143-030-G7_FLI
gggcgaagttccgtgctcgcgctgcttctcctgctttccgccggaggagcccgagcgtcctacgacggcgagggcgaggcaggggcaggggcagaggagaaggagaaggctgcggcgtggacgggcgggctgagccggcggagctttcccaaggggttcgtgttcgggacggcggcgtcggcctaccaggtggagggcatggcgcacaaggacggccgcgggccgagcatttgggacgccttcatcaagatccccgtagtacacttgtatggattgcatatgaaaatgcatcgatcgtggattgaattggcttgacatggttggatcatggcatggcaatggcggcgtcctgcttttcaggcgagatcgcaaacaacgccaccgcggacgtgactgttgacgagtaccatcgctacaaggaggacgtgaatatcatgaagaatatggggttcgacgcttaccggttttcgatctcttggtcaagaatattcccaaatggaaccggagaagtgaactggaaaggagtggcgtactacaacaggctgataaactacatggtgaagaaaggcatcacaccctacgcaaacctgtaccactacgacctaccggaggcgctggaggtccggtacggagggctgttgagcagagaagtggtgagatcgttcgcagactacgccgacttctgcttcggggcgttcggcgacagggtgaagaactggctgacgttcaacgagccgcgggtggtggccgccctagggtacgacgacggcaggttcgcgccggggaggtgcacggggtgcgaggccgggggggactcgggcaccgagccctacgtcgtggcgcaccacctcatcctctcccacgccgccgccgtccagaggtaccgccgcaggcaccagccgacgcagaggggcagggtcgggatcctgctggatttcgtgtggtacgagcccctcacggcggactcagccgccgaccgggccgccgctcaaaggtccagagacttccacgtcggatggttcctgcaccccatcgtctacggcgagtaccccaagtcggtccggagaagcgtcaagggcaggctccccaagttcacggctgaggaggccggtctagtccgaggctccatcgactacgtcggagtcaaccagtacactgcctactacgtgcgtgatcgacggccaaacgctacggcggcgccgcccagctactcgtccgactggcacgctgagttcgtctatgaacgcgacggtgtgccgattggaccaagggcgaactcagactggctctacatcgtgccttggggactgtacaaagccgtcacctacgtcaaggagaagtacggcaaccccacgatgctcctgtcagagaacggtatggacgacccgggcaacgtcacggtgggccagggcgtgcgcgacgcggcgagggtggcctactaccggagctacgtcgccgagctgaaggcggcgatcgacggcggcgccaactgcgtgggatacttcgcctggtcgttgctcgacaacttcgagtggaagctggggtacacgtcccggttcggcctcgtctacgtcgacttcaggacgctccggcgctaccccaagagctcggcgtactggttcagggatgtcatcgccggcaccaactgaccacgtacggtctctcagtccatctgaaaaagggttagagaaggggaaaaaggatggggaaaaaacatgagtgtgtaatccgcgtaccgatatatataagtactcttgtc

SEQ ID NO: 13711 - DNA, 838 bp, Zea mays
  Clone ID: LIB143-030-H3_FLI
tggagatcaaggaaatgaaggaacaaatgacagagctggtgggcattcttcgacacagtgaatcacgcagaagagaaatggagaagcagctcaagcaaagagaacagacaactccaatggccactacacctccgaaaagtggaaatggcacgacgaagcactctgctgatgaccccaacacaccactgtcccctgtcgccgttcctgcacagaagcagctcaagtattctgctggaattgtaaatagccccagcaaaggagttgctgcgataaaaaaagagcaacttaagatggttccaattgcacagttgtctgcggggaagagagtttcaatagcagggcattcaggaaagctctggaggtggaaaagaagccatcaccagtggctgatgcagttcaagtggaagtggcagaagccgtggaagttgtctgaggtgatacgacacagtgatgaaacaatcacgaggattaggcccagacctccacttcttccacataaacctcataactgatgtgaaacggacttgtttttgtctcaacaagaactgacacggtttgcaaacctacacagctaactgcctgcacaagccttcactgacggtgacatgtcaatagttggtgttcgtcttcacaaaggaatctgtcaaaggaaggcgccttgtaaagtctttcttgtgctgttgtgtgatagttttgtgtgaagggtaactgaaagttgaatgggttttgtgctcgagtgatagtctattttcccctcttcttttgtttgttgatactaaaatgagaaaagacaagtgatattggtttggtttgctaggagtattgtgatgtaatgcag

SEQ ID NO: 13712 - DNA, 838 bp, Zea mays
  Clone ID: LIB143-030-H9_FLI
accactgcctcgccaagatagccgaggccggccgctcgtcggagggagccaagtcgccgatctcgctcttctcccgccactcccgccgctcctcctcgtcctccgaagatggcagcgtgaagtccgcggggagcaagaaggtggatccaaggtgcccgaacgctggcaatctgttccatgaatgcggtgagcattgcgccgccaagatgcagcggtcggagcagcagcacaagggggtcaatctcaagtcaccgcgcaggaaaggggggaagaacgctacagcgatcccaaactggaaggttgatccgaggtgccctaacgcgtccaatccgttccacatgtgcgcccagtactgcttcgaccatctgagtgaaacagcgcagacaagtgcagcaaagtcagacaagagacgaggcaagggcgtttctgaagacgagggaagaggagaaaccaaaaccaaccctggttgcgccaacgcgtccaacccctaccacaagtgcggtgaccaatgcaagagaaagggcggtggtgataggtagaccgtagacgaggaaggtaaatttttccgctcataactcagttccatcaaactgtcgtcggtcaattggtggcagcgaacattctccagttttgcgcgagcatcaagccaaagttaggtggatgtcaatttaagggtagacaaacggtcatctggttaaaactgaggcattgtaatatgcttactacaggctagtgaagttcctctgccaaccgagtcagtcgttcactcatttgttatctttgagtaagagctgctgctatattgttggtggcgaaatttttttgctattttgcctct

SEQ ID NO: 13713 - DNA, 733 bp, Zea mays
  Clone ID: LIB143-031-B4_FLI
gcgacggtgacgacgaccgcgcgagcgccgccgactccctactgcatcaggtgcctcggccttcgtcgtgctctccgccggcaacgagtatagacgggcgcgcatggccaccttcgagctgtaccggaggtccaccatcggcatgtgcctcaccgagacgctcgacgagatggtctccaacggcaccctcagcccggagctcgctatccaggtcctcgtccagttcgacaagtccatgacggatgctctggagaaccaagtgaagagcaaggttactgtcaagggtcacctgcacacctacaggttctgtgacaatgtgtggaccttcatcttgacagacgcaagcttcaagaacgaggaggccacggagcaggtgggcaaggtgaagattgtggcatgtgattccaaattgctcggacaataggcctgtgtaccctcgaggtcaaggaaggaagcttttaagtgcggcgaggcggggtctgtctgcgcgtcagctgtacacgcctaggctaccgcgaggcggggtctgtctgcgtcagctgtacacgcctaggctaccgcccgaacggcatttcatttgccttcttcgtactgtatgtgtatcttcttttttccccttgtatacaatctgctgcagctataccggccaagagtatggcatggtatggcggcaggcagccgcaaacttgtttttacctacttggtgtagcgcctgtgtaacagttttcgatcg

SEQ ID NO: 13714 - DNA, 365 bp, Zea mays
  Clone ID: LIB143-031-B8_FLI
gtgctcgcgggagccggcgaggtgcctattggactcggcggaagtggagttcagctacgatatcgacactggcctcgtgtccgtcgacttgccggtgccggagcaggagctatacctttggacgctggagattatgatctaggtcgtgatgctgtgcgccgacgccaacgcttgccttcgcggctgagccattatgagtcggacgacattgtcatttgctatgtgcacgagagatagatgtattgtggtggtgttgtataattggcatggggagtgttttttttgttatgttcttatctgtatatcatacgtgctctgaatgttatataatacttgataataaaggatggtgctcctttaatacg

SEQ ID NO: 13715 - DNA, 1021 bp, Zea mays
  Clone ID: LIB143-031-C1_FLI
ggactgaaggttctccaccagagccttggaggggctgttggtagctgtcagaggcttcagtatgcatatgatgaggtgtccacaagggcatcacatcttgagatacttaagaggagtcagatggagcagattgatcagctagagcagaaaaacacagaaactgtggagaaacatcggcttctggaagaggaaaagttatctgcaaataaggagaatattaagctacaaaagcatgtccaagaccttgaagttcagctccagctagcaaagcagaagcttaaagttactgaggcagaaagcaaatgcaaagaagagagatatgaagcgtcagtggaagcactgcgggcagagatctgtcatcttgaacaattagtacagcagttttcagggagagtcagcttgctggaaggaactctcatgcaggttaaaggacatgctgagtcagtggtctgtaaatgggctgacaaattggatgagctagaaacaatctgcagtcagaattttgtgctcttcattgaccgctcatctgcatgtagtgacgagcttaaaatcctgaggaagaaggtacatgatcatcttaatgaacagaaggaacttgccaatgcgaacaacgagctggctattaggttcaaagagaaagaaatggtggtgtcagaaatggtgaagagtgctgctgaggcacagacaaagatgctccagctccagaagacggtggacgagaaagaagacgagctagcagctagagtgcaggagaagagagaagccatcaagcaactgagcgacaccattgtttaccacaagaactatagcgatgacctggtgcgctacatccgcagtcagagtcgccctcgcctcccgttctgcctttaaatctgaaagtcaatgaaagatgtaaaggcttaatctagctgtgattttttttttttgcagtaaggagaccattgcaatttttcttatgtatcatatatagggctcgaatactttctggaggtagccatatattcagtggcttgtgtattct

SEQ ID NO: 13716 - DNA, 952 bp, Zea mays
  Clone ID: LIB143-031-C2_FLI
tgaagagcggttaagcagatcaaatgctgatccttttaaaaacgggttgggttttaacaatggaaatggtatttactctggtgagcaagggttcgctattggtggtgaagagaggttaagcagatcaaatggctatctttctgagttggtcgcggcagcatatgtgtgccatggatgtttatgaaggaacaaggatggctacagcggaagatcttcctggcattagaaaaattattcggccgctggaggattctggtgttttggtgcggagaacagatgcacagcttcttgaagcgctagagtcattctatgttgttgaaagagatggttcaatcattgcttgtgctgctctatttccattccctgaggaacaatctggtgaagttgctgcaattgctgtatctgaagaatgccgaggaagaggtcagggggacaagttacttgattacgtggaaaagatggcattatccctgggtctcaagaaattattcttgcttactacacgaactgcagattggtttgtgcgacgtggcttttcagagtgctcaattggatctatccctgagcagaggagaaaacgtatcaacttgtcccgtggatccaagtattacataaagcagctgtagccaaagcctgctgggattatcgccaacaattttgtcatcaggtgactcagcagcatgcacagagtttggttccacacttccacttaattaagatggtaccagccaagattacaccaatttcgcggttgcccaaaggcatataattgcacaaagaaacaaaacaccattttactgtcactgtgtttgaaagatggttgtctttgtttaagtatgtgacagaagtttgttttgccaatagaatcaaggcagagaagaaatagctgattgaattatatgtagaccctatttaacaagcaataccaaagatgaagtgctcgtacagtatc

SEQ ID NO: 13717 - DNA, 1263 bp, Zea mays
  Clone ID: LIB143-031-D12_FLI
tctctctctcgtggcgacgactgggcgacctccccgcccccgccgctctacgccaggtgcccagatcttcgtcgggcccttcgccgaagagcagccaacaggttgccggtctgcgagttgaatcatggcggagcacttggcttcgatcttcggcactgagaaggacagggtcaactgccctttttacttcaagattggggcctgtcgtcatggggatcgctgctctcgtctgcacaacaggccaactatatcaccaactcttgtgcttgctaacatgtatcagcgccctgatatgataacccctggagttgatgctcaaggccaacctattgaccctgagaagatgcaggagcattttgaggacttctatgaggacatctatgaggagttggggaagtttggtgagattgagaatctgaatgtttgtgataaccttgctgaccacatgattgggaatgtctatgtccagttcagggaggaagagcaagcagccgcagcatacaacgctcttcaggggcgcttttactctggccgccctataattgttgagtattctcctgtgaccgacttccgtgaagcaacctgtaggcagtttgaggagaacagctgcaaccgtggtggctactgtaatttcatgcatgtgaagcaaattggcagggatctcaggaggaagctgtatgggcgttctgcttccaggaggtaccatgggagaagccgaagccgaagcccgccaccacaaaggaggggccaccgtgaccgtgatgactaccaccaccgtgaccgtgatgactaccgtggtggcggcggtggtggaaggggaagaggtagcaggtatgacaggtacgatgacggagccggcagaggtggcaggcatgccaggtatgatgatggagcaggcagaggcggcagacatgacaggtatgatgatggaggaaggcgcaggcatggtagcccctcaaggcgtgcaaggagcccagtcagggaaagcagcgaggagcgaagggccaagattgagcagtggaaccgtgaacgggagggaaaacagtgagctctcggtggctactgttcgccggacttgttgcttagctcggctctcatcgctatattctaagtatgcttgtgtggatgacattctgcctgtctaagtaaaaccttttaagatcaggattcctcggttcattttatggttaaaccagacatcatttgcttccatctgtgttgtgtcggatcctttgctattatgttattttgacaattggtgtc

SEQ ID NO: 13718 - DNA, 1313 bp, Zea mays
  Clone ID: LIB143-031-E7_FLI
cgcggctccaacacctgcctgcctgcctgattcttacaccaaccaaccacgcgcgccaagccgaattcgtcttccaccgatccgccccgcccgtttcccattgcttagcttgctatggcgcagcagcagccggtgcggcggattctgaaggtggcaccgccggggaagggggacggggaatccttccccacggtgcaggcggcggtcgacgcggtgccgctgggcaaccgggcgcgcgtcgtcatccgcctcgcgccgggggtctacagggagcctgtctacgtcgccaagaccaagaacttcatcaccgtcgcgggggcctcgcccgaggccaccgtcgtgtcatgggacaacaccgccacgcgcatcaggcactcgcagtcatccagggttataggaactggaacattcggctgtggtacgttcatcattgagggggaagatttcattgcagagaatatcacgtttgagaactcagctccccagggctctgggcaggccgttgcagtccgggtaaccgcagataggtgtgctttctacaactgccggttcctcggttggcaagacacattatacttacactacgggaaacagtacttaagagactgttatattgaaggccattgtgacttcatctttggtaactctgtcgcccttatggagcattgccatatccattgcaaagcagcgggatacatcactgctcatagccggaagtccacatcagaatctactggctatgtgttcttgaggtgtactattactggacatggagaagctggatacatgttcctaggtcggccatgggggccctttggaagggttgtctttgcgtacactttcatggatcgatgcatcaagccttctgggtggcacaactgggacaaatccgagaacgagcgaactgcttgcttttatgagtacaggtgctcagggccaggcgccctcccatcgaaccgggtcacatggtgtagacagttgctggatgttgaagcagagcagttccttgcgcacacttttatcgacccagacgtcgataggccatggctcctccagatgatggcgataagaataccagcctcagcatagtttgatcccggcagccgcaggtcctgcatggttcatgcctcctttctagcctatttaaataaactaagttggaggatgcattatatttgcataagtttgtaacgtttggtgaattagtatccactttcatctcactgtgggcggtggggatagggaatgagagagcttctcttgtaacgaaccccagcactaggctgaaatatatgcagattttattttgcatg

SEQ ID NO: 13719 - DNA, 832 bp, Zea mays
  Clone ID: LIB143-031-G3_FLI
gcacgacggacaaaaatatggcagggaaagccggcggactcaaaggggttgccctcatcggcggcagcgccaacagcacggtcgctggggtcattcacttcttcgaggacccctccaccaggtacaccgaggtgaggggcaaggtcacgggcttgactccgggaaggcatggattccacatccacgtcttcggcgacactaccaatggctgcaactcaaccggtccccattttaaccctcataataaaccccatggagctccatttgacgacgaacgacatttgggcgacctgggaaatatagtagccaatgaagatggagatgcagaagtgttcataagagacttacagatttcattgagtgggcctcattccattctgggaagggcagttgttgtacatgctgatcctgatgacctagggaggggtggccatgaactgagtaagtcaacaggaaacgcaggagctagaattggatgtggtatcattggaattcagtcatcagtttgacaaataacggcttagtagcaccagaaaaagagggggacatgattccacagtccgtgcagtgtcgtggtttagggatatggaaatggtgttcgttgttctggaccgtttgaagactaaatatctccagtcatgtatacaataatcttacagtcggtgaggaaattgcttgtaaaatcttgcattgacttatatcactggttaccagcagcaataagtctatatgtaaaacttctcgatttgtatatgctatgcttcctgtggagcagggaagcgaacacaagtcagccttttgtgagtgcattctgtccagtttttacttggtc

SEQ ID NO: 13720 - DNA, 1287 bp, Zea mays
  Clone ID: LIB143-032-G10_FLI
gcggaacggcgaggagcagaagggaacggggatgggaagcacaggggcgctgctttggcacccgtcgccgcaggtgcactccggtggcgtcctcttccgccagagccggcgcatcgtacgccagcgcaacttgcctctattatcgctagctgacgcggcgcttgagctcgagcgccgccgcgggcagcgtctccgctgcgctgccggcgacggggccggcgggccccgggaggctcagaaggagtctccgagcggcatcggcgcagcactcgaggatccgtctccaggacctcctgtggaaaacggtgccttcagaagcccctcacaggaagaacagagtgctctgtataattttctctatccaagcaaagacttacttccagatgataaggagatgagtatatttgatcatctggaggagcttcgcgagaggattttcatctcagttttggctgttggggctgcgatactaggctgttttgctttttcaaaagatctggttctttttctagaggcaccagtgactgttcagggtgttcggtttttgcagctctcgcctggggaatttttctttacaacattaaaggtttcaggttattgtggccttttacttggaagtcctatcattttatatgagatcattgcatttgttatcccaggtttaacaagggatgagcggaaatttctcgggcctattgtgttgggttcttctgttctattctacctaggcattttcttctcctacacggttctcagccctgctgcgttgaacttctttgtgaattatgcagatggggcagtggaatcgttgtggtcaatagaccagtacttcgaattcatacttgtgctgatgtttagcacagggttgtcctttcaggtccctgttatccagcttctgctaggacaacttggattggtttctagtgaccaaatgctttctatctggagatatgttgttgttggcgctgtcgtcgctgctgctgtgcttacaccttcgacggatccgttgacacaaatgttgttggctggtcctttgcttggtttgtacttgggtggcgcatggatggtcaagctaactggacgataagtggttcatgcaaggcaatgatgctccgggaagcaagagcgccactgtaacctagtcttgtaaaaatgaattcactctgttcatcagatgatattgttaccatttctctttctgaagttcatgagcagtagaaaatagaggaaacggttagttagtttcatctacagatcttgaagtaacaaatgaatgcgttgtggtac

SEQ ID NO: 13721 - DNA, 542 bp, Zea mays
  Clone ID: LIB143-032-G9_FLI
tccttgtttcgaaatgccccaaggagactgatgccacctactctctccaagatcccactgaggtcatggagttcttggtccgtctggggcagtggaatccactgcgatcaccatcgccggcggcgcgcccaagggggcgaaagcagtaacagacgacgacaacaacagatcgctaagcgtgtttaatttaattatagttagttagttagtttattaattgttgcactactctaggagtaataaccctcctcgacgatctacatacattaccccatcgtctcagctcagctcccggccccagatgtgaactctggccggccaacctgctgattgtgttcgatcagacgttcttccatatgggttttagaggcacaggcaggcatccatgtgcaaagctgcctgccgcctttgattagcttaacccaggaaggttcatctgctgtatgagttgtgtagtgactacctagctatgaccttagcagcttaattattagcccgtctactgtaaaatgtaacatataagcaactggcagaattttaat

SEQ ID NO: 13722 - DNA, 1360 bp, Zea mays
  Clone ID: LIB143-033-A12_FLI
caagcgctccgccgccgtccgtccgtccgttggcgtcgtcaccgtccaaatcaaacaaaaagaacttggcgataatgtgtcgctttcgtaatgaacgcggggataagcgtggcccatggttttgggccgctgaattttttttacgtgggccatgctaggtggggtggggggctgcaccgtgcccaatgattcgaccgcgtcgcagtcctccgcgcgcaagtattcgatgcccatgggtcatagcgaacagatcattttcgcccgtcgcgccctgcgacggcgacggcgacggagagccagtggggtctcactgggattagacatcgaaatgacgctttgtgattctttagctcatccatttctcgtcagctgcacggacgacaaactaagttctctattgtgttgacgggtgcagttggatgactgggtcctgtgccgcatctacaacaagaagggcggcgggctggagaaggcggcggcgccggcggccggcggcgaccacaagcctgtgttcgccacggcggcggtgagctccccgccggagcagaagccgttcgtggcggcggcgggcgggctgcccccggcgttcccggagctggcggcgtactacgaccggccgtcggactcgatgccgcggctgcacgcggactactccagctgctcggagcaggtgctgtccccggagcagctggcgtgcgaccgggaggtgcagagccagcccaagatcagcgagtgggagcggaccttcgcctccgaccccgtgaaccccgcgggctccatgctcgaccccgtcgtcggccacgccggcggcgacccgctgctgcaggacatcctcatgtactggggcaagccgttctagacgacaccgcccatcatgtcctgaggggaggtgggggtggcgaagcatcctcggctgcggttggttggttgattgatctgtcttgggcagcgcaatgcaatgcaaccgcacggtgtgggctttgactcaggcgagccgccattgttgacttgcaaggaggatataatatgaaactatagctggattacatggagaggcggcaatgagaccgtctggccccgccggaagggagacggagacggagacggatggcgcagtgcatcgggtgtggtggatcgtgcgcggcatgtgtgtgtgtggctgtacatatacatactgtacatgattggttcagtgcagggtttctgttccttcattgattagttattatactaataagtactagtaattttgtaagggcttgtagttgcagtctccgtactggtggtaggtagtgcaggccatattcgtcatcgccaagcttcgagtgtacttactcctacaatatatattttacagtat

SEQ ID NO: 13723 - DNA, 220 bp, Zea mays
  Clone ID: LIB143-033-A6_FLI
ctactggctcagagtgttcatggagtccggcgacgcgcacccagaactgccgcagatttagaccgctcgcgcgagaattttcggctcctaattgattcatcgttcttttgtctctatctctctctgcacgtcttgcatcggaggggacggacaaggacagcagcagctgattaacagagaaggaaatcaggcagaaacaacgcgacacgccgttgcaact

SEQ ID NO: 13724 - DNA, 834 bp, Zea mays
  Clone ID: LIB143-033-C10_FLI
gttgaaacatctgacaaaaagattattgtattgcaaaggagctacaatgtggcggactttccaggatactatgttttccctggaggacactcggagccgcaagaaattggaatcatgggtcatcaaactgatgaagaagactttgctagtctcaatgaacgagtttcacaagaaatgtttgaaggagtcatccgtgaagtggttgaggaaactggagttcctgctagctccctaactgatcctgtcttcattggagtttcccgccgagaagttaacgctaggccgactgcgttcttttttacaaaatgtaacattgattccagtggcgtaagcgagctttattctagagctcaagatggctatgaatctactaaactctacacagtatctgtggaagaactacaaggaatgaggcagcggatgcctggatgccacaacggtggtattgctctgtatgagttgatgaggaatgctgcaaaaaaaaagtgaagacgtcattgatgaatagttctgatggtgctattacaccagaaacaagtgtggagctattacaccagaaacaagtgtggaggtattcgtatctcgtacaaacacccgtgcagaacactgcatgtgacatccatcagattgctgttctttgcagtagatgagccatttcatgtttgttgagcctgacataggtctccttagaccgctgcataagttcccacaaagaaataaggtagtgtttggttgaagaaccaattagaacggagccgttctatcccagttttgttgttgtttggttacaaagtaactagaacgtaatgacttcaattagagaatattctcctc

SEQ ID NO: 13725 - DNA, 504 bp, Zea mays
  Clone ID: LIB143-033-D11_FLI
gcaccacacctcttcttcttcttcctcctcctcctagcacagctagcgcctgctccccttcgcctgtgatcatgtcttgcagcagcggcaagtgcgactgtggctccagctgctcctgcggcagctcatgcaactgcatgtcccctaacgtggagaccgccgccgccagcagcatcaagaccacggtcctcgccgcgccgaccaccaaggccagcgccggcggcttcgaggcggccaccgagggcggcggctgcgactgcaacacctgcaactgcggcaccagctgcggctgctcctgctgcagctgcaactgagccggtcaggcgatggcgcacgagagtcgagaggacgacgacgagtcgtataaatataatagcggcgtctaaataagatcctgtcaactgcacccgccattatcgatccatggtcgctcctggggttcatgttcatctgtaacgtgctcgcggtcatgtccgtctcgtgccggatttaatatttatatgc

SEQ ID NO: 13726 - DNA, 1048 bp, Zea mays
  Clone ID: LIB143-033-D2_FLI
gtggtggcttgttcctgaagatgatcctattgcaaaacgagacttagttcctagcatcgattcaaacagcaaacctagcactgtgactgatgataaccagcaattgaacctaaaggagtcacaagctctagaaaatccaataacagaattggccaaacgtctggggattgcactttctgaagaagtttcagcaagttttgttgacgaagccaatgataaagaacttgtggaattgtcatctagacttgctggtcaatcgcttccagctagtgaccaggttgcatcaattcaggtacttcgtgatcattggaaaagttctccagcaagctcactacaactgcaggaactaggacctttgctgagggactatcaacgcctcatcttgcgacactatacgggaaattcattgccagattttcgtgaaatggaagctctccgttttttccatctgaaaagtgcttcacagttgcgcatggatgacattcccgtcctgttgagcgagtatggaaggctgctttcgacatgagatggcgtcttgcaagctgtgccctcctgcttggttctaacagaacttctgctccatgtaatttgcggagaactttctacctgacaaaagcacacccgtggagccattccttgccatcagttggtctgttagtgcaagtcatagtcgtatcagcgatagcgcactgagctgaattcctttttcttttgaggactggacgcagacgcacacatatttcgtgccgcctggctgggcgctggaatggccatggccatccacacgtggttaggggcctaggcgaggagctgggcggcgtggcaaacttggcaggccgccatggtcgcgtggaattccaagaaaacggggttttgtgtgatgtgaggctggaatggaacctggggggtcagcagcacatgtttccagtctattgcactccctctgaccgaaagggcgctgcactgcaaatttattttgctacctttgttcaaaaataatgggcgtctccttttcagatgtcaatcaatttcaactttgattagattt

SEQ ID NO: 13727 - DNA, 881 bp, Zea mays
  Clone ID: LIB143-033-D8_FLI
cgattccatttctaccccgagacctccagccgtccgcccctgaaccctcagccttctccgtcccgcctcggcactcgacggccgccggcacacaccgcgcagtctcgagacaggaaccggaggaacgaggatggaggatgactcgccgctgacgaagacgatgaagggtgcggtgacaggactcgccgcggggaccatctggggcaccgtcgtcgccacctggtacgacgtgccccgtgtggagcgccacgtcgcgctccctggccttatccggacgctcaagatgtgcggcacctacggggccaccttcgccaccatcgggggcctctacatcggcgtcgagcagctcgtgcagagccagcgcaagaagcgcgacttcgtcaacggggccgtcggcgcgttcgttgccggagcctctgtctgcggctacagaggaaagagtattcagtcagccctcatcggaggctcctgtctggctttcacatctgctgtgctggacattggcggcaatacgaccagagttgacaacggcaaagagtactatgcctacacaactgagaagaagcctgcaaattgattccaagtctgcacttctagcaaacaatcttgcacgccatcaactcagtgaatttgaagctgatgtgcagttttatgtctgttttgctgatgcaattagttcttaagcaaatccatggcaacttgtttatcgctgatgcttgagggatggaaatgacactcagaataaatctttgatttgcttccttgtgatcgttgatcacattaaacgcagtggcgcgatatactgtgtaattgtctattttcccgtagtaagtattgataggaacgttgacctgataaaatagataatctaattttggttt

SEQ ID NO: 13728 - DNA, 786 bp, Zea mays
  Clone ID: LIB143-033-E7_FLI
ccaccagcgctcgtcacctccaatcaacaaattcccaatccgccgcttcccatcccgcgttcgccgctccatttgatcgaattcccgatggcgcccaaggccgagaagaagcccgcggagaagaagccgacggaggagaaggccgagaagaagcccagggcggagaagcgcgtgccgggcaaggagggcggcgagaagaaggggaagaagaaggccaagaagagcgtcgagacgtacaagatctacatcttcaaggtgctcaagcaggtgcacccggacattggtatctcgtccaaggccatgtccatcatgaactccttcatcaacgacatcttcgagaagctggctgctgaggccgccaagctcgcccgctacaacaagaagcccaccataacctcccgggagatccagacttcggtgcgcctcgtccttcctggcgagctcgccaagcacgccgtctccgagggcaccaaggccgttaccaagtttacttcctcttagatcgccgccgcacggagcgacggctctgtttcgtttcctcgtacttttaggccagtgctaataggttgctcgaggaacaatgtagtgtggaaatttctaatatattccaaattgtgctgatataatttgcttcaaaccttgaggaggcgctgttttaatttggggttgctacagccgtacaatttttggcgccaatatcttgcttcgtattcactggggttcaatcacctgaatcatgtaatttgttcagggggataaataacatttatcaaaggattgtgagat

SEQ ID NO: 13729 - DNA, 1521 bp, Zea mays
  Clone ID: LIB143-033-F5_FLI
gccgcccagaccgcctccccttccccgcctccggtgcccaaggccaggccaacagttttgaggtggtaatggcggaccaggctaaccaacccactgtccttcataagctaggtggccagttccacctgagctccagcttctctgaaggtgtacgggcccgtaacatctgcccttctttctcaccttatgaaaggagatttgccacgaggaactacatgacccagagcctttggggcccttcaatgtctgttagcggtggcatcaatgttccagtgatgccgactccgctttttgccaatgctccagccgagaaaggtggcaaaaacttcatgattgatttcatgatgggcggtgtttcagctgctgtttcgaagactgcagctgctcccattgaacgagtgaagctgcttattcagaatcaggatgagatgatcaagtctggtaggctatcagagccgtacaagggtattgctgattgcttcaaacgtaccatcaaggatgagggtttctcttccttgtggaggggtaacactgctaatgttattcgttacttccctactcaggctttgaactttgcgtttaaggactacttcaagaggctgttcaacttcaagaaggacagggatggttactggaagtggtttgctggcaacctggcctctggtggtgctgctggtgcttcctctttgttttttgtgtactccctggattatgcgaggacaaggttggccaatgatgccaaggctgccaagggaggaggcgatagacaattcaatggtcttgtggatgtctaccgcaagacactcaaatctgatggtattgctgggctttaccgtggatttaacatatcttgtgttggaattattgtttatcgtggcctgtatttcggactttacgattctatcaagccagttgtcctcactggcagcctccaggacaacttctttgccagttttgctctgggttggctgatcaccaacggtgctggtcttgcatcttaccccattgatactgtccgcagaaggatgatgatgacttctggtgaggctgtcaagtacaagagctcattggacgcattccagcagatccttaagaaggaaggccccaagtccctgttcaagggtgctggtgctaacattcttcgtgccattgctggcgctggtgtgctttctggctacgaccagctccagatcctcttcttcggaaagaagtacggctccggcggtgcttaaatggagaaaaatgatgacgaacaagagcagttcgctcccggtccagcccagtcaggatctggtcaagtttttgcctttcatatcgaagaaattaataatttatgtaggagaatttttccaacattcgttttgggcggagacattgatctcaaaacactcgtaactgtcctactaggtggtggcatgggtccccaaaacatggtcatagggtgtgtctagtctgcccttcgttgcagccgggcaattttccttacatatattgcctttaatcaagtatcagatgagtgtc

SEQ ID NO: 13730 - DNA, 478 bp, Zea mays
  Clone ID: LIB143-033-H10_FLI
ctggggtgttgctgtgctggtgggtgtgccacataaggacgctgagttcaagacccacccgatgaacttcctgaacgaaaggaccctgaaggggaccttctttggcaactacaagccacgcactgatctgccaaatgtggtggagctgtacatgaaaaaggagctggaggtggagaagttcatcacgcacagcgtcccgttcgccgagatcaacaaggcgttcgacctgatggccaagggggagggcatccgctgcatcatccgcatggagaactagatttcgctgtctagtttgtgatctggcctgggcttggggttaataaaagaggcaatgctagcctgccctttcgatgaggaggtacatacacgctggcgatggaccgcgcttgtgtgtcgcgttcagtttggcttttgccaagcagtagggtagcttcccgtgtcggtaattatatggtatgaaccatcaccttttggctct

SEQ ID NO: 13731 - DNA, 353 bp, Zea mays
  Clone ID: LIB143-034-B3_FLI
cgcgatctaggaacgttttaagcaggccgaagcagattgtgaccgggccttactgttggatagaaaggtaatagatttttgtagatgcaatattcctgtgctgctacgggtgacatgtctgaagcattgtcaaccctaagagaggagttccaaaggtttattggatagtcctggatggttctgacatcgttaccatcttgtgctgttatggcaacatcaaatccttactgtgaataccgtttgtggctccaatgccaaagcatgcctgaaatcttgaagtgcttctttgtaattcaaagttacttcccttgcaaaaccacgccgtagatatgctttaacattctgaagcaaca

SEQ ID NO: 13732 - DNA, 1780 bp, Zea mays
  Clone ID: LIB143-035-B4_FLI
cgcagaggcggcagggtgggcgaccagtctcctccgcacgcttcccaccgagctcacacactgcacactcccacactcccactcccacctgtaggttcacgggaggcgaggaccctgccccccctgcattcttcccgtatcgcggaccgatcctcgccgcgggaggcgagcggagcggggcgtttctgcgggggagaagcgcgtccctgcaatttctgagagaggggaggcggcgagtggaaaagagcaggcgttgctatcctatcttgctgacacagcggcggtgtggcgaggcgcatggcgagggcgcgcggtggcgccgcgtggtgggtgctggcagcggcgtgggtgctgtgggcggctgcggctgcggcggaggcggaggccaggtcgccgtcggcgaggagggtgcaccggcacctcaagcgcctcaacaagccggccgtcaagagcatcgagagtccagatggagacatcatcgactgcgtgcatatctcccaccagccagcgtttgatcatcctctcctcaagaaccacacaatacagtttaggccggcgtaccaccctgaaggtctatacgatgataccaagagcagcataggctcaaacaatgctggcgagaggccgatgctccagatgtggcatcgaaatggcaggtgccccgagggcacggttccaatcaggagaaccaagaaggacgacctgcttcgagctagctccgtgaggcggtatggcaggaagcggcacactgctccgaacccactgtctgttgatcccaacatgctcagcgagggtggccaccaacacgccattgcgtacgtccagggcgacaagtactatggtgcaaaggccaccattaatgtgtgggagcccaagattcagcaggctaacgaatttagcctgtcccagctctggatcttgggggggtcatttggggaggatctcaacagcatagaggctggctggcaggttagccctgacctctatggagacaacaacaccaggctgttcacatattggactagtgatgcataccaagccacaggttgctacaacatgttgtgctctggtttcattcagataaacagcgaggttgccatgggggctagtatcttccccatctcgaactacgcgggctcccaatatgatattagcatcctgatctggaaggaccccaaggaaggaaactggtggatgcagtttggcaaggaatacgtcctgggctactggccgtccttcctcttctcctacctcgcggacagcgcgtcgatgatcgaatggggcggggaggtggtgaactcggagcccgacggcacgcacacatcgacccagatgggcagcgggcacttcccggaggaagggttcagcaaggcgagctacttcaagaacgttcaggtggtggacagcagcaaccagctcagcgcccccaagggcgtaggcaccttcaccgagcagtccaactgctacgacgtgcagaacggtaacaatggggactggggcacctacttctactacggcggccctggcaagaactcgaactgcccgtgactggtgcttctaatgtgtagtgtgaagtgccgtcaccactagcaaaatgtaacccaagcgttcaggttcgcttatacagcgtcaatctgcatctccttgttcagtcctagctaggtagtgtgtaacatgtgcatgtgctctctagactctaatgttttcttcttcttttcattgtattttcttcttgtgccatgtaaagtttctgaagagaaggagcatggcttgaggctgc

SEQ ID NO: 13733 - DNA, 987 bp, Zea mays
  Clone ID: LIB143-035-C7_FLI
agttaacccaaaaataagcgcattccagaaagcacaggattgtcttctgcccatgggaattacgtctgaaaatgttgcccatcgatatggtgtaaccaggcaagagcaagatcaggccgccgctgagtctcataggagagctgctgcagccacggcctctggaaaattcaaggatgagatcgtcccggtgccaacaaagatcgttgatcctaaaactggagaggagaaggaagttgtgatatcagttgatgatgggattaggccagggaccacagcatctggattggcgaaactgaaaccagtttttaaaaaggatggaactacaactgcaggcaattccagtcaagtgagtgatggtgctggagctgttcttctcatgaaaagatctgtggctctgaagaaagggctgcccattcttggtgttttcaggagctttgcggctgttggagtggatccagctgttatgggtgttggtcctgctgtggccattcctgctgctgtgaagtctgcaggccttgagattggcgacattgatctgtttgaactgaatgaggccttcgcctctcagtttgtctattgctgcaacaagttggggctggaccgttctaaagtaaatgtaaatggaggcgcgattgcccttggacaccctctgggtgcaacaggtgcccggtgtgtggctactcttctaaatgaaatgaagcgccggggcagagactgcagatttggtgttgtcaccatgtgtatcggatctggaatgggggcagcagctgtgttcgagcggggagacgcggtggatggactctccaacgtgagggacatgcaggcacataattttctgtctaaggatgcgaagtagaggcgcagaaaaaccatccatcctagagcagcataagcctgctgcatttgtaatatattcgaaatccgtattttttttcttcacaagcactactctatatacgatgaataaaagggcgacaatacagtgtc

SEQ ID NO: 13734 - DNA, 1062 bp, Zea mays
  Clone ID: LIB143-035-E1_FLI
agagaggggatggtgtgagggagggaagggagcaaaggcaaagcagccaacgaccagagagacacggaggctcagagagagagagcgaggaagaagaagagaagaagaagatggagcaagaggaagcgtgctcctcctcgctgcggcagtgcaggatttgccacgacgaggaggacgagcggcgctccgccatggagtcgccctgcgcctgctccggctccctcaagtacgctcacaggggatgcgtgcagaggtggtgcgacgagaagggaagcgccgtctgcgagatttgcctccagaactttgagccaggctacaccgttcctcccaagaaaacccaacctgctgatgtcgcggtgaccatcagagacagcgtgggggtgcccaggccgcagcacgagcctgaagaggaggaggagcagtagctggtggacgtggcgttgatcggagccagcgacccggagtacgccgagtgcgcgcgcgccgccggcaggagcgcgtcctggtgccgctcggtggccgtcacgttcacggtcgtcctgctgctgaggcacctggtcaccgtggtcacggtcggggcggccaaccagttcgccttcggcctcctcacggtatacttgctgcgggcgagcgggatcctgcttccgttctacctcgtcatgaggctcatctccgtgatacagcaggggcagaggcagtaccgcctccggctgctccaggagcagaggagacacgcgttgaggtcgggccggctgcacggccaggaacagcaacaacagcatgtcatcctggttcgctgaggaacgagccattcattcaccttgccttggtgtccatacattccattcatccgtcgtacgcgtacaaggttgtaagatgtaccgctccatttttttctttttgttcaggcctttacaagcctaaaaaaagcttatatgtaccaccacttcatttgtaaaccctcaaaatttgttgctgagaagatcgacatatcatgtatagaattgtaaaaagaaacaaacaaaaaaaaaggggaaaagagaactggcgcaatgttcgatt

SEQ ID NO: 13735 - DNA, 1049 bp, Zea mays
  Clone ID: LIB143-035-E11_FLI
ggtgccaacgaagaacaaaggatccatccgcggatcggcgatcgcgatggagatcgagcaggcgatgcgcggcagcagcgacgtccggctgcgcgccaagtacgacgccgctgtctacatcgtccgccgcgcctacgccttgtacccgttcgaggagctggctttcagtttcaacgggggcaaagattcaactgtgctgctgcatttgcttcgggccggctactacctccacagagcaagttcaggtggtgacgtggacgacgacagcacggtcctccagaccgtgaagaactgccccatgcggaccatctacttcgaggaccccgatgctttccccgaaatcgactgcttcacgtacgagacggcatcgacgtacggcttgccactggaaagtatcaggacagggtacaagtccggactagaagccctgctcaaggagaagcctaccaaggcgatcttacttggcactagaaacggcgaccccaacgcggttggtcaacaagagttctcccctagctcgcctgactggcctcctttcatgagggtgaaccctatcttggattggtcctacagtgacgtctggtctttcctgttaacgtgcaaggtccaatactgcagcctctatgaccaagggtacacttctattggcagcgtacacaacactgttccaaaccagcttctgcgtgatggcccgggcgggtcgtacaggccggcgtatacgctgtcagatgggagtcttgagagggctggtcgagcaaagaagaccgggaagagagatggctcggctaatggcacgaagaacaacggcaatgaaacgaaacaatagcctatcaactctggttgttctcaggtttattgtgaagaaaaagaatttcgtatgaaaaaaatgacaactgtacatgtgcgcgttcgaaggcaactcactattttatttactacttgattttatgatgtggtgggtgagggaccaagtatcgtgaacgttttctttgtgtgtgtgtgtgtttgggaataatggttcctccaccaaaatatgttctttttaagtg

SEQ ID NO: 13736 - DNA, 1004 bp, Zea mays
  Clone ID: LIB143-035-G12_FLI
cgcaatggcttatccttgcttaattaccaaggtacctttgcaggtaggtaggtagctagccgccatagcaagctaggccgaagcagaggagtgatggccaaggtccaccccaacgccgcggagtccgtccaggcagaggccgagggagagctgcccacggtgctgacggtgtggcgcaagtcgctgctcttcaactgcgacggcttcaccgtctacgacgcccgcggcgacctggccttccgcgtggactgctacgccggctcgttccgccgccggcgccgcgccgacgtcgtgctcatggacgccacggggaagccgctgctcaccgtgcgccgcaagacgcggttcggcttagcggagcgctgggtcatctacgacggcgacgccgacgacggcacgacggccggggccacgccgctgctgtccgtccgccgccgccgcataggcgcgtgctgcaagacgctggcgctcgcccgcccccgcccccgctccgccgccgcgggaaccgacgcaccgtcgtacgtggtggagggttcctacggtcggcgcgcctgcgcggtgcgcgacgcccgcgggggcgccgtcgtcgcggaggtgcagaggaaggaggccgtcggcgacgacgtgttccgcctcgtcgtggccgggccacgcctcggcgcgccgctgtccatggcgctcgtcatcgccctcgacgacatgttccgcggcggctggtcggcgcggtcgctgctgcgcatgagctcgccggcgtagtactttcactagctatagaagccacgagatggagtggagcccatataccagggactctccctgttacacgtgtaccgttacagtgaccccgggcccagttgtcagcgtcagcagagtttataatgcaggctgcagcaggggcagggctaacccaagcaatatttagatactagaattttcagttcgaatgcgtaaaacagtcggttctctgccaaatcaatcaaatatgaaaaaactatatatttgcc

SEQ ID NO: 13737 - DNA, 983 bp, Zea mays
  Clone ID: LIB143-036-E6_FLI
cgactcgctcgggccgcccctcccgtcgtccccgttcgaaggtgcggcagccggcaggcgagcgatttcattcgacatgaatcccgagtacgactaccttttcaaacttctgcttattggtgattctggtgttgggaaatcatgcttgcttctcagatttgcagacgattcttatttggacagctatatcagcacaattggggttgatttcaaaattcgcacagtggagcaagatgggaagaccataaaacttcaaatttgggatactgctgggcaagagcgcttcaggacaatcactagcagctactaccgcggagctcatggaatcattattgtatatgacgtgacagaccaagaaagcttcaataatgtgaagcaatggttgaacgagatagaccgttatgcaagtgataatgttaacaagctccttgttgggaacaagagtgaccttactgccaacaaagttgtggcaactgagacagcaaaggcgtttgctgatgagatgggcatcccattcatggagacgagtgccaaaaacgccatcaacgtggagcaggccttcatggctatggctgcatccatcaaggataggatggccagccaaccagccgcggccaacgcaaggccagcgaccgtgcagatccgcgggcaacccgtcaaccagaagacgtcttgctgctcgtcctaagattgcctcatttctttggttccttgtgactatttctacggtttgtgcgcgcacgcaaatgtatttgcattattcctgatagcatctattcgttggccagatgattagagagctgaaaatatgttaagaacaataccatagagagaagttcctcagtgctctcgcagcttaaggagcaaacagcaacactttacttcgttttttatactttattatagccgcactgtttattactcgggctacatttgtgaacagcgactgtaatatttttttactctatattcgtagtgagatg

SEQ ID NO: 13738 - DNA, 1100 bp, Zea mays
  Clone ID: LIB143-036-E8_FLI
cacaccgggcacaccccccgagctcagcttagctccactccagctccaatcacagtcgtgaccagagcgcgagagctagctagagggccgtgaaaatgccgatcaataggatcgccctggggagccaccaggaggtgtaccacccgggcgccctcaaggcggcgttcgctgagttcatctccaccctcatcttcgtcttcgccggccagggctccggcatggccttcagcaagctgaccggcggcggcccgacgaccccggcgggcctgatcgcggcggcggtggcgcacgcgttcgcgctgttcgtggcggtgtcggtgggcgcgaacatctccggcgggcacgtgaacccggccgtgaccttcggcgccttcgtgggcggcaacatcaccctgttccgagggctcctgtactgggtggcgcagctgctggggtccaccgtggcgtgcttcctgctccgcttctcgacgggcgggcaggccacgggcaccttcgggctgacgggcgtgtcggtgtgggaggcgctggtgctggagatcgtgatgaccttcgggctggtgtacacggtgtacgcgacggcggtggacccgaagaagggcagcctgggcaccatcgcccccattgccatcggcttcatcgtgggggccaacatcctggtgggcggcgccttcgacggcgcgtccatgaaccccgccgtgtccttcggccccgccctcgtcagctgggagtggggctaccagtgggtgtactgggtcggccccctcatcggcggcggcctcgccggcgtcatctacgagctgctcttcatctcccacacccacgagcagctcccctccaccgactactaaaagccgaagccgaccgacccaggggtgcgcagcgcagcgcagctagcatccagcgctctctccccgctcgccgccgtttagtttctctcgtgcacgtgcatgcatcgtagactgtctcaggccgccgctgcgccggcgccgctcgcatcgtttgcttccttggaccagcagtcgtcgccgtcaggctgaactgcttgtaaccgtgaattccggacccgtttgcttctgtaagatttgtgcatttgcctgagt

SEQ ID NO: 13739 - DNA, 1360 bp, Zea mays
  Clone ID: LIB143-037-C6_FLI
atccagctctcccagcgcgctgctcgactcgactcgacttcctctgcaacgcgtgtccggtgtaggctgagagagtgagtgagaggcgagatgaggagcgggcggctggcggtggcggtggcggtggctctggcgtgggcgttcgcggcgtcggcggcggcggcggcgcagaagtacaatgccatcttcaacttcggcgactccatcaccgacaccgggaacctctgcaccaacgggaggccgtcgcagatcaccttcacgcagccgccctacggcgagacctacttcggcacgccgacgtgccgctgcagcgacggccgcgtcatcccggacttcctctgctccaggttcggcctgccgttcctgccgccgtccaagtccacgacggccgacttcaagaagggcgctaacatggccatcaccggcgccacggccatggacgcgcccttcttccgctcgctcggcctctccgacaagatctggaacaacgggcccatcagcttccagctgcagtggttccagcaggtcacctccgccgtgtgcgggcaggactgcaagagctacctggccaactcgctgttcgtgttcggcgagttcgggggcaacgactacaacgccatgctgttcggcaactacaacgcggaccaggccagcacgtacacgccgcagatcgtgagcgccatcgcggccggcgtggagaagctgctggccatgggcgccacggacgtggtggtgccgggggtgctccccatcggctgcttccccatctacctcaccgtctacggcacctccaacagcgccgactacgacgcgctcggctgcctcaagaagttcaacgacctctccaccaaccacaacgcccagctgcaggcccagatctccgccctccaggccaagtacaagtcggcgcgcatcatgtacgccgacttctactccgccgtctacgacatggtcaagaaccccggcagctacgggttcagctcggtgttccaggcgtgctgcggctcggggggcggcaagtacaactaccagaacagcgcgcggtgcggcatgtcgggcgcgtccgcgtgctccagcccggcgtcgcacctcagctgggacggcatccacctcaccgaggccgcctacaagcagatcaccgacggctggctcaacgggccctactgccgccccgccatcctccacagctaagctaagcgaggggagggcgattaattttttattgttgccatgttatttatacctgtgtttacgttgccgggaaaaaagtgtcccggcagctgcatgcatgtgttgcctcttgtaacttgttatactggtggtcttcatttacaaatcaaatggtatagatttttcatgg

SEQ ID NO: 13740 - DNA, 1144 bp, Zea mays
  Clone ID: LIB143-037-C9_FLI
tcatggggaaaagaccagtggtctagttaagcacacgggcgctagttctggtattggtttggcttccattgtcatttctcttagatgctggagtttgtggccaatttatttgcggaaaggggaaaaaaactttcaggtcttgtgcttcactaccatgagggtatttgttacttcccagtgtaaaatttgcataagtagtttaggtggtgtttgaatgcgctaaagctaatagttagccgctaaaattagctgaagacttccaaacagtctagctaatagttcagctattagctacttttagcaaattagctaatagttgctagctaattccactagtaatttttttgtcaactaactattaggtctagtgccttcaaacacccccttagtacatcctgttttgaataaatgttttcacctgatcatcttttattctttctctcgtttgttgtcatatgtgttcgtgaatgattaggctgtagacaatggagcaaactcttttcttcttcttcttgccagcaatatttgtaacagtacggcttccaaagctatatatatagtagtacaggctttggatgctttcctgcttgatgactcaccagtcatcataccgcaaagtgcagtttgaggaggctctcaacacaccggatcccaaggaaggccttcaaagactgattgatccggcgctcggcgaggattaccccatcgactcgatcctcaagatgacggtcctggcaagggcgtgcacgcaggaagaccccaaggcaaggcccacgatgagatccatagtggtggcgctgatgacgctgtcgtcaaccagcgagttctgggacatgaacgcgatccaggagaaccaaggtgtcgtgaacctcatgtccgggagatgactcctgtccctgtggtatatattattgtacgtcctacctgccttcccctgggcaattgtacattagggcccatttgtacgcggcccgttgacggccagagaggagggccactgtaggtatttacaatgtacacgagggttttctcccgtgtttaggctccctttggaacaaaaggaaatttcctgaacctgtgttttttgctgtattttttaactaatttctatgaaattcttatagcattcatgtgaaattcctgc

SEQ ID NO: 13741 - DNA, 908 bp, Zea mays
  Clone ID: LIB143-037-E8_FLI
gaaactcgcacgcacgcactctcttccccccctcctgcccactctccaacgcagcacaagcatctagcaaagctgcgcagcgcagccagcaagcaagcttggtccggagagacaacagatataagccagccagagagcagcagacggaggcatggcgacgtccgtggcctgcgccttcttcttcgacgcggagccgctgggcgagcccgggcggcacgcgctggacgcctgcgcgctctgcgccaagccgctcagccgcaacagcgacatcttcatgtacaagggcgacaccccgttctgcagcgaggactgccgctatgagcagatgcaccacgacgcggcgtacgcaaggcaggcggccagcagccggcggaagcagcagcagtcgcagcggagcagaggggcctcgtccgtgggcgccaaggcggacgtgtccgtggccagctagtcagtagtagtaaaagcaagcacagcgaggccgagaaaagaggaggaggagaagaagaaggccgtgctggttcaagcagcgctacagctgcaagagatcccgttgtggggcggcgctccgctccgctccgcagctctcctggctggccgcgaggggcgctgcgccgcacaacgagtttcgtgcgcgaaacagaggcaagcgggggtggatggatctgaagaccgaagaaggtgacagatcgaacctgatctgcgggttggaagcttaaaccgacgccatacgtgctctgctccccttgtttatgtgttcacctgacgggaatcgggatcttctgggctgtgtgtgtgctagagcttgaggcgtgggggtgtcaggtgtgtgcgggagcaccatcggcctgtaataactgtacgaatcattccagcatatgttatgtgctagccctgaaattttgatcgca

SEQ ID NO: 13742 - DNA, 1096 bp, Zea mays
  Clone ID: LIB143-037-F10_FLI
cgacaactaaaaagaaacggagggagtgctaatttgtgaattcttctacagtctgatgaagatatggaacttgaacaatttcactggtgtcattggagtgttcaattgtcagggagctggacagtgggtttggccagttaaacaaactgcttatgttcctaccaacataaacataactggtcagctctcaccgtccgacgtagaatctctcaaggagatagctggtgatgactggaatggggagactgcagtatatgctttcggttcatgtaaatatttgttggctgactgtttctttctaacaatcccatcgtaccactatactatcagtgactgattagccatctgttttgtctcccaggttctctttcaaggcttcagaaacaccaaagtttggaggtgtcactgtctactatgacatgtgagatctacagcatttcaccaataaaggtcagaacttcagattactttccactccctcccttcttacatgtattccacattgtaaatattaagtttttacagacattctttgcttcttgcaccagattttcagcgaagtcgtccagtttgcgcctcttggactgatcgacatgttcaactccggtggtgcacttgacaatatttcaagcgttgcagattcttcagctacgacagttcatataagatgccgaggaccagggcggtttggggcgtattcagacaccaggccagagctttgcagagttgatgaacacgaagtggagttcactcttgcagaggatggcctcctgaccttttaccttcccccttcttcctcccaggacaacctgagacacgttgagattgtctacaaagcatcatgaacgacatttacccttatgattcttacgctccagcatgcaatttctggcgtgctcttcagtaaccaccacacatgcacattgacatgatgtaacaaagaacccattttgttggatttgactgtgtatgctgtgctgcaaatacctgttttatacgattgttctgcacctggactgctataatttgattgacatggtatagcttttttagataaaagatggacatggtatttgaattattgagatccattttt

SEQ ID NO: 13743 - DNA, 1220 bp, Zea mays
  Clone ID: LIB143-037-G12_FLI
tggtcgtcttctccacgagaccacgaccgatcaaccccaatcgtagggaactgggaacccggacccagatctcccctagatcctcaatcccaatctgccctccgccgtatcgatcatacctcccgatgcgaccccaagtctggtcgatgcgagtagcggcggcgatttagcgaactgcgcgttcgctagggttagggtttcgagggtttgcgctagggtttgggcgcacgatggggcggtcgcgaggggtgcagaattccggcgacgacgacaccgtacacaggtcgaagcggaggagggtcgcatcgggcggggatgcgacggactccgtttccgctggcatcgggggagctggagaaggagggggcaagaaagcgctctaccactgcaattactgcaacaaggacatctctgggaagatacggatcaaatgctccaagtgccctgacttcgacctttgcgtggagtgcttctctgttggcgctgaagtcaccccacatcgcagcaaccatccttacaaagtcatggacaacctgtctttcccacttatttgcccagattggaatgcagacgaagaaattctcctccttgagggaattgaaatgtatggtctgggaaactggcttgaagttgcagagcatgttggtaccaagtctaagttacagtgtattgatcattacacaacagcatacatgaactcaccttgttatcccctaccggatatgtctcatgttaatggcaagaacaggaaggagcttctagctatggctaaagtgcagggtgaaagtaaaaaaagggacttcactgttgcctggagagctgactcctaaggctgaatctccattttctccctccagggtcaaggtggaagatgcacttggagaaggtctagcaggtcgatcaccttcgcacatagctgttggtgcaaataaaaaagcttcaaatgtgggacatattaaagatgggtctaatgtatcaaaagttgaagatggtcatgtcgatagaagtgttggtgtgaagaagcccagatattctgcagatgaaggcccttcgttgactgaactgagtggatacaatgcaaagagacacgagtttgacccagagtatgataatgatgcccgaacaagcgcttgctgagatggaatttaaagaaactgattcagaaactgatcgtgaactgaaactccgtgtgctgcgtatttatctgtccaggcttgatg

SEQ ID NO: 13744 - DNA, 696 bp, Zea mays
  Clone ID: LIB143-037-H1_FLI
ggcgccccatctctcaaaccatccgaacccccctcgccgctcactcccaagctaatccccgccggcagcgatggcccgcacgaagcagacggcgcgcaagtcgacgggcggcaaggcgccgcggaagcagctggcgaccaaggcggcgcgcaagtcggcgccggccacggggggcgtgaagaagccgcaccgcttccgcccgggcaccgtggcgctgcgggagatccgcaagtaccagaagagcacggagctgctgatccggaagctgccgttccagcggctggtgcgggagatcgcgcaggacttcaagacggacctccggttccagtcctccgccgtggccgcgctgcaggaggccgccgaggcctacctcgtgggcctcttcgaggacaccaacctctgcgccatccacgccaagcgcgtcaccatcatgcccaaagacatccagctcgcgcgccgcatccggggcgagagggcctgagcacccccggtctctactgcgattccttcgcttcctgatttctgtagcgggaagaactactgtagtaggcgaggaactactgcgtgttatattggggttgtgggtaggaaactaggaatgttctgttggtttcgatgcagtgccccccgtgatactgacatccgtgctgcttgttctgttcttcctactacgaatgcgattgttactattatttt

SEQ ID NO: 13745 - DNA, 809 bp, Zea mays
  Clone ID: LIB143-037-H11_FLI
tcggagatgaccaagaacgtgaaggccctcgacgagcaggaggtcacctcgcagcactcgcgcgcccagaccagcgacgccgccgaggaggagcagcagcaggcggtggatccgctggcgcggcagtcgtccatcatgtcgctgacgctggaggagctgcagaactcgctgtgcgagccgggccgcaacttcgggtccatgaacatggacgagttcatggccaacatatggaacgccgaggagttccaggccgccacggccggctgcaacaaagagggcgcggagcgggagccggtgcccgtggcgacgacgacgggcacaagtgagaatggaggaggaggaagtgggaggggactggttcggcaggggtcgttcgcgctgccgccgccgctgtcccggaagacggtggaggaggtctgggccgagatcagccagggcccagcggaattccaggccagcgcagcgccgcagcccgtggcgcagccccaggcggggagcggcggcggcggcgtcgcggccagcgggcggcaggcgacgctgggcgagatgacgctggaggacttcctcgtgaaggccggcgtcgtgcggggcgccttcgccggccacggccacggcgtcggcatggtcccggccggcccgatgggcatgcagcacaacgcggctcctcccatgatgtaccaggtggcggcagcggcggcgccgccgcccggcgctgtatacccggtgatgggcgacggcatggggtaccacggcggcgggtaccccgggggcgtggcggtggtgccgcccccgccgccgtctcagtgcgt

SEQ ID NO: 13746 - DNA, 1055 bp, Zea mays
  Clone ID: LIB143-037-H4_FLI
tgaacgcggcatccttcctttcctcctcccttctgcccccatttcgttcctttcacaccggagaccggcgagcagagccgcgcacagcagaacgcggaagcaagaggaggcgatcgactactcgaccagccctctccgctcttgtctccgatggcggctcgcgtcctcgcggccctcgcccttgccctcgccctcgccctcgtcgccgtacccgctcccacgcgggcgtccaacgacgagggggacgcgctctacgcgctgcggcagcggctgtcggaccccaacggcgtgctgcagagctgggatcccacgctcgtcaccccctgcacctggttccacatctcctgcgaccaggtcggccgcgtcgtccgcctggacttgggcaactccaacgtctccggctccatcggccctgagctcggccgccttgtcaacctcaaatacctggagctgtacaggaacaaccttgacggcgagatccccaaggaattgggcaacctcaagaacctgatcagcttggatctgtacgccaacaagctcacgggaggaatccccaagtcactctccaagctcgactcactcagattcatgcgcttgaacaacaacaagcttacaggatcaattccaagggagtttgccaagctctccaacctgaaagtcatcgatttgtctaacaatgatctctgtggaactattcctgttgatgggcctttctcaacctttcctctccgaagcttcgagaacaacagcaggctcaacggtccagagctacaaggattggttccttatgattttggatgttagatgccgatcaacaatgtaccaccttccccagttgaaagggggaaagccaagatagtattatcaatagaaacctagcttcaagaatgtcgtgactatatatatgtatgtattaagacgagatttgataagggtggcatagcaagtcctgatattctgtgtgcattcagaatagctgcttttatgcccttgtgttgatattttgcaaaccaaaacaaactgttctgaaacgagggcacatattgttcatgaat

SEQ ID NO: 13747 - DNA, 1854 bp, Zea mays
  Clone ID: LIB143-038-B10_FLI
gtcgcccacatgtgcggcctcagcctcaagggccgcggggccatccccttcctcgagtccctcgtcgtcgccgacgtcgccgcgctcagggacggcaccggcaccctcaccgtcttcaccaacgagcagggcggcgccatcgacgactccgtcatcgccaaggtcaccgaccaccacatctacctcgtcgtcaacgccggatgcagggacaaggacctcgcccacatcgaggcgcacatggaggccttcaacaagaagggcggggacgtcaagtggcacatccacgacgaccgatcgctgctcgcattgcaggttgatgaatcataagagacttaagagagacttcaatgctgtttagttgtatcactagttgatttaggtatcaaacattggtgcttgcttgatagtagctaaatcaaatcttgattacttcagagtgccttctttgcttcacttgattggtttatcttaggtaacagttgagcaggtctgactgtccttttcttggtcggtggaagtaaagcttcctccatggtcttgcttttgtggttaagaaatgcctggtgttcactgtaaaaacattcaattccaatgtcctgtgaaattgttaatgcaacacatggaactgggttcctggtgaactttttttttaaaaaaaaatttaaacctgattcatggttcacaaatcgtagtttcttcatggggtaggtagctagttgttgacactgctaatcatgggtggactcaatctgcatgatccgtatatgtttttttaccttcaaatctatactctccctaagcatatcatgtaacagaagcatccaactttcactttaatggcaagttgaaagttcatttctagagtcctgatgtgtaccaggttccaagttcataaaagggcagcattataacttgtttattgatgcaaatgtaagcagggtcctcttgctgcacctactctgcagttgctgacgaaagaagatttgagcaaaatgtacttcagtgacttcaagatgattgacatcaatggatatgcatgctttctgacgagaactgggtatcacttcgattctttatcgccattatttgagcagtattgtaaggattgtcttatttcttatttcagctacaccggcgaagatggttttgagatctctgttccgtcagagaatgcagtggatcttgcagaggccatcctagagagatcggaaggcaaggtgcggctgaccggcttgggcgcccgtgacagtctccgactggaggcaggcctgtgcctgtacggcaacgacatggagcagcacatcacgccggtggaagccggcctctcatgggcgatcggcaagaggaggagggcagagggcggtttcctgggcgcagacgtgatcctgaagcagctccaggaagggccaaagatcaggcgcgtgggcatggtcacgcaggggccgcccgcgcggagccacagcgagctggtgagcggctcgggggagaggatcggcgaggtgaccagcggagggttcagcccgtgcctgaagaagaacatcgctatgggctacgtgaagtcgggaatgcacaaggctgggacggagttgaaggtggtcgttcgcgggaagtcctacgacgccgtggtcaccaagatgccgttcgtgcccaccaagtactacaagccctcgtagattatattcttgtacagagggacgccttgcgtttctcttttgtcgttgcggcttgttcttggcagattggttaagcattgcaactgtaacttctgtgagattgtcttacggttcacatttcatgtatgcctgcctaataagccttcttttcccaaatacaaagcatgcatgtgcctatgtg

SEQ ID NO: 13748 - DNA, 1642 bp, Zea mays
  Clone ID: LIB143-038-B5_FLI
ccgtttgaggagaagccaatcgccagaagcggcaagccttgcctcgcgcagcggtctggttcggttgggtgccctcttcgccggtggccggaaggcgagggggaagccggaggacgctgagggcgggcgaggccgccgtccccagatctcacttccgccgcccgcccgccccgcttttgggattgagagaggaaggaaggaaaggaggtgcttcaatatgaaggcgctcattcttgtcgggggtttcggaacccgccttcggcctttgactcttagcttcccgaagccccttgtggattttgcaaacaagcccatgattctgcatcagatcgaagctttgaaagaagttggggtcacagaggtggttttggccatcaactaccgcccagaggtaatgattaatttcttgaaggactttgaggataaacttggcatcacaattacatgctcccaagagactgagcccttaggaactgctggccctcttgctctagcaagggacaagcttgcggatggatctggcgagccattctttgtcctcaacagcgatgtcataagcgaatacccatttgctgaactcatcaaatttcacaagtctcatggtggtgaagcaacaattatggtcactaaggtggatgaaccatctaaatatggtgttgtggttatggaggaggcaactggcagggtggaaaggtttgttgagaagccaaaaatatttgtgggcaacaagatcaatgctgggatttacttgctgaacccatctgtccttgaccgcattgaactgaggccaacatcaattgagaaagaggtcttccctcaaattgcagctgatcaacagctctatgcaatggtccttcctggtttttggatggatgttggtcagccaagggactacattactggattgcgtctttatctagactcgcttaggaagaaatcggctgccaggctagctgctggagcgcatgttgttggcaacgtgctggtgcatgagagcgccaagattggagaaggttgcctgatcggtcctgatgtggcaattggacctgggtgtgttgtggaggatggcgtgaggctttcccgctgcactgtcatgcgtggtgtgcgtatcaagaagcatgcctgcatctcgaacagcattatcgggtggcactcaactgttggacaatgggcacggatagagaatatgaccatcctgggcgaggatgttcatgtgtgtgacgaggtatacagcaatggcggtgttgttctcccacataaagagatcaagtcaagcattttgaagcctgagatcgtcatgtgagagttctccagttttaactacagtacattcttaagttcttcgactaagtgaggattgcagatccccttttataagtgatatctattggtatctttggcctaattcaaacagcttcagacatgttcgcttgctaaactgttgacgatgtatccttgttctttgttgaaaagttttgtacttgtagtgtcaatcatatttcacaagtggttgtcatatatactgagggaggttttggacccttgatctacagaagttcaatacaatagtagcaagaataagttatttttttttaaaaaaaatgttgtccaatgtaactttcagcaataatgtttgtgtgct

SEQ ID NO: 13749 - DNA, 476 bp, Zea mays
  Clone ID: LIB143-038-C11_FLI
gcagcgaagagtgactccggcgggcattctctgctggtacaccaataatcgaggagcagctagcgtgcgagagacaacagagccagaggccgcccggccggccagtacagagaaccaagctagtgccaaaccgacagaacacgcctgtgatcggtaggtctacaccaccgacacttggccatgagcacggccacggacgccgtcccggtcgccgtggcgccggcgaagcgcccgcccatcaacaagtacgccttcgcctgcgccctgctcgcctccatgaactccgtcctcctcggctatgacatctcggtgatgagcggcgcgcagctgttcatgaaggaggacctcaagatcacggacacgcagatcgagatcctcgacggcgtcatcaacatctactcgctgttcggctccctcgccgccggcctcacctccgactggctcggccgccgctacaccatggtgctcgcggccgc

SEQ ID NO: 13750 - DNA, 1273 bp, Zea mays
  Clone ID: LIB143-038-E1_FLI
gagcagtctacaatggctcacagtcacagaagcagtatgagcttctgcttggtgtgcatcgtcgtcatggcggcggcggcggcgttgttgcaacccgcatcttctcagcaggcggtgccggacatcccgaacctgaaggtgggctccaacgatcgcagcacgactctcaagtgcaccaacatcaagagcaacaagaccacctgcagcgccacctgcaacgcacgctgccctcacaagtgcctcatccagtgcccaagctgcaagacattctgcttgtgcgacttctatcccggcgtgtcctgcggcgacccacgcttcacgggcgccgacggcaacaacttctacttccacggcaagaaggaccgggacttctgcatcgtctccgacgccgccctccacatcaacgcgcacttcatcggcaagcgcaacccggccatgagccgcgacttcacctggatccaggcgctgggcatccgcttcgcgcaccaccacctctacgtcgccgcccagaggacgcccaggtgggacgccgccgccgaccacctggcgctggccctcgacgacgaggacgtcgacgtcgcgtccctgctgccgcgcttcgtcggcgcgcgctggtccccgcccacggcgccggcgctgtccgtcacccgcaccgcgcgcgtcaacaccgtcgtcgtcgagctcaggggcgccttccgcatcgtcgccagcgtagtgcccatcaccgccgaggactcgcggatccacaactacggcgtcagggaggacgacggcgacaccctcgcgcacctcgacctcggcttcaagttctacgacctcaccgacgacgtgcacggcgtgctgggccagacctaccgcccggactacgtcaacagcctcaacgtcacatccaacatgcccgtcatgggaggcgcgccggactacctctcctccgacctcttctccaccgactgcgccgtcgcacgcttcggcggacgccgacaccagcaagccaccgccgctaatattgccatgctcaccgacgacgacgacatggaatgaataacaaaggacacgtcgtacgcgcgatcgacgactttaccgtaccatttcattaccatctccgaggatatcgatccatcgttgtgtgtcttctacactagctagtgaatgaagaagcagcaataaacccattgaaattatatattatatattcaacaaataaggcttataaatacatatgcatgcatgtatactcctaattatttaattaaatactcctggttttattttt

SEQ ID NO: 13751 - DNA, 917 bp, Zea mays
  Clone ID: LIB143-038-E10_FLI
ggaggacaaccattaatcagcaggctttggggccaaaagaaacggagaggagaaaagcgggggcggcaagcaaccacgggcggagctcggagcgtcctcctcctcccgtctataaattcccctccttttcttcctccatatataggggccatcagatccaagaagagggaagagcaccaaggaccttcggcgcccgttcaggatccacatcttcccgagcgagttcttggttgacctcttcctcttcggaccacctccaaggctcttggtgtagcttgccactctcaccaatcaagttttcatgtctgatctcgacattcagatcccaactgccttcgatcccttcgctgaggccaatgctggggactctggtgcggcagcagggtcaaaggactacgtacacgtgcgcatccagcagcgtaatggtcgcaagagcctgactaccgtccagggattgaagaaggagttcagctacagcaagatcctcaaagatctcaagaaagagttctgctgcaatggtacagtggtccaggacccagaacttggacaggtcattcagctccagggtgatcagaggaagaacgtctcgaatttcctcgtccaggccggcattgtgaagaaggagcacatcaagattcatggtttctgagcaaccgccgggtccatagcaaaccaaccctgcatgcagggccagcttattatatataatatctgaggtggagcatatctatctggctgtgtactacaagcaggcctagtacgccgcctgcgcgttcctcctattacacataacacatatagccccctccctgcgtgtatgcttgttgccgtcgtgtcgaatcttgtactacgaggctccgtcgaacctcgatggcttgcttctttatcagaacatgtttgaataaacgctatttggt

SEQ ID NO: 13752 - DNA, 1079 bp, Zea mays
  Clone ID: LIB143-038-F10_FLI
cccacaccgggcacaccccccgagctcagcttagctccactccagctccaatcacagtcgtgaccagagcgcgagagctagctagagggccgtgaaaatgccgatcaataggatcgccctggggagccaccaggaggtgtaccacccgggcgccctcaaggcggcgttcgctgagttcatctccaccctcatcttcgtcttcgccggccagggctccggcatggccttcagcaagctgaccggcggcggcccgacgaccccggcgggcctgatcgcggcggcggtggcgcacgcgttcgcgctgttcgtggcggtgtcggtgggcgcgaacatctccggcgggcacgtgaacccggccgtgaccttcggcgccttcgtgggcggcaacatcaccctgttccgagggctcctgtactgggtggcgcagctgctggggtccaccgtggcgtgcttcctgctccgcttctcgacgggcgggcaggccacgggcaccttcgggctgacgggcgtgtcggtgtgggaggcgctggtgctggagatcgtgatgaccttcgggctggtgtacacggtgtacgcgacggcggtggacccgaagaagggcagcctgggcaccatcgcccccattgccatcggcttcatcgtgggggccaacatcctggtgggcggcgccttcgacggcgcgtccatgaaccccgccgtgtccttcggccccgccctcgtcagctgggagtggggctaccagtgggtgtactgggtcggccccctcatcggcggcggcctcgccggcgtcatctacgagctgctcttcatctcccacacccacgagcagctcccctccaccgactactaaaagccgaagccgaccgacccaggggtgcgcagcgcagcgcagctagcatccagcgctctctccccgctcgccgccgtttagtttctctcgtgcacgtgcatgcatcgtagactgtctcaggccgccgctgcgccggcgccgctcgcatcgtttgcttccttggaccagcagtcgtcgccgtcaggctgaactgcttgtaaccgtgaattccggacccgtttgcttctgt

SEQ ID NO: 13753 - DNA, 1356 bp, Zea mays
  Clone ID: LIB143-038-H3_FLI
cgaagttttgtgggctgaccatcagtcttccaagaggaggttctgccgaaattcccttctctcatcatcacttctccaaggccaagcagtcctcctggtcctgccgaagtgttctctgaacaagagggcatgcatgcactccttcttgtccctgatgttagactagctagctagcactagcagagactgaggccgcagcgtctgttgagaattcagatgttgttgttgctcgtcctgtccgagcacctcctcctgtccggatttatgatcggttccgccataacccgcctcgtccagtccttctctgtcgttttcctctactggttctatgtcttctcagtgagctgccactgccagtagtgccagtagttgatctcacctttttcaagttaataactcggcactataacaaagaggtagctaggtatatacctgccaaacaaacaagagggagtgaaaaaacttcagattacgcctcagtttgtgagctagaggtgaccatgtcaagtggaagctcgtttgggtcgagccagtggactcagagatccaggtcggcggaggatgacctggacctggacctccaggccgagatggagaagaggaggaaacgaaggaaggagtccaaccgagagtcggctcggaggtctaggctaaggaagcagcaacaccacgacgacctcacgtcacaggtagaccagctgaagggccagaacaagcagctcaacttggcgctgagcacgaccagccaaaacctcgtggcagtgcaagcgcagaactctgtcctgcagacccagaggatggagctggccagcaggctgggcgccctgaccgagatcctctggtgcatcagctcaagcaccggcactgctgctcctcctacaaacccagccatggtgaacggcggcgtcacgacgacatggagctggagcgacgcctctggtgatattcttggcgccagcgcatggaaccaccagcagcagcagcccatagacgcgtaccggtgctattattagctagctctacaagctagctagagagaaggcggtggtagggccaggaggaaaggaggcttgttgcttcgccatcgtttgttttggaggcgacggcgacgttttgttggtagagcggaggagcctaaaggacggacaatggcaactttgccttggctttctgtgacgtgaatgcagcgcagttgttctcttgtagttgaggagtatatatataggaaataataatattgggccagatagtgaaagagaggtaggtgatttgaaagctcttcatatatatgtataagggaaattatatgcgtaatgatgatgataaaatgctcattaagatgtcgatttgatggtt

SEQ ID NO: 13754 - DNA, 1236 bp, Zea mays
  Clone ID: LIB143-039-B10_FLI
acactgagctggtctgtttagttggaaagccatctgtacgtttttcgccgatcatggaggatgagaggaacacccagcagcaccagggcggtgagcaggcccaggaccaggagaacgaggtgaaggacaggggactcctggacagcctactcggcaggaacaagcacgacgaccaggagaagaagaaccagcaggcggaggaggagctggcgaccggcatggagaaggtcacggtggccgagcccgaccacaaggaggagggacacgaggccgccgagaagaaggacagccttctcgccaagctgcaccgcaccagctccagttccagctcgtcgagcgacgacgaggaagaggaggtgatcgatgagaacggcgagattgtcaagaggaagaagaagaagggccttaaggagaaggtcaaggagaagctggcggcccacaaggcccacgatgagggcgaccaccaccagacgcccgcgccgcccgtggtggtggacacgcatgctcaccaccaggagggagagcacttcccggcgccggcgcctcccccgcacgtggagacgcaccaccccgtcgtcgtccacaagatcgaggacgacgacacgaagattcagaccccaccacaggcaccggaggaggagaagaaaggcctgctggacaagatcaaggagaagcttcccggtggccacaagaagccggaagacgctgctgccgccgccgccgcgccggccgtccacgcgccaccgccggcgccgcacgccgaggtcgacgtcagcagcccggatggcaagaagggcttgctgggcaagatcatggacaagatacccggctaccacaagagctcgggtgaagaagaccgcaaggacgccgccggcgagcacaagaccagctcctaaggtcgcagcgtgtgcgtgtccgtcgtacgttctggccggccgggccttgggcgcgcgatcagaagcgttgcgttggcgtgtgtgtgcttctggtttgctttaattttaccaagtttgtttcaaggtggatcgcgtggtcaaggcccgtgtgctttaaagacccaccggcactggcagtgagtgttgctgcttgtgtaggctttggtacgtatgggctttatttgcttctggatgttgtgtactacttgggtttgttgaattattatgagcagttgcgtattgtaattcagctgggctacctggacattgttatgtattaataaatgctttgctttcttct

SEQ ID NO: 13755 - DNA, 1715 bp, Zea mays
  Clone ID: LIB143-039-B6_FLI
ctcatgatctccggatcctgcgatcaggctgacgccggcaggggcgacttccaggagctcgaccagatcgccgccactaagcccttcgccaagctcgccgtcaaggcaacaaccatcgccgacatcccgcgcctcgtcttccaggccctcgccgccgccgtgtccggccgtcccggagggtgctacctcgatatcccgtccgacgtcctccaccaaaccctccctgaatccgaggccgcggctctcatagcagcagcagccgccgattcggccgcatccgatccttccccgtcaatgcacaagtctcttgacgagggaatcgccaaagctgcggacctgctccggtgtgcggagcggcctctggttgtgattgggaagggtgcggcgtatgcgcgcgcggaggaagcgattcggaagctggtggacaccacgggcatccccttcctcccgacgccgatggggaaaggggtcgtgcctgactcgcatccactctccgccacggcggcacgctcactcgccatcgggcagtgtgatgtggctctggtcatcggtgctaggcttaattggttgcttcactttggcgagccacccaagtggtccaaggatgtcaagttcattcttgttgacgtctccgaggaggagattgagctccggaagccacacgtggggattgttggggacgcgaagagagtaactgagctgatcaaccgggagatcaaggacaatccattctgcttggcaaggtcgcacccatgggtcgaagcgatcaccaagaaggccaatgacaatgttcttaagatggaggcgcagctagcgaaggatgttgtgccattcaatttcatgacaccattgcggatcatccgggatgcaatccttgccgaggggagtcctgctccagtagtggtatcagaaggggcaaataccatggatgttggcagggctgtacttgtgcagaatgaaccaaggacaagactggatgcagggacatgggggacgatgggggttggattggggtactgtattgcggctgcagcagctgaacctgaacgactcgtggttgctgtggagggcgattctggattcggcttcagtgcaatggaggttgagacgttggtgaggtaccagctgcctgttgttgtaatcgttttcaacaacaacggtgtctacggcggcgaccggagaagccctgacgagataaccggaccatacaaagatgacccagccccaacctcatttgttccggcagcagggtaccataagatgatggaggcttttggagggaaagggtatcttgtggagacaccagacgagctcaaatctgccctttcagaatcgttccgcgccaggaaaccagcggtgattaatgttatcattgatccttacgccggcgcagagagcggtcgaatgcagcacaagaactgaaggcgttgggcttttgtaccataccatagcaggatgcagatgcgacttgatacaaataagcagcaaccgtcaatcaatccttttgtttcttttttacgacctcgcttcgttgttcgtggtacagacgtggggcgcttttaattggaagtcccatttgaaggcatgtgaatgtgttatgattatctaaatgccaaactttaaaggcgtgttgatgaggatgtgtggaaaacctgtgcccatatatgagccggtataattatttctcaaagtaataaagtcagtgttttagggtc

SEQ ID NO: 13756 - DNA, 869 bp, Zea mays
  Clone ID: LIB143-039-C2_FLI
ctttaaataaaccggcgtctcctgccctggcggggacgccgctgctgacagggcacctgatcgattgatttcctcgggcagtcagcggcgctcaagagtcacgagcttactggttgtaagcaacgatcgacgaacgaaggggtgtagggagtggaagcaagaggctcagcgttctgttcatggagagccgcaaggaggagcaggcggcggtggggtggatgacggtgccggcgttcggggagtgggacgtgaagaacggcgccgtgccggactactccatggacttctccaagatccgcgagatgcgcaagcagaacaggcgcgagctctcccgggccagcctcggcggcggcgacgacgacgacgacgacctactccagaagaagcagcagcagcagcaggaggagggaagcaaggcccagccgcgcaacaagccctccgccgccgtcgcggacgacgcccaccgtcgagcgctgcacgacgactcccctacggggaggaagaagttcctgagctatttccagtgctgtaccagagcgtgaagaaaactcccaagacttgttcttcctctgctgcgctgcgcaggtagctgcatgtttgggtttccttctgtaatgtatgtaaagcatgtctgcgtagttaaagtgtgtgatcctgtcacccatgccaagcatgagagaggggaggaacgcccatggctcacagcttctagtgcagtgtggtctgagaaaaaaagattggatctgatgaagaagggtgtggcttgtgtgtttttgtttgttgctgtacgagattggatgcacttgagatgatgtattgacgattgtccatcttgttcttcctttttcacctctttattcattgtatgc

SEQ ID NO: 13757 - DNA, 982 bp, Zea mays
  Clone ID: LIB143-039-C4_FLI
tgcctcgtgtggccgtcgtctcccgttcggaacgccaagccccccctccggcgaaatggcccccaagcgaggtggcagggcgccggtgccggccaagaagaagacggataaagtgacgaaccctctattcgagaagaggccgaagcagttcggcatcggcggcgcgttgccgcccaagaaggacctgcaccggttcgtcaagtggcccaaggtcgtgcgtatccagcggcagcgccgcatcctcaagcagcgcctcaaggtaccaccggcgctcaaccagttcacccgcaccctcgacaagaacctcgctacgaacctgtttaagatgcttctcaagtaccggcctgaagacaaggctgccaagaaggagaggcttctgaagagggcccaagctgagaatgaaggaaaaactgttgagtcgaagaaaccaattgttgtgaagtatggccttaaccatgtgacttacctcattgagcagaacaaggctcagcttgttgtcatcgctcacgacgtggatccgatcgaacttgttgtgtggcttccagccctgtgcaggaagatggaggtcccttactgcattgttaaaggaaaggctcgccttggatcgattgttcacaagaagaatgcatcagtcttgtgtcttaccactgtcaagaacgaggataagcttgagttcagcaagattttggaggctattaaggcaaacttcaacgacaagttcgatgaggtcaggaagaagtggggaggtggcatcatgggatccaagtcgcaggccaagaccaaggcccgggaaaagctgctcgccaaggaggctgcgcagcggatgacctagattgtctactgctgtgtctgccctgtagtttaacggggaagaactgatgaactcgtattgtggttttccgaatctagtttcatatgtttctgtccaccagaccatgtttagaagctttgcaagacagagtttacagtgtttatgtgatgc

SEQ ID NO: 13758 - DNA, 420 bp, Zea mays
  Clone ID: LIB143-039-D1_FLI
ctagctcacttaacgccgccgcggagctgctccgcgcccccgacgccggtgattaggagcaggagcaagaggggttcggaatggccaagtctaagaaccacacggcgcataaccagtcgttcaaggcgcacaagaacggcatcaagaagcccaagcgccaccgccagacctccaccaaggggatggaccccaagtttctgaggaacttgaggtactcaaggaagggcaataagaagagttgtgaggctgagtcagaggagtgagatgatgcctgagtttgtggcgacaaatgcatctcttgtatcgttagggtcttagttgtgaacttaattttcacatctgtatgattaaaagagattcatcaattggtactgaagtgttgtttttttgtcttgttgcctatctggagtttatttaact

SEQ ID NO: 13759 - DNA, 995 bp, Zea mays
  Clone ID: LIB143-039-D7_FLI
tcccttgcttcccccacacggtgtctccttctctgattgcagttgtggagcagcagctgtcgttgtcttccctggcttctcccatggccgcctatcccccatcccctccaccgtgccctctcatctcctagcccctctgctcgccaccatcccctatacccttgctagcagcatggcgctcatcccttcctgatgtgagctgcacatgacgtctccagctctccattgatggcagctagctgcgccctcacttcctcccatggtgagatcgcccatggtggctcctcctgctcggcgtactcccctctgcaggagctcgcccagcccctctctgctaggaacagcagcacctccctccatggatgcctagttgttgacttgtgcaattcatagtcatcggtgaggtccctttgtcttatgctacttatctccttaatcgatatatgtggtttgtggttgattgtgagtatgtgtgtgcttatgtgtgagatgtgaggggaaatcccaggatttagtggagaagaagcacagtccaatatgacgcccgccgggtgttcgacgaaatgggagaccaaggaactgtcgtcgttcttgcaagaaaaatcaagtcggatcatgatgtggtacgttatttgatcgcacgatgtggaggaaaagtgttggattaacctcaaagtgatgctgacgaataaaccagaggaatggatgatctgatcaagtgccaggatggaagatgctcaccaagtggtcatcatctaacaacacttagtgttatcccaggttataattttgttctgttgtggatgctgctaagtgccggtgggctcggccttcttatataagtatatcccatctttagcttctttattgaggattgtcacttaagctagcatgtattttaaaacttataaatgttttatacattcaaattgtaatctttttgaatcaatttcttttgtaaccaactccgatgatatatattgtaatcttgctat

SEQ ID NO: 13760 - DNA, 1519 bp, Zea mays
  Clone ID: LIB143-039-E2_FLI
ggcctccaacgcgaaccccttggtggccgcctccagctgcgcgaatgtgaactctccatggggtccttgaacgatgacgatccgctccgcttccgcgtcatcacacgcgacagctgccatcggaataggatgcgcgcccgcgacccgtacggtttgtgacttcaaaaataatagcaagaagcctcgaagacattcttttggataaagttaggaaagtaccatgcatcccactttcagatggttcatttacctctatttcagatggtcgtatatggttgccatatgatgttgccaattccattcctgaatgcagtagcattccgaattttctagctctatatggtaatcttcgaactgtaagtccaaaccttctccctgcatgctgcaaaaataaatatctcatggaggaagtcagaataaatgatctagcagacatgctccaaaggatcggggtgcggaagttgtctgggcatgacattgttaaaaatcacatcatggtgtccttgcgtaacagtttagatgctaatgtggctgatatagtgattagagagtatgtgagctttattatggttcatcttcagtcttcttgcaccagctgtaactttgaaagaggagagatagtgtcagaactacggaagagtcctatcttccttacaaaccatggatacaagagcccagctgatgaaccaattcactttagtaaagattatggaaatttcggcgatgctactagactccttcagaatgtagaaataagttggattgaacttgatagtacctatttgcagcatcatggttcacagtcgtcatcatttgcactggaaaaatggaggcaattttttgaagaaatgggtgtgactgattttgtgcagagcagttgaatcatcatttatgaagtgcattcaaagcttcaaatggatagcatcaagaatggatgaggatcttcattatgcaacagatttattctatgattgtgaaaatgtccgctctctttttggtagtgtggctccatatgttgtatcgcaggtatctagcagttcacttaagaaggccattggattcaaaacagaggtatcttactgtgatgcattgatggtcctgaagtcttgcataatgtcaaaggttccctttagagcaagtatgagccatatgtggaaattctataccttattgtctgaaggcgtggcagacgcaaagattgacattaaacgggagttcatgtcgtctccctctatatttacaccactacagcgtcctcgggcaagtggaagagactttgttaaaacgaactaaagtgtttctctgctcatattccagtgtttatttataacatgcctttgttttattattttggttttttaaatgtcatgcttatatcctggtttggatatccagtttaaagacatctcatctattggacgctccatcactagttgcaatagacaaaactcagaggcaattacttatctcaatcttacttctacatttatatttccctcttgtgttttaccttttgctt

SEQ ID NO: 13761 - DNA, 1617 bp, Zea mays
  Clone ID: LIB143-039-H1_FLI
ggctcaggaaaaacaacggcggacagcccgcctccaccgccgtggcgccgttcaccccgccccgcgttctctctccctcggcgacggctcgacgaccgccgcgccgccctacgctccagcctccatgtgcttcgcggggcccttcgccgtcgactaacacaccaccaccaccatgtacgaccgccccatctcttcccttcctgctctacgaagcctagcaccaaaccctaactgtttgttttattcggatttgttccaaactacaaatgtggtgtatgtagtattgtgtccactaactttgctctcttttttttccctttttctttttgcaaaaaaacatcgggtgtacatgtgttcacccgtgccgtttactgggtcggcagtcggccggcacctggcccaagggttgagcatggagatcacgaacgagatgcttaagagactgccgagactacaatggcagaatttgttctatggactttcacagcaaggctaccaactatctcgtgacagctagcgatgatgaatcaatccgtttatacgatacccaagatgcagtgtgtttgaatactattaatagcaaaaaatatggggttggacttgtgtgcttcactgataacccatctattgtcttatattcatcgaacaatggctgggatgaatctctgcgtctgctctcaatgaatgataaccggtttattagatattataaaggtcaccttgatagggttgtctgcatcgcactttgctctggaaaagaaaactttctctcatgttcgcttgatcgtaccattctcttatgggaccatcgggctgaaaaaccgcagggcttactgcgcgcgcaaaggaggcctacagtttcgtacgacgcccagggcatggtatttgctgtcgcctatggtggccgcataaagatgtttgatattcggaaattcggaatggggccttttgcgaccttctctgtcggcactgatgattcggaagcccatgtcgtacagttcagcggtgatggcaggcggattctgttaaccactaaagctgggcgtgttcatgtgctagattcttttgaaggcaacagcattgcatcgtttcgcgcgaagccaatattaaccaattcgacactggaggcatcgttctgtcccgagggaaaccatatcgtatctggctccggtgatggtagtgtctatgcttggaacgttgagagcggaaaggttgcatgctgggaaagcacagatgtgaaaccgccgcgggtaaggtggtctccaggatccttgatgttcgtgacaggaacgtcggagctgtcctgctgggtgccggatttgtccaagctggagtccttcaccatcagccacaccaacaccaggtccagctcgtccctgtaggcttggaccgatttgcatgccgtgtggccggttgacgcgaaggaggaacaagaaagcatagcggagcatcttgtaccaattgagtttgtgatctgttcctgatggcccggtaagctactattgcaacgattgtggtcttgcggcaacgctgcgcgttgtttctgtagtgaacatgaactgtgcagttaattggttactttttcaaagaaagatataaagaaaatacagctctctt

SEQ ID NO: 13762 - DNA, 636 bp, Zea mays
  Clone ID: LIB143-039-H2_FLI
gggccaaaaggtctgatataccactttacaaaggagacgagctttttaaaaagctgccccaacagttgggttcaaggcctgcaagtgacatcagctaacaacagcttcacacagttattttgtcaattctaaatttgaggctgtgttgattcatttgttgagctgatttttgtcgaattttgattatacgctgaggacaaacttcggtaaggtgtacaaatttggctcgtggaagaggcttcagaatgcaatggagcggctgacaaagggaactgactactggtggtgatgaaaacggcttgggtcttcgggggctagtaatgacaattgtacagatatgggacacaacgatacatacacttgtattttacggtagagtttgttagcttgtgtttagggaataaaaacgtaaatagatacagattcttttcgcactgcggtatttttttaatccctgactatatgttaaccatcttcatttacttccagctgcctgagggtttagctgtagcggtttgcgctgtcagaatttttacattttacagcaatacgaggcccagttccctaatgtagtggttccaaaccacatcgaattttgttgaacatttattttcggatgtcagttttaattgtgag

SEQ ID NO: 13763 - DNA, 1867 bp, Zea mays
  Clone ID: LIB143-040-A12_FLI
gtccggtgattccacaaaatttcaactgactgttttctgaagcattgcaaaattatgttattactatgaagtccagtgaagaaactacttttgtgatgactactcatgtcacttttgaattgttacacgtggttaggggaggaaacctcttggaggttgtagttctgatgggtggtatggtagggtgatgggctttgttgctggcaactcgtgatggtttttccagccttggtgaacattggcagtggctacagcttgggcaggggctggtggcagcgcaaaggagagtgagagggaactttaaggcaaaaacacttttctggttaatccatatggatacatccaaaagatgttatatatatgatccacccttcttaattcaattcaagctttcgccacaaagctctcttattctctaatactgataactttttggcggccccgaattggaggggtatggaggttgcagcatgctagccgtaccctctggttgctgcaacatgtagatgtaggtggtggctactgcctcttgggttcagctgggctgcttggcccatgggcattatgccaaaaacataaatgtgtaaaagtgtacttacagaagacataaatggccaaaagggggagctatttggtgccttgaaataaataaaataaaaaatatgttctttggcttctgcctactatttaaaatttacaaatgatttgcaggtgagtcattagaagatgctttgaggcaattatacctcattgatgcaattgatgaaaacggacaaataacggatgttggacgagttatggcagagcttcctcttgagccgtctctttcaaggactttgattgaagcaaatgaattgggatgcctatctcaggcgttaactgttgcatcgattttgtcagcagaaataacattgcgatcagttagcaaggacgtggtggatggaaagaggaaaaggcaggagctccctgatgggtctggctggggtgaccatatacaattgcttcagatatttgaaagctgggaccaaactggctatgacacaaaatggtgctctcatcatgatttgcaggtgcggggtatgaaattgagcaaagatgtgaggaaccaactatgtcagattattcaaaaaattgcaaaaggttcaactgatgtggatgcaaggaaaagccggaagaatgaccctgattatagaaagctgaggagagctctctgcgtaggatatggtaaccagctagctgagaggatgctgcatcacaatggctaccatactgttggctataggacccaacttgtacaggtgcatccatcttctgtactggaaggcgatgagtatggaaagtttccaatgtacgttatttatcatgagctgataagtacaactcgtccatacatgagaaatgtctgcgccgtcgagcaagcctgggttcagcctatattaaagaagctcgacaaattagacataaacagattaagtggtggttcgagtgcaccgggagattctgaacttctgggagacaataagcaagtgaactcgtcaaagaatgacgtgggtgtaaaacaatcagaggtggacagtaaaatccaggcagctcgagagcggtaccttgcacgaaaaggcaagaaatgacaatcgacacgtttaactgatcgctcagcatccttctggtcagcctgaagcttctctgaagatcataccgaggaaccattcgtgttattgtgggtggtgtatgcttcaacgtgcacaaacaagagaatttcttatgtaatcttttgtttgaggactctaaccttttcttttatttggcattactgtgatgtgaccttttccttgggccgaaatattttacaggcttttctgcatgggct

SEQ ID NO: 13764 - DNA, 1439 bp, Zea mays
  Clone ID: LIB143-040-B1_FLI
gcacaccgcacacccaatacggaaagaccaccgcaaacgccaccacgcccacgcctcgccgcgcaccacatctgaaacctccagcccgacgccggcgccggcgccgctgctcgcctgctcgtcacatttcctggtgcccgccaagccccgcgacctgggctccccagctccatccatcaaccgcctgcagccgcggaaatggcagcgccgacgacgctgcgctcggcggcggcgcgggcgcgcgcgcgcgcagcggagctcgtgagagggcggtggccgcagcggcgtctggggacgacgtccgcggcggagacggagagcaaaaagaataaggaggaggaggaggagggggccgggtgggagctctcggcggcgcgggagtactacgactaccgcaagtctatctacggcgacgtcacgcaccgcgccctcctcgtcgacgccgtcggcaccctcgtcgtccccgcccagcccaccgcgcaggtgtataagagcattggtgagaagtatggagtgaagtactcggaagacgagatcctgatgagataccggcgggcatacgagcaaccatggggtggatcacgtctcaggtatgtggatgatgggagaaccttttggcagcacatagtcacttcttctacaggatgttcagatgcacagtactttgaggaactctatcaatactttatgacagaaaaggcctggaagctttgtgaccccgatgccgaaagtgtatttaaagctttgaggaaagctggcgttaaaactgcagtcgtctccaatttcgatacccgtctacggccactcctgcaggccttgaaatgtgaccactggtttgatgcagttgcagtctctgcagaggttgcagcagagaagccgaatccaataatattcttgaaggcctgtgagttactgggcgtgaagcctgaagaagctgtgcacgttggcgacgatcgtagaaatgatatatggggagcgagagatgcaggctgcgatgcttggctctggggcagcgacgttcgctctttcaaggaggttgccgagcggatcggtgttgaggtgacgaagtgactaagtgagctaggatggtgaatatacggaggcagaggtagtacccaggatcgcggtcgtcaaggaagccagtgaccccatccttgtggtgaaattcctgtgctggtttgtaggcttgtagctgtatgtatgacaacttattagggttccgttgaacctgctatgcatgcatgcttgctgccctgacagtgacaggcgaatgcgtcccatgcacttgaatatgagggtctgggttctggacttctgggactcttgagttattgaattattgtcgcctagttagacacaaagttatctgccatgcacttaaaaattgaaggtctggaattctggattgttgtctaatcagacaaagttatctgagcaac

SEQ ID NO: 13765 - DNA, 643 bp, Zea mays
  Clone ID: LIB143-040-B7_FLI
agagagcactgactcgtctcccttctcgtctccagcgacggcgaaggcgaagcggaggagcgggagcagaaacagaagaggcagccatggccgtgatggagaagctcaagatcttcgttgtgaaggagcctgttgtcgcagcttcctgtctcatcgccggattcggtctctttcttccagcagttgtccggccaatcctggattcatgggagaccgcagaaaaagttcctccaccacctctaaatgatgtggttgcgggtgtcaccggcaagaaaaagtagtgaacttgcattgttttctcatgtcgatgctgtcccacattttcttccccatgtttttctggcgtccagattggaaggctctccaaagtcacggtctccaaagtgacagcttgcttgattttaaacagtatcgacagtgttttgtctctacacagattgcagatatagcggtttaaacagttcgctttaatccgaaacgaacaggctattttacctgaatcatatactgcaatgtgtcagttttagaattttccccctaaaacaaaggttgatagaatgtcatcagcaccttttgaattgtgttcttcgttaccaacttaccataattctcagaagctattaaggggtgattgtttcaactt

SEQ ID NO: 13766 - DNA, 775 bp, Zea mays
  Clone ID: LIB143-040-B9_FLI
agcacccctgatctctcgtccctctcattcgtaacactactacagcaagaacacaagctaggcgcggtgggtacggtgcaagtgagctagcagctctaccgccatgaggccagcagcagagttcccgaccatgagccacggcgcgcccatgggtgcgaacgcgaacgtgcctcactccccgtggcagtcgccggtgccgtacctgttcggcgggctggcggcgatgctggggctcatagccttggcgctgctcatcctggcctgctcctactggaagctgtccgggtacctcgacgccgaccgcggccagcgggccggctcgtccggagaagcgggcgccgacggggagaagggctcggcggccggcgcggccaggccggcggcggggttccaggagcacgtggtggtcatcatggccggcgaggagaggccgaccttcctggccacaccggctgccagccgtgcggtcgtggagctcggggccgcgccgggctccggcggctcggccgaggcgcccgaggaggaggaggcccacgtggacggcgacggcggctgcggcgactgtgagcacgaagtgccccggctcggagccgacgccggcaccgtgagccggagcagtgaaggcaccagcagcgcgacgacggcgctggctgagtgatcgctcgttttttctcttcgcatttttctcctgctggagtggtgtgttaggtttagcttgtagttgtatattcttgacttgattggttcagactgagggtgaaattaaagaaacttc

SEQ ID NO: 13767 - DNA, 970 bp, Zea mays
  Clone ID: LIB143-040-C12_FLI
cagaagaaaatgcaacgggcagtgcaggccgtcaggtcacacggcaatgttcttaaatatgctgttctacaacacatcagcgctcccaagccagcaatgcttcctgctgccttttctcgtttcatgtcagtttcatctgctcgcctagaggatcgtggatttgaaactgccactgtagcagatgtcttgaagtctaaagggaagagtgctgatggatcttggctctggtgcaccacagaggatagcgtctatgacgctgtcaaatctgctacctttcggtaccttaaactttttgcagatgactcagcacaacgtgggagctttggtggttgtcaaacctggacagaataaatcaatcgctggcattgtcactgagagagattatctccggaaaatcatagtgcagggaaggtcttccaagtcaactaaggttggcgacatcatgactgaagagaacaaactgatcacagtgaatcccgacaccaaggtcctgcaggcaatgcagctcatgacagaaaaccgcgtcagacacatcccggtgatcgacggcacggggatgctggggatggtctccatcggcgacgtcgtgcgcgcggtggtggccgagcacagggaggagctgaaccggctcaatgactacatccagggaggctactaggacggcgtgtgcagcgacgaccccctccgatcccgccagtcagtgaagtccgcctttgaaatccaataactcggaacaatgatgatgacgaaataggccgtgttttcttggacaatgatgttaagttcggcaaggttttcctttctctttttttattctactgcgtggtctatgtgtatattgccaaaggcatgcgtgagccatgcgcccggtgctggggcgcagagaccatctgatggtggaaacaccggaaataagagcgtgccgctgtgtgtttcctttgaaggaataaaaatggtgttcgtgttgtgc

SEQ ID NO: 13768 - DNA, 1617 bp, Zea mays
  Clone ID: LIB143-040-E3_FLI
gaagaagggtgagaacgcaatcttcactattccgccgggtcttgcctacggcgagatgggttcaccgcctaccatcccgcccaatgccacactccagttccatgttgagctcctttcttgggccagcgtcaaagacatatgcaaggacggtgggatttttaagaagatcatcgttgaaggggagaagtgggagaaccccaaggaccttgatgaagtttttgtcaagtacgaggtaaggctcgaggatggaactgttgtgtccaagtctgatggtgttgagtttgctgtcagagatggttatttctgcccggcactttcaaaggctgtgaagacaatgaagaagggcgaaaaggttctcctcaatgtcaagccacaatatggcttcagggaagaaggaaaaccagcgtctggagatgaagctgcagtgcgtccaaatgctgtgctgcatatagatcttgagctggtctcttggaagactgtgatgcttatcggagatcacaagaggatcttgaagaaagttcttaaggaaggcgaaggctatgagggtcctaatgatggagcagtagtgaaagtgagatttattggcaaattggaggatggtactgtgtttgtaaagaaagggcatgatggtgaagagccttttgagttcaagacagatgaggagcaggttattgaagggcttgacataacggtagttaatatgaagaaaggagaggttgcgttggctagagtaccacctgaacaagcatttggatctgtagaaacaaatcaagatcttgctactgttcctcctaattctaccgtcttgtatgaagtggagcttgtttcctttgagaaggagaaagaatcttgggacttgaagaccaatattgagaagattgaagcagctgccaagaagaaagatgaagggaatgtgtggttcaagatgggcaagtacgccaaggcctccaagagatacgagaaggctgcaaaatacatcgagtatgacagctctttcaatgaggatgagaagaagcaatctaaagctctgaaagtcagttccaagctcaacaatgcagcctgcaagctgaaaatgaaagaatacagagaagcagagaaactttgcacaaaggttctggaacttgagagcacaaatgttaaggccttgtacagaagggcgcaagcatacattgagcttgttgacctagagctagcagagttggatgtgaagaaagcactggaaattgatcctgataacagggatgtgaagctggtgtacaagaccctgaaggagagaatgagggagtacaacagacgggatgccatgttctacggcaacatgttcgcgaaatggaggaagcttgaacagctgcagaaggtgcccgggaagcaggaaccgcaacctatggccatcgacagtgccgcataagagatttgcgcccctttgacatgccccttagttagtgtgggaccagaggagaatctccttagtaaaatgtttatcatatgttaatgtctgtcatcttgcatttttctttttcctgctaccatatgtattctgcctcatgcgtgtaatgtttcgtcgtctactcatgtaattttattgcggtgtcattgtataatggacctctgtgtgct

SEQ ID NO: 13769 - DNA, 598 bp, Zea mays
  Clone ID: LIB143-040-F6_FLI
tacgatctgacgctcatcccacatcagtagtcgaccaagcacaagcagcagagccggccggaatatgtggacgatcaggaaggtggcgacgccgcaggtggccgtcctcctgctgctcctcatcgtcgttgcgcaggaggcggcgccgttggcggaggcgcgcgtgtgccggcgccggagcgcgggcttcaagggggtctgcatgtccgaccacaactgcgcgcaggtgtgcttgcaggaaggctacggcggcggcaactgcgacggcatcatgcgccagtgcaagtgcatcagggagtgctagctagctagcagctataccggcctttaattaaattaataaggatcgacgtcgcggtcggtcgctaaatatgtactactatacgtctacactacatgcaataatgcaccacatgtacgcgtacgcgcgccgagctgtgtggacgccgcagctagcacggccatcgttcctatacatcgtcgtctgtcgttcgagtactcatgagctgcgtcgtcgtcgtccacccatgcatcccatccgccaaactttgatgatggtcatatgacatcttgacaataaacacgtgcatgcagtatt

SEQ ID NO: 13770 - DNA, 896 bp, Zea mays
  Clone ID: LIB143-040-G1_FLI
gaacagccaagaacagagatacccaagtcaccgaagcaaccgctcacaatcccaatctcccgcgtcactcaaaacccgaagtaacaaccgtcggtccgaccaacaatgtcgctgattcgccgtggaaacgcattcgaccccttctccctcgacctctgggaccccttcgagggcttcttccccttcggctccggcggcgtccgcagcctcgttccctcgttgccgcgcaccagctcggagaccgcggcatttgccggcgcgcggatcgactggaaggagacccccgaagcgcacgtgttcaaggcggacgtgccggggctgaggaaggaggaggtcaaggtggaggtcgaggacggcaacgtcctgcagatcagcggcgagcgcaacaaggagcacgaggagaagaacgacaggtggcaccgggtggagcgcagcagcggcaagttccttcgcaggttcagactgccggacaacgccaaggcagaccagatcaaggcgtccatggagaacggcgtgctcaccgtcaccgtgcccaaggaggaggccaagaaggccgacgtcaagaacgtccagatcaccggctaggaaggaagcacgcgtgcgctgtggagtttgaaacataactgttcaagcatgggtgtcctactacgcgtcttatgtaattttgtgtagtgattttccgttatgtactcccgttgtgtgcagtgatttctgttatgtggtctgggagggtgtccggcgtgccaccgttgcgtggagccgtcaagtacttaatgcatcgtatctttgttgcatggtgtgcgtttataaatgaaaacctaatacaatctgttctgtctatttcatcaagatttatgacggaatccagagactgatctagtgatttgtactacaat

SEQ ID NO: 13771 - DNA, 531 bp, Zea mays
  Clone ID: LIB143-040-G4_FLI
cctcttcctcctcttcctcctcctagcacagctagcgcctgctccccttcgtctgtgatcatgtcttgcagcagcggcaagtgcaactgcggctccagctgctcctgcggcagctcatgcaactgcatgtcccctgacgtggagaccgccgccgccagcagcatcaagaccatggtcctcgctgcgccgaccaccaaggccagcgccggcggcttcgaggcggccaccgagggcggcggctgcgactgcaacacctgcaactgcggcaccagctgcggctgctcctgctgcagctgcaactgagccggcccgcccggcccggcgatggcgcacgagagtcgagaggacgacgacgacgaggcgtataaatataatagcagcgtctaaataagatcctgtcaactgcacccgccattatcgatccatggtcgctcctggggttcatgttcatctgtgtaacgtgctcgcggtcatgtccgtctcgtgccggaattaatatttatatgcatgtatttgtgtttttctgcgttg

SEQ ID NO: 13772 - DNA, 810 bp, Zea mays
  Clone ID: LIB143-041-B12_FLI
cccaactacccccagtctcggaagagaactatccagaagcgcaagactccaaagccgtcgccttcctatccatcccttcctcgccacgggggtcgcctgagatcacataaacaatggtgaaggctgttgctgtgcttggtagcagcgatggtgtcaagggcaccatctttttcacccaagtgggagatggccctaccactgtcaccggaagtgtctctggcctcaagcctggcctccatgggtttcatgtgcatgcgcttggtgacaccaccaatggctgcatgtcaactggaccacactacaatcctgcgagcaaggaacatggagcaccagaagatgagaaccgccatgccggtgatcttggaaatgtgacagctggagcagatggtgttgcaaacattaatgttaccgacagccagatcccactgactgggccaaactcaatcattggcagagctgttgttgttcacgctgaccccgatgatcttggaaagggtggacacgagctcagcaagagcaccggaaacgctggcggccgtgttgcttgtgggatcatcggactccagggctgaactgaaacgaatggtcgctggacttcgggggcgcctgggagtgccgtcaccactcaccagcaggctagaataacatcccgagacatcgtgaaataataataataagagcgcctgatatgtgatcagtggtgtactcgccattaagcacctgtggcaaccgatgagctgaactgtgttggactgttggataatgctggttcgcctgagcatgtgttacaagtctgtcggttttgatggc

SEQ ID NO: 13773 - DNA, 1684 bp, Zea mays
  Clone ID: LIB143-041-D1_FLI
gccggttccgctacggagtagggtaggccggggggcacccgcgatggggccggacggcggaggggtgatcggggccgtggtctacggggcgctggcggtgctggcggtgcggctggtgctgtcgtacaagtcggcggcgcacgcgctgcggcgggcgtggcggtgggcggacgagcgggcgcaggcgtaccagcactacgaggtgccgcgcctcgccgcggacggcgcggagaacccgctgttccggaaggcggcggcgtacgtggcgtcgctgccgtcgctcgaggacgcggacgccgcctgcgtgctctcgtcggcggccaagagcaacggcttcgcgctgcgcctggggccgggccacgccgcgcgggatgcgttcctcggcgcccgcctcgcgtggaccagcgccggcgccgaccgcctcgtgctgcgcgtgcgccgccacgaccgcacccgcgtgctgcgcccctacctgcagcacctcgagtccgtcgccgacgagatggaggcgcgccgccgcgagctgcggctctacgccagcgccagcgccagcggagccggtccctcgccggcgccgcggtggacgtccgcgcccttcacccacccggccacgctcgacacggtggtcatggaccccgagctcaaggcgcgcgtccgcgccgacctggagagcttcctcaagggccgcggctactaccaccgcctcggccgcgtctggcgcaggagctacctgctctacggcgctcccggcacgggcaagtccacgttcgcagctgcgatggcgaggttcctgggatacgacgtctacgacatcgacctgtcccgcgccggcgtcggcgacgacctccgcgccctgcttctggacactaccccgcggtcgctcatcctcgtggaggacctcgaccgctacctgcgggacggcgagacggcggcggcgagcgtgctcggcttcatggacggggtctcctcgtgctgcggcgaggagcgcgtgatggtgttcaccatgagcggaggcaaggacggcgtggacccggcggtgctgcggccggggcggctcgacgtgcacatccacttcaccatgtgcgacttcgaggccttcaaggcgctggcgagcagctacctggggctcaaggaccacaagctgtacccgcaggtggaggaagggttccaggccggcgcccgcctcagcaccgccgagctcggcgagatcatgctcgccaaccgcgggtccccgagccgcgcgctccgcgccgtcatcggcgcgctgcagcacgtggcgccgtcaccgcagccgcagcggaccctcgccgcggcacggccgccgaggctgacgtcgagatggtcggggcacttcgatgaggccagcgccgcgacgtcggaggccagcgggggcgcgggtggtttcgccaaggacgcgccgatcagggagatcaagaagctgtacggtctgatcaagtaccggagccgcaaggacgccggcgtcgtgccggtggacgacagcgcggcgtcgcagaacgggcggggcagcgacgttagctacgagaaggaccggtgatgagtttatctgggctttgctctctctcctctcttttttttttgttcttcttcctgttttcacttttgatactgatttctaagtacttattcttgtttattcgaaacgtcggggctgtacattgtgagt

SEQ ID NO: 13774 - DNA, 1025 bp, Zea mays
  Clone ID: LIB143-041-D12_FLI
gcacaagtggtttgtgacttgtcaagtgttcttccggaaaaaaaaaaagaaacacaaatggacgctcctgcggcggcggcccagggttgcggcggcaagcacatcgtgctcgtccacggcgcgtgcctgggcggctggtcctggttcaaggtggccccggcgctgcgggaggtgcccacgttccgggactacacggggccgctgctggagctcctggcgtcgctgccggacggggatcgcgtggtgctcgtgggccacagcctcggcggcttgagcgtcgcgctggccgccgagacgttcccggacaaggtcgccgccgtggtgttcctctgcgccttcatgcccgactgcgcggcgcggccgtcgcacgtgctggagaagttcgtggaggggaagtggctggagtggatggacacagagttgaaaccccaggacggcgaaggcaagctccccacctctatgctgttcgggccccggatcatccgagagaagttcacccagctctgctcgcccgaggacgtgaccctcatgacatctctgcttcggccgagttccatgttcgtggaggacctggtgctccagcaaccctacaccaaggaaaggtacggctcggcgcgcaaggtctacgtcgtgtgcacggaggaccacgccatcgcggaggggttccagcgctggatggtggagaacagccccgtggacgaggtcagggagatcgtggcggaccacctcgtgatgctctccaggcccagcgacctggtgcgctgcctcgctgacatcgccgacaagtacgcttgacgacgctacgctcttcagcgcaattcgcccgcgtgctgttctcattttgccgcatttcagtttaatatttccccgctgtttccgaatcgagattggccagaattctcgacgcacggtgtgaaatcgtgtataataataataataatgctattgatgttttctaatatatagcaggtattttgtaacacttggttttaaggataaaactgaatccattagtacgtgtgctc

SEQ ID NO: 13775 - DNA, 440 bp, Zea mays
  Clone ID: LIB143-041-F6_FLI
gtatcgaatggtgagattgtgcacttcaaagttgcttttaagccgacaccatctatcggggtgaaacagaacactgtgtcaagggagcgtcagaacgttgagcttctggcaagagggcgccatgacccatgcgtcgcccctcgagctgttcctgtggtggaatccatggccgcgttggtcctcgtggaccagctgatggcgcacgtggcccagtgcgagatgttcgcgctcaatgctgcacttcaagaaccagttggctctttctagcagaggcagagcacacctgatgagctcgcgccaaattttatcatttatcatagtaataagtagctcaagcgtggcttggtttgcttgtctcttgcaccgtagttttgttttttttccccccgcaagtgtgatgcgatgaagtgaataaggcacttggtttcctgtgcatttgt

SEQ ID NO: 13776 - DNA, 884 bp, Zea mays
  Clone ID: LIB143-041-G2_FLI
atattatctcaaaaaaaagtcttgagtcccccctctccttccccttcccaacgctctcgctgcagaggaaaggcgaagatggcgatgaccgtcgaagtgcttgctgcactcgcgttcatgttttccacgagtattctactgcagatactggcatgcgctttgtacaacaactggtggcccatgttagcagctctcatgtacgtccttgtaccaatgccatgcctgttttttggtggtggatccacacacttcttgaccagcagagaaggtggagggtggattaatgctgcaaaattcttgactggtgcgtcggccatgggaagccttgctattccagcaattctgaggcacgctggcttaatcgagaccggggccatgttcatcgagttcacgtccttcttcatccttgtatgcacagtgctgtgcttccatagggcgactctggatgaagactggtaaatgcgcatttcaccgtcaccctgaaccctagcggttcttggctgcttctgtccatgctaagaaaaattcctgttggaagctaacatggatctgtacaaagaagcgtatttcgagcgtagccgtagctgatgtcttatgtagacacttgtgaagattatgtggtcatgtggcaatgcagatgttattaccttcactttgactttgtcgtcacatgttctatggtgaaggaaggaatcatccgtgtaaaccatggtcagggcacgccctacttggctcctaattctatcgcaggctttggggttaacctattatgaatggaataataggatcttgatgaccgaaagaaaagggagagctaattagtcacatggctcggtcgatgtattttttttcatatttgcattcatgaatctgtctaggatatt

SEQ ID NO: 13777 - DNA, 824 bp, Zea mays
  Clone ID: LIB143-041-G9_FLI
cgcaccacaagcgagcgagggacccggggcggaagaagagagagaagacgtctctctcctctcggcgtccccgttccccaacctctcgtctgctgcctgcctgcctgcctgcctgcaaaaaggagtttgtcatggcgtctaagcgcatcctcaaggagctgaaggacctgcagaaggacccccccacatcatgcagtgcaggtcctgctggtgaggacatgtttcattggcaagcaacaattatgggaccacctgacagtccctatgctggtggtgtttttttagtgaacattcatttcccgccagattaccccttcaaacctccaaaggtttctttcaagacaaaggtcttccatcctaatatcaacagcaatggaagtatatgccttgacattctcaaagagcagtggagccctgctttgacaatttctaaggtcctgctctccatctgctccctgctgaccgaccccaacccggacgaccctcttgtcccggagattgcccacatgtacaagacggaccggccgaagtacgagtcgacggcccgcagctggacgcagaagtacgcgatgggctgacgaacgctttcctgctcgtccacccgactggcgtctcaagaaagtcgttcctgggcgccattgttcccttggatttgttgttggtcgtcgtgtgtatccctgatccatctaggatcatcgtattgtattgtagtgtatgtatatcgtcggcctaccatcgttgccattcaccatagtgaggtggttggacatgcttcgcctatatgcacctgtgcttgccgtccttcgggtcggtgctctttggtt

SEQ ID NO: 13778 - DNA, 712 bp, Zea mays
  Clone ID: LIB143-041-H6_FLI
cgcacgagctcgcccgagatggcgaacgcgagatcgggtgtcgctgtgaacgatgagtgcatgctgaagtttggcgagctgcagtcgaagaggctgcaccgcttcataactttcaagatggacgacaagttcaaggagatagttgtggaccaggtcggggatcgcgctaccagctacgatgacttcacaaacagcctccctgagaatgactgccgatacgcgatctatgatttcgactttgttactgcagaggatgtccagaagagcaggatcttctatatcctatggtccccatcctccgccaaggtgaagagcaagatgctttacgcaagctcaaaccagaaattcaagagtggcctcaatggcattcaggttgaactccaggccacagatgcgagtgaaatcagcctcgatgagatcaaggatcgggcacgctaggcgcaccgccatcgcgagtttcatgatcacgcatcatggactcgcctactactgtggatttgtatgccattatagacttggtgctgcgaaagactgctttggtgatttgtgggtttgttgctgtgtaaaaagatcctcatggcttccagaagaccatgaaggtttggatctatcatgtaattccttgttatctgccaattatgtatggactatggacatgtgttgcgctgttcaactcactacaaataagtaatcgatatattccctacccatg

SEQ ID NO: 13779 - DNA, 918 bp, Zea mays
  Clone ID: LIB143-042-D8_FLI
cagcaacagccaacacctaaactaaagaacagtagtagtccctgtgtacgtctagcaacgatccgcaccgagctcgccagttttgctcgttagtttggggacggcgatggcgtccggtcaggaaagcagggaggagctggcgcgcatggccgaggaggggcagaccgtcgtccccggcggcaccggcggcaagaccctcgaggcgcaggagcacctcgccgaagggcgcagtcacggcgggcagacccggagtgagcagctgggccatgaggggtacagcgagatgggcagcaagggcgggcagacccgcaaatagcagctgggccacgaagggtacagcgagatggggaggaagggcggcctgagcaccatgcaggagtccggcggcgagcgcgccgcccgggagggcatcgagatcgacgagtccaagttcaggaccaagtcctagatctgatgcgtgcccccgcttagcatgtagtacgtagctgcaggaatgtagtgtcgtcgtagtagtagggtagtcgtacgacgtgccgctcctcgtttggcacgtgtgccctgaataatgtagtgctgtcagtcgtcgtcctagcacgcgtgtaggagaccatacgtgcgcgtatgatcatgcgtgcttcgcttcagttaggttctgatgttggtcgtcgtcaccgtgtttgaagcaggcaggtctcttcaggctttgtcgtcgtagcagcctgtgttctagctctacgaccccatactcatagcgtgtggtggtgggtcgtgatgccttaaggtctccgagtttgtatccgtgcttgtttcgttaaggtagtttggttcataactcaaatcttctctcacttatgttcgactacattttgtttggagtctctccgttcatatacaagaaagggaaggatgtagctagct

SEQ ID NO: 13780 - DNA, 976 bp, Zea mays
  Clone ID: LIB143-042-G12_FLI
ctgtctctgtctccactctgcagggcttccggaaggtcgatccggaccggtgggagttcgcgcacgtgtccttccttcgcggccagacgcatctcctgggccagatcgtccgccggagcagcggcggcaagcgcaaggacgacggcaacggcgccggcgccggctccgccgacgacgaggacgcggtggccatggaggtggtccggctgaggcgggagcagcgggccatcgaggagcaggtggccgcgatgtggcgccgcgtgcaggagacggagcgccggcccaagcagatgctcgcgttcctcgtcaaggtcgcgggcgacccgcaggtgctgcgccgcctcgtctccggcgccgggggcgacgccgtgttcgccgccgcggagccggaggacggcgcgagcatcaagagggcgcggctgcttctcgatgccggaagcggcggcgacggcgccgtcgacttcagcgggctctatagcacaaccgccggaagcgaagacgacggcgtcgggttcggcagcgattacctgcagccgccaccgccgtacgtgttccccgtcaacagcggcggctactgactgatggcggtctggtagtccagcatctatccgagcgatgtggcgtgcttcgtcgtcgttagttgcccctcccgagtgacgtgttggactgaagtggcaacggcgccgacggacggtgagcaaccaacccaagataattagctaggaggtggtacaaagtgtaaagcctttggtttaggcaggtctgcggtgatctttaatttgcttgttgcaatgttttccttccctaccttgtcaagtgaatgctacggatcagcggcggcaaaagccgttagctgcagctagtttgccgctgctcttcatacagctgcacgccgttaaaacacatctcctttgcactggctgtcttattttttagttgttgagctggtgtaagcaaccagaaaagcttgacagat

SEQ ID NO: 13781 - DNA, 599 bp, Zea mays
  Clone ID: LIB143-042-H6_FLI
aagcaacaaggcagcagcacaagcaagaaccacacctcctcccttcgcctgtgatcatgtcgtcttgctgcggcggcaagtgcgggtgcggctccagctgctcctgcggcagcggatgcaacggctgcggtatgtaccctgacgtggagaccgccgccaccagcagcgtcaagaccacggtcctcgccgcgccgaccaccaaggccagcgccggcggcttcgaggcggccaccgagggcggcggctgcgactgcaacacctgcaagtgcggcaccagctgcggctgctcctgctgcagctgcaactgagctggcccggcccggcgatggcgcacgagagtcgagaggaggaggacgacgacgaggcgtataaatataatagcggcgtccagtaaataagatcctgtcaactgcacccgccattatccatggtcgctcgctcctcgcctgcgtctcctggtcctggggttcgtctgaacgtcctcgcggcttcacgacggcgatgccgcctccgtcgatcctgtccgtctcgtgccggatttaatattagatctatatgcgtgtttttctgcgttattactacatctacatgtgtctgtc

SEQ ID NO: 13782 - DNA, 916 bp, Zea mays
  Clone ID: LIB143-043-A12_FLI
agcaccctccacctggtgctccgtctcaggggtggtatgcagatctttgtgaagacactcactggcaagacaatcacccttgaggtggagtcttcggataccattgacaatgtcaaggccaagatccaggacaaggagggcatcccacccgaccagcagcgcctcatcttcgccggcaagcagctggaggatggccgcaccctggcggattacaacatccagaaggagagcactctccacctggtgctccgcctcaggggtggcatgcagatttttgtgaagacattgactggcaagaccatcaccttggaggtggagagctctgacaccattgacaatgtgaaggccaagatccaggacaaggagggcattcccccagaccagcagcgtctgatctttgcgggcaagcagctggaggatggccgcactctcgcggactacaacatccagaaggagagcacccttcaccttgttctccgcctcagaggtggtatgcagatctttgtaaagaccctgactggaaaaaccataaccctggaggttgagagctcggacaccatcgacaatgtgaaggcgaagatccaggacaaggagggcatccccccggaccagcagcgtctgatcttcgccggcaaacagctggaggatggccgcaccctagcagactacaacatccaaaaggagagcaccctccaccttgtgctccgtctccgtggtggtcagtaagtcatgggtcgtttaagctgccgatgtgcctgcgtcgtctggtgccctctctccatatggaggttgtcaaagtatctgctgttcgtgtcatgagtcgtgtcagtgttggtttaataatggaccggttgtgttgtgtgtgcgtactacccagaactatgacaaatcatgaataagtttgatgtttgaaatt

SEQ ID NO: 13783 - DNA, 2092 bp, Zea mays
  Clone ID: LIB143-043-C1_FLI
aaagcggagggaaaagcgagggaggcagccttctattttctgtcaaaacaagggcgatactcctcctactccagcgcacacgcagatcagcgtcgaaatccgtcgcatcgtgcccgcctcgctgtctccgctgggcgctggtggtcatggcccgcagggcgctggagctcgcggcggttctgctcgcgctggcggcgctggcggccgtggcggccggaggggacatcgtgcaccaggacgacgaggcgcccaagatccccggctgctccaacgacttcgtgctggtaaaagtgcagacctggatcaacaaaaaagataaagatgagtttgttggtgttggtgctcgatttggccccaagatagagtcaaaggaaaagcatgccaactggacaaacttgctgttagcagacccttctgattgctgcacccctccaagagagaaggttgctggagatattttgttagtggagaggggaaactgtaagttcactacaaaagctaaggtggctgaatctgctggtgcttctgcgattataattatcaatgataagcacgagttatacaagatggtatgtgagaccaatgaaacaaatttagatattggcatacatgctgttcttctgccaaaagatgcaggctcttctttacaaaggtctctctctagtggtgaagtcttagtggagctgtactctccagatcgtcctctggttgatactgcagaggtgtttctgtggcttatggcagttggtaccattctttgtgcatcatactggtcagcatggagtgcccgagaagcagatattgaacaagagaagcttctgaaggatggtcgtgaagtagcaccaaactttgagcctggaggttctagtggtatggtagatatcaacatggtatccgcaatactgtttgtggtgattgcatcatgcttcttgataacactctacaagctgatgtcccattggtttgtggagcttctggtggttatcttttgcataggtggtgtggagggtctgcaaacatgcttggtggccttactgtcaatgtcaaggcggtttaaacctgctgcagaatcgtatgtgaaagtgccattttttggagctgtttcataccttacattggcagtttgtccgttttgcattctgtttgctgttctgtggggtgtttatcgtcggttgccttatgcttggattgggcaagatattcttggtattaccttgatcgttacagtcatccaaattgttagaatacctaaccttaaggtgggttcagccctcctgggttgtgccttcttatatgacatcttctgggtttttatctccaagatgttgttccatgaaagtgtgatgattgtggttgcacgtggtgacaagactgatgaggatggtgtacccatgctgttaaagattcctcggatgtttgatccatggggtggatacagcatcataggctttggtgatatccttcttcctgggctgttggttgcttttgcattaaggtatgattgggctgccaagaagaccttgcaatctggctactttttgtggtcaatggtggcatatggttccggtaatatgtctcctaattacatacgttgccttgaaccttatggatggccatggccagccggctctcctttacatcgtgcctttcacaatcggcaccttcttagcactgggcatgaagagaggcgagctcagaaacctgtggacaaaaggacagcccgagagagtgtgcacgcacatgcacccatcccccaaggattcgcctgttgcggtcagctcgctgtcgtagacaaggctaacgaccttacctgatgttgcctggccccggagaatgttgctgatgaccaaaaaaagtttccagggttaatgaaggagtctactgatttgtaatgaaccttacatagggataagccaagatcccctgatcgtgatcctcgttgtacagtaggtggtgtatttgtatagtgagtgatgactattgagatgtgcggctgacactggataaaaaaggcgcaggagcttgatgtgggagcagcactgcatctgcatcatgtggctggtgtatggttttgaatgatctctgccgcctc

SEQ ID NO: 13784 - DNA, 727 bp, Zea mays
  Clone ID: LIB143-043-H1_FLI
gacggttgctctagatccgttcatcctggtggttttgtgaggtcgaaagcggcgagcgaattagaagatgctggacaagctgtgggacgacgtggtggccgggcctcgcccggagacgggcctcgagaagctccgcaaggccaccaccgcccgtccgctcgtcatcaacaaagacgcggacggcggcagctacaagcgggcgcagtcgatgccgtcgaccccgacgacgccggtgacgccgtcgtcgtcgtcgtcgtcgacgacgccgcgcggcgccggcaacgtgtggcgcagcgtcttccacccggggagcaacctggccaccaagggcatgggcgccaacctcttcgaccggccgcagcccaactcccccaccgtctacgactggctctacagcgacgagaccaggagcaaccaccgctagatcgggcgagatggatggacagtgaagaggccatgtttgctggtccttgtggttatctaaaacgcacgcatgctctattatagctagtcatcactatatatatacttgtgtttgtgtattgttgttcttgttctgctggtgtctccgccgtttaatttgacctatgttatggagtgagtgatatatgtgccgtcactcctagtatatagtagtgagtgactagttggtatgtgtagtactgtactatcttttctccatatgcatgttttgccagcgcgtaatgaatgtaatgtcagtactgct

SEQ ID NO: 13785 - DNA, 803 bp, Zea mays
  Clone ID: LIB143-044-B3_FLI
cgccaaggagaaattgcaaacctgtcactagcgaagcatacttcgtcgagcacactcttgcaattaatccaccgagttcggtttagtggtttactctcagacgtacgcataaatatagcatagcatcatcgacaacaatgtcgctcgtgagtcggcgcagcagcaacgtgttcgaccccttctccctcgacctctgggaccctttcaacatgttccgctccatcgtcccgtcggcggcctcctccggcggcggttccgagaccgccgccttcgccaacgcccgcgtcgactggaaggagacgcccgaggcgcacgtgttcaaggccgacctccccggcgtcaagaaggaggaggtcaaggtcgaggtggagggcggcaacgtgctcgtcatcagcggcaagcgcagcagggaggaggaggacaagaacgacgacaagtggcaccgcgtcgagcgcagcagcggccagttcgtgaggcgcttccgcctgcctgagaacgccaagctggacgaggtgaaggctggcctcgagaacggcgtgctcacggtcaccgtgcccaagacggaggtgaagaagcccgaggtgaaggctatcgaaatctctggttgagcgtccgttggacgtcgattggaggtctgttgtgctgctactggtccgtggatgtcctgcatgttgcgctgcagcggaggatgttcgctgcgtcttctatgcatttgggatgtttgtgttgtgttcgtctttcccgtatatggtttgtgtattgtcccttatcgataataataaataaaatcaggctttacgtct

SEQ ID NO: 13786 - DNA, 536 bp, Zea mays
  Clone ID: LIB143-044-C11_FLI
cgagaagcttgtcgaggacgagactcagatggaaggcctcgcagacaactgcactcgggttatggtctggaatttggacttggaacctccacagctgaattaccctactagctggcagctgcagaagaacctagacatcgtcgtgccaataacataaaccgcgatgctgctgctgctctttttgttcgcgcctcctagtgagtgtggtggaatgatgacgacaatgcccatgccttcctgaacttggtagcgtccaggatcacgcgaagctgctctgccgagacctggttcgaataatgtggtactagtaacaatagttggaaagcgaagaagcctgcctgacaaaaggaaaaattctttctccccccgttgcgctgcattaccaatgatcctcaacatagataggcttgtatatttcttttccttccatttttcgattattactgttcgttacatataccatgcatacatacatacatacatatacactttcattcattcataagtacatacatacatcttacagtactttacag

SEQ ID NO: 13787 - DNA, 1204 bp, Zea mays
  Clone ID: LIB143-044-C6_FLI
ccgcgactgcttctccatccttccacgaactagacgagggaagagcgctgaagctgtggaggaaaacgaaggatctccccgtgcttgtgtatgccaggtcgcctgctctccgtccgcatcccgtccctcgcgaaactcggcgctcccagcaggtgtgcaaaatccatggcttcagacactggcaagaagctcatccagatcgatgtgagctcggacacagtatgcccttggtgctttgtcggcaaaaagaacctcgagaaagcgatggagcaaagcagggacaagtttgacttcgaggtccgctggcatccgttctttctaaaccctgatgcgcctaaggagggcgtcaggaaatctgacttctacaaggcgaagtttggtcctgttcagtatgagcgtgtcatttctcgcatggccgagatatttcgaggactcgggcttgagtatgacatgtcggggctgacaggggatacgatggatagtcataggctcatagcacttgctggacaccaaggctatgacaagcaaaatgctcttgttggagaattattccttaattacttttgtgaaggaaagtatattggtgacaagcaggttttgctggacgctgcaagaaaggtgggcatagaaggggccgaagaactgtttcaagaccctaccaaaggagtcgatgaggttcaggaagaactcaagaagtattcatctggcatctccggggtaccacattttgtgatcaatgataaatatcaactcagtggtggccagcctccaaatgtattcatgagggcgtttgagatggctgcaaaagatggagcttaatggcatttaaaaggagctcctccagtagtcttcgcatatgttaaaaaggaataggagccgaatttaacaataaagttccagcacagctcatcgctgatttgcgaaaaatatgtggaatcagttgtatttccgtagttctgatatggtgataattagtggtgaagatggtgtggatgttcactttcgaataaaattctaggcgatcggatatggcatatgggttagaatgccccatcatcagagcccggtctgtatttacatttggttcgataggatgtgtgcaagatatcagaaaacaacaaagttcagatttgatattcgaaaggaataaaaaaaaagctagcatacacagctgcatttagattgattgttaccatttacactg

SEQ ID NO: 13788 - DNA, 1370 bp, Zea mays
  Clone ID: LIB143-044-E11_FLI
ctccctccctctctttctctctcctgccccaaccaaccaatggaggctctcgcgggcgccgcatcctcctccgttctccccgcgcgccacccgccctcccgcgtggccgcgcagtccctcgcgctccgccctagccgctgcggtccactccgcgcggttggcgccggcggtgtcagtggcaaggacgacgcccacgccgccaacgggtctcccgtcctcaagctgaatagcgattccagtctaaatggagtcctaccgattgcagctgacaagtcacagaaggcttcatcaactaacgttagtactgactctagtggatctagagctggcctgtttagaacacccatatcaggtggtgtgcagagtgcaactttcgcccacggtctacccccgccggctttggctgttcgcaatttgatggaacaggcgcggtttgcccacctgtgctctgtcatgtctggcatgcaccaccgccgtactggatatccgtttggttcacttgtcgactttgctaacgattcaatgggccacccaattttttcgctgtcacccttggcaatccatacgaggaacttactcgctgacccaagatgcacgcttgttgtccaggtgcctggatggagtggactgtcgaacgcgcgagtcaccatatttggtgatgtttaccctttgccagctgaacaacaggaatgggcacataagcaatatgtagcaaaacatcagcagtgggcatcacagcagtggggaaacttttactattacaggatgcacaacataagtgacatatatttcatcgggggcttcggaactgtcgcatggatagatgttaaggagtatgaaacgattcaacctgacaagatagcagttgatggtggtgacttgcaaagtttaaaggagttgaacgctattttctctaaaccacttcgggaggtcctatcatcagaaggggaggttgatgatgctgcgcttatatcagtagatagcaaagggatagatatacgggttcgacagggtgcacagttcaatattcagaggctagcatttgatgtccctcataaggttgagactctggaggaagccaagaaagcactccacaagataatcaaagacaagcagcaaataaagtgaagttgcaggagctggctctacccatttttctggtggtgtaaggtttcattgcaaccggaccaaggattacgtaatggtagcaggtagcatgatacaagtgaaaacgatggctgttttttttttaaaataatgagagtctcgctctccagctgtggtgaagattgtatatatgctcgtgttgccatattaataattattattgtgcggttgcttcttgaggaaaacggaccttcttgttctct

SEQ ID NO: 13789 - DNA, 1135 bp, Zea mays
  Clone ID: LIB143-044-E12_FLI
cgcccttctcctttttcgtcgccttcgatcggcggctgcctccttcctccacttccgtcccttcaccgagccgccgccgccactatgaagggacccggcctcttctccgacatcggcaagaaggccaaggatctactcagtaaggactacacttacgaccagaagctgaccatctccaccgccagcgcctctggactgggcctgacttccacagctgtgaagaaaggagggctttattctcttgatgtcagttcagtttacaagtacaagaataccactgttgatgttaaagtggacactgaatcaaatatctctactacattgaccgtgttggacgccttgccatgcacaaagcttgtcacttctgtgaagctgcctgactacaattctggaaaggtggagctgcaatacttccatgagaatgcaacttttgccactgttgttggcacgaagccttctccagtgattgatctttctgggacagtaggtgctcaaggagttgcatttggtgcagaagctgggtatgacactgctacgggaaaatttaccaagtacactgctgcaattggtgtaaccaagccagactaccatgctgcattcattctggcggacaaaggtgacaccattaaagtgtcaggtgtttatcacctggatgagaaacagaaggcctcagctgtggctgagctaacccggaggctttcaacaaatcagaacacactcacagttggtggactgtacacagttgattctcagacagccgtgaaggcaaggctcaacaacaatggaacgcttgccgcgcttcttcagcacgagcttaaacccaagtcactcttgacgatctctggtgaattcgacaccaaggccctggacagaccccccaagtttggcttggcgcttgcactgaagccctgatcagatcatcccacagcgattgctggtgaattttgaattctttggttgtttttcgcaaagctgtagccaataatccgttccacgaaccttttctgttattctggcaaacgtttggagcactgtggcttagatccggatgggtcgtctacaggaattttacctgcctgcttttattgttgaaagcatctggccgtcggtagatgtacattgtgcttgcttcttt

SEQ ID NO: 13790 - DNA, 1920 bp, Zea mays
  Clone ID: LIB143-044-F10_FLI
ctctccttttgctcggaacgcacacacagcccggtccccgatctccgatcccctcgtcgatccaagatgcagatcttcgtcaagaccctcactggaaagactatcaccctcgaggtggagtcttctgacaccattgacaacgtcaaggccaagatccaggacaaggagggcattcccccggaccagcagcggctcatcttcgctggcaagcagctcgaggacgggcgcacacttgccgactacaacatccagaaggagagcaccctccaccttgttctccgcctcaggggaggcatgcagatcttcgtcaagaccctcactggaaagactatcaccctcgaggtggagtcttctgacaccatcgacaacgtcaaggccaagatccaggacaaggagggcatccctccggaccagcagcggctcatttttgctggcaagcagctcgaggacgggcgcacgctggccgactacaacattcagaaggagagcaccctccacttggtgttgcgtctcaggggcggcatgcagatatttgtgaagactctgactggcaagactatcacccttgaggtcgagtcttctgataccatcgacaatgtcaaggccaagatccaggacaaggagggcatccctccggaccagcagcggctcatttttgccggcaagcagctcgaggacgggcgcacgctggccgactacaacattcagaaggagagcaccctccacttggtgctgcgtctcaggggtggcatgcagatcttcgtgaagacacttactggcaagacgatcacccttgaggtggagtcctcggacaccatcgacaatgtcaaggctaagatccaggacaaggaaggcattccaccagaccagcagcggctcatctttgctggcaagcagctggaggatggccgtacccttgcggattacaacatccagaaggagagcaccctccacttggtgctgcgtctcaggggcggcatgcagatcttcgtgaagacacttactggcaagacaatcacccttgaggtggagtcctcggacaccattgacaacgtcaaggccaagatccaggacaaggagggcatcccaccggaccaacagcgcctgatcttcgccggcaagcagctggaggatggtcgcactcttgcggattacaacatccagaaggagagcaccctccacctggtgctccgcctcaggggtggcatgcagatctttgtgaagacattgactggcaagaccatcaccttggaggtggagtcgtctgacacaatcgataatgtcaaagccaagatccaggacaaggagggcattccaccggaccagcagcgcctgatctttgctggcaagcagctggaggatggccgtaccctcgccgactacaacatccagaaggagagcaccctccacctggtgctccgcttgcgaggtggtatgcagatctttgtgaagaccttgactggcaagaccataaccctggaggttgagagctctgacaccatcgacaacgtgaaggcgaagatccaggacaaagagggcatccccccagaccagcagcgtctgatcttcgctggcaagcagctggaggatggccgcaccctagcagactacaacatccagaaggagagcactctccacctggtgctccgcctccgcggtggtcagtaagccatgggtcatttaagctgctgctgtacctgggtatctgcgtcgtctggtgccctctggtgtacctctatatggatgtcgtcgtctaataaacatctgtggtttgtgtgtcatgaatcgtggttgtggcttcgttggtttaatggacctgttgtgtcctctgtgtgttgtacccaaaactcttctgcagcagtatggctcgaatccttatgaagtttgatgtttgaacttaaaagtctgctcagtatgttt

SEQ ID NO: 13791 - DNA, 1901 bp, Zea mays
  Clone ID: LIB143-044-F5_FLI
cgacgcggtatcgccgtatacccgcctcaagtacaaagggaaagctgcgactcgctcggaagtggggtactgtacttcccgctcgctcgctctctgctctggtccttcacgctctaaccttcagttgaggttctctaatcgggcccgctaaagtcgagagacaggttttcgcgaacatttgcatctagccatctctactcaactgaattcttgtgctcttgtggcattcacaaagtccattttcagactgagctagttcagctgtcattttttttttcagccaaaggtcgcgttcttttggacctgctcttgattcgttcgttcgttcgtttggattgattgattgattgattcctttcgacttcccttcaccacccccctgctccgtcaagcgtgcctctgttcttctgccattgctggatcgcgtttgtctgtttgttgggttgctggcgctgcggccatggatcccttccacggcattgtgaaggaggagttcgacttggacttcgacttcacctgcgcgtctgcggcggcggcggcggcggcctcgtgggccgtcgccttgccggagatgccccggccgatggaaggactcggcgaggtgggacccactccgttcctgaccaagacatacgacgtcgtggacgaccccaacaccgacaccatcgtctcttgggggttcgccggaaccagcttcgtcgtctgggacgccaacgccttcgccttggtgatcctcccacgctacttcaagcacagcaacttctccagcttcgtccgccagctcaacacctacgggttcaggaaggttgacccggacaggtgggagttcgcgaacgaggggttccagcgtggccagagggagctcctcaggacgatcaagcgccggcgcccgccgtcgagcccgtcggcgcagcaggggcaggcgccgtcggcctgcctggaggtggggcagttcgggctcgacggcgaggtgcaccggctgcagcgcgacagggggatcctgctcgcggaggtggtgaagctgcggcaggagcagcaggcgacgcgcgcgcagatgcaggccatggagaagcgcatcaccacggcggagcagaagcagcagcagatgacggtgttcctcgcgcgtgccatgaagaacccgagcttcatccggatgctggtcgaccgggagggccttggcggctgccgcagggagctcgaggacgcgctctccagaaagcgccgccgccccatcgagtacctcccgcgcgacggcgagagaagcggcactgccacggagtcggcggtgagcgactacatttccggacttccggtcggcgtcaacggcgtggcggaggcggacgacgacgagagacggtgggagagaaggggcggcggcggcggcggcgaggacacggagagcttctgggcgaagttgctcaacctcggcctggaggagaagcacagggagggcagatgcgatggcgaggaggggaacggagctgacgtggacaacgacgtggacgacgacgtggatgtgctggtgcagagcatctaccacttgaacccgaacccgggtagccccggtggcaagtgaaagttccagaacgttccacattccagaacccactatggtctatggaagtggaagctcccagtgggcatcgcaattagtcgtaggcgatagttttttatccggcgcctgacttcttgtcgcggggctatgcaagttgcaaaagtgcttgcgtttggccggttgccaaggaatgttcgggatgctcgtcgaactacgaagcttctagaagatggagcagcgaggctgcagcctactcgtatattactatcagggagcaggcgagcagcaaggctgcagcctactcgtatatttactatcaatggcgcgggcttcttcgctgcggttt

SEQ ID NO: 13792 - DNA, 1099 bp, Zea mays
  Clone ID: LIB143-044-G12_FLI
cagtcgaggagcaaaacagatcccaagtgctgccggcgagccagccggcctccagcttgtagcgaccgttcgtgacgtcgatgggtgacttcgtgggccacgtgctgccgggcacgctgctgctggcggtgggcctgtggcgggtgtgggcgtcagtggcgcgcttcgcggccgacccggcggcgttccgcgtccgcgcctggaaccccgtcccggcggcggggccgcggctgctggagctgcacgtggtggccggcggcgcgttcctggacatgtgcgtggagctctactacgccaacccgctccgcgtcctcaccggcggcggggtcgacccgggccacctcggcggcctcgagcacgccagcatgctcctcatgttcttcctcttcggcgcgctcgccctcgtctccgagaagaccaggtacctgcctttatcggacggcgcgctgagcctggtgttcgcgagcgcattcacggcggagttcctgctcttctacttccactccaccacgcacgcggggctggagggctactaccaccgcctcctcctcgccgtcctcgccctctgcatcgccgcgctcgtcgccggcgcgctccttcccgccagcttccccgccgacctcggcgccggcgtcctcatcgccgtccagggcctgtggttctaccaggccgcgctcgcgctgtacggccccatgctccccgcgggctgcgtccgccacttcgactcccctcactccgacgcccgcatcgagtgccacggcggcaccgcgcaggagcgcgccgagcagctggccaacttccagctgttcgggctcgtgttcctcgcgttcgtctacgcgctcgggtgctacgccgtggccgcggcaaggtatgggaataacctggagctgacgacggtccatcacacacatgtcgctgcgactgccatgtagaaggagaacaaagttcacgatctagtggccacggatctctttttttcttgttcggttcagagtacgtagggcaggcgagtacatgaatggctgggctgttcaaaagaagctcgagtgtgatcttacctaccacatggacctgtcactgtaaaatgtcaagttcgtgc

SEQ ID NO: 13793 - DNA, 550 bp, Zea mays
  Clone ID: LIB143-044-H4_FLI
gcagcctatgccacatttgcactcaagcaagtgagcagctcccccgccctccagcaacatggagacggccaacgttgtcatcctctcgttcttcttcatctttgcaatccaccgcctcttcaaccgcctccatagcaggagcacgaagatgaagccgctgccaccgggccctctagccatcccggtcctcggccacctgtacctcctcctcgagaagaatattcaccacatgttcacgcgcctcgccgcgcgctacgggcccgtgctctacctccgcctcggctcacgtaacgccgtgatcgtgtcctctgtcgactgcgccagggagtgcttcacggagcacgacgtgaccttcgcgaaccgcccgaccttccccacgctgcatctcatgacctacgggggcaccacggtcggcacctgcgcctacggcccgtactggcgccacatccgccgcgtcatcacggtgcacctcctgtccgctctccgggtgaggtccatggtccccgccatcgaagcagaggtgcgcgccatggcgcggagcatgtaccgt

SEQ ID NO: 13794 - DNA, 1118 bp, Zea mays
  Clone ID: LIB143-045-D1_FLI
cgaatggtttgaaagtgatggcaattttgtccacaaaggactgcagtttggaagagtatatgggtgtgcccgcagcatcatcgttgctgaaagggttgtgctgcccgtccagcatgcatattggaaacaaggaaaactgctccaggtttacgtctgattgacaagtgggcagtactgattggtggcggaaagaaccacaggcttggtttatttgatatggttatgataaaagataatcatatttctgttgccggtgggattgcaaatgcaatgagatctgttgatcaattcctgcagaaggaaaaactcacaattcctgtcgaggtcgagacaaggacaatcgaagaagtgaaagatttgttgaagtacgctgctgagaacaaaacttcattgacccgtataatgttggacaatatggttgttcctcttggaaatggagatttagacgtttcaatgcttaaagatgcagttcggttgataaacggtagatttgagactgaggcgtctggaaatgtgacagttgatacagtgaagaaaatcggagaaacgggagtcacctatatttcaagtggagcattaacgcactctgtgacggcgcttgacatctctctcaagatagacaccgagctggctcttcaggttggaagacgcacaaatcgtgcttgactcccacagcattacgttgtggacgcaacgcacgcaagcaggatgacagagggaccagcgtggcaaaccagcttaaatagcttaataataacttggcgctgaggcctctgactgcaactacgtgggattcattcttcagtttcatgcacaaacgaccgcaatattgatcggatcagaataattggcaggacatacaggttttgttctagcaccaagtttgggagcttgcgttctgcggcagataggcaggccaggtaggtgtacctcctcctgggcccagccacagctcgacagcaggtaccaggtaggtctactgtaaacgggggatgtcgcactgaactcgcaataccaaagacaaaataacaaaaggtggagataagatgcttatcttactgccattggtgataaaagcaacgtcaactcacatctattatttattgtatcgttccatc

SEQ ID NO: 13795 - DNA, 466 bp, Zea mays
  Clone ID: LIB143-045-E5_FLI
gatctagattaggaaaatgctagattcaggctagaagattcaggtaataaactaacttgtgaaataaaacttggcttaaggacccacttctagtaagcttttctgcaaaatgagtccttgaactttgatgagctttaccttgattcccaaaagccagcatacccttgagagtcttttctttagtcgggtaagtcttgctgagtaattgcgtactcagggttttatcccttgttgtttttgtaggagaagttttattcacttatctttgggttagttacttcatgtggaggacttgaagcttagaatgtttttatatatctcttatggaaaggcttcacccttccaattattgtaataagttatgcacttcgagtactatcaggacttgtaataaatacatctcattctaccatgtaaaacttgagttctggaatgtaaagtgtactttgtaaaagtcttccgttct

SEQ ID NO: 13796 - DNA, 1444 bp, Zea mays
  Clone ID: LIB143-046-B3_FLI
caaaaattttcagccgccattctctcttctccctgtcttcttctccctcgcgcagcagccctctcacacggcagcagcacgccagcgcaggggcagcggctccatggccgagcgcccttcccagtgctccagccggcctcctctgcctgtgctcctcatcccacacagcagcgcgcagggagctttccccttctccgcggcgtccggcagcagggaacctttctcccctacgtgcaggagcttccaggccgcccagcgccccttcttcttcatggcaggagctcctcccatggccgccgacgccctactctcctccatggctggcagcagcagggagctcgacgcccctgtacagcccccacaccttcttcctcccacggctggcttcccttctcccctcggctccttcctgcaggggcgagctccatctctgcagcagccgagcacccccacaaccaaggcgcccttccccagcgacgcccctctgcagctcgcccctctctgtccatggccgccagcaggctctccatggccggcgcccccttccggcgagcagccaagctcccatgagcgccaccccccctgcagcttccccttgccggcgcccagaaaatgcagcagcaacaacctcctcttttccccccacaaaacagcaagccccggatcccctccacatcgcgtgcttcgttcgatctgcgcagtcccgacccacatcgtcgagttggtgtttgggacagctccatgccgcgtcatcgctctgcgcagttcgaccgtttatgcgcctcacttcgccggatctgcgcagccccaacatcgacgccgttcaccctcggtgagacgacgacgatccttattgattccacatcggctttgttctccggtgattaattgtgtatatgtgctgtttttgttttgtttgtggaggagagaaaccccgtgtttaggagaaggcaagtcgttcaacgctcgtcggatgttcggagcgatgcacaaatcggaatcgccatcgtccttacaaacaccgattgggtttgtttatggtgagccgatgaccgagagaggatgatcgtgcaagtgatgtggtgccacccacaagatgcagttggtggacgacctaaggaaggatggatataaccagtggatgctcgccaagcgagtaccctcccccagcaaacactgtctaagtgttaaattaaaggtacttcttgatttggttgatggtgtgacttggcctccatccctgccaccgggatagacggtcgagtgggttactgcttccgcaggagaggaccaggaggagtagcgtggctaggcttcgccatgatactcggttttctccgttagttatttccgctgcattaaaatttatgattattatttctgaaactccgataatgtaatcactattgatacttattaaatttgtagtattatgctttattgt

SEQ ID NO: 13797 - DNA, 982 bp, Zea mays
  Clone ID: LIB143-046-B4_FLI
cttgtgaccctccctcagccgcgtcgcgtcgcatcctacgatccaaagctctctctgctcgcagccatggcgaagaactacccgaccgtgagcgccgagtacagcgaggctgtggagaaggccaggcgcaagctccgagccctcatcgccgagaagagctgcgccccgctcatgctccgcctcgcgtggcactccgcggggacgttcgacgtgtcgtcgaggaccggcggtccattcggcacgatgaagcatcagtcggaattggctcacggcgctaacgcggggctggacatcgcggtgcggctgctcgagcccatcaaggaggagttcccaatcctctcttacgccgatttctaccagctcgcgggagttgtggccgtggaggtcaccggtgggcctgagattcccttccaccccggtagggaggacaagcctcaacccccacctgagggccgccttcctgacgccactaagggttctgaccacctgaggcaagtttttggcaagcagatgggcttgagcgatcaggacattgttgccctctctggtggccacaccttgggaaggtgccacaaagagcggtctggtttcgagggggcctggactacaaaccctttggtctttgacaactcttacttcaaggaacttctgagtggtgataaggagggccttcttcagctcccaagtgacaaagccctgctgagcgaccctgttttccgccctcttgtcgagaaatatgctgcggatgagaaggctttctttgatgactacaaagaggcccacctcaagctctccgaactggggtttgctgatgcttaaatagaccctatcttggagtgatacattctgctgcctgtatggaatcatgtggtcttttgcatctggagtcaatgtgaacaagcagattgtcgtattgtctttctcgtaataaatttgtcgatgttgagcccttaggctgttgttggtacattggtacttcgtc

SEQ ID NO: 13798 - DNA, 1791 bp, Zea mays
  Clone ID: LIB143-046-B8_FLI
gtctccaagtgcgtgcgccggcggcaccgcctcccgcaccttcggcgcgctcgaccccgtccaggtcaccatgatggccaagcacctggacaccatctacgtctccgggtggcagtgctcgtccacgcacacctccaccaacgagcccggcccggacctcgccgactacccctacgacaccgtgcccaacaaggtggagcacctcttcttcgcgcagatctaccacgaccgcaagcagcgggaggcgcgcatgtcgctgccccgcgccgagcgcgcgcgggcgccgtacgtcgacttcctcaagcccatcatcgccgacggcgacacgggcttcggcggcgccacggccaccgtcaagctctgcaagctcttcgtggagcgcggggcggccggggtccacctcgaggaccagtcctccgtcaccaagaagtgcggccacatggcgggcaaggtgctcgtcgccgtctccgagcacgtgaaccgcctcgtcgccgcgcggctccagttcgacgtcatgggcgtcgagaccgtcctcgtcgcgcgcaccgacgccgtcgccgccacgctcatccagaccaacgtcgacgcgcgcgaccaccagttcatagtcggcgccaccaacccgggcctcaggggccagagcctcgcggccgtgctgtcggccggcatgtcggcgggcaagagcggcagggagctccaggccatcgaggacgagtggctggccgcggcgcggctcaagaccttctccgagtgcgtcagggacgccatcgcgggcctcggcgtcgcgggccaggagaagcagcgcaggctccaggagtgggaccgcgccaccggcggctacgacaggtgcgtgtccaacgaccaggcgcgcgacatcgccgccagcctcggcgtcacgtccgtgttctgggactgggacctgccgcggaccagggaagggttctaccgcttcagggggtccgtggcggcggccgtggtccggggccgcgccttcgcgccgcacgccgacgtgctgtggatggagacgtccagccccaacgtggccgagtgcaccgccttcgccgagggcgtcaaggcggcgtgccccgaggcgatgctcgcctacaacctctcgccgtccttcaactgggacgcgtctgggatgacggacgccgagatggccgccttcatcccgagcgtcgcgcgcctcggctacgtctggcagttcatcacgctcgccgggttccacgccgacgcgctcgtcaccgacacgttcgcgcgggacttcgcacgccgcggcatgctggcctacgtggagaggatccagagggaggagaggatcaacggcgtggagacgctggagcatcagaagtggtcgggcgccaatttctacgacagggtgctcaaggctgtgcagggtggcatctcctcgactgcagccatgggcaaaggagttactgaagagcagttcaaggatccacggcccgcaactgggagcagtggcctgcaagttatggccaaatccaggatttgatgaagactcagaagaagaagaatgatttggagaaggctctaaataaattcgaaaaaaaaataagctgggttcagttcatcagcaatggggaagctgctttccaagttctaaactgaacataatcagcataaatgaatcaacgaatcgtctagctagctacgtacggatggagttctgagttgtgactccaaatgaaaacccaggttgggttgaaagtattggtgtcaatctgtgagattatttatcacttcagattgaatatatgatttggttttggt

SEQ ID NO: 13799 - DNA, 681 bp, Zea mays
  Clone ID: LIB143-046-C10_FLI
gccgcaacttcacagcgtatcatcgttttccatcgctcctactcctatcatccagaaaatctgagcggtattgatggcgcccaaggcggagaagaagccggcggcgaagaaggtggcggaggaggagccctcggagaaggcggctccggcggagaaggcccccgcggggaagaagcccaaggcggagaagcggctacctgcgggcaagtccgccggcaaggagggcggcgacaagaagggtaggaagaaggcgaagaagagcgtggagacctacaagatctacatcttcaaggtcctgaagcaggtgcaccccgacatcggcatctcctccaaggccatgtccatcatgaactccttcatcaacgacatcttcgagaagctcgccgcggaggccgccaagctcgcccggtacaacaagaagcccaccatcacctcccgcgagatccagacctccgtccgcctcgtcctccccggcgagctcgccaagcacgccgtctcggagggtaccaaggccgtcaccaagttcacctcgtcttagcccccttgtagtaggcgtcgttgttgtctgcttctcaagcaagcactgtgatgtgccgcttctcatggtagtagtggtggttggctggtgtgtgtaagtggtgcagtggcttttgcctgtgttatgaatttagtcatggtggt

SEQ ID NO: 13800 - DNA, 913 bp, Zea mays
  Clone ID: LIB143-046-D4_FLI
gcgagatcgaggcagtgcgcacgccgtgcagccgtgcaggcctctcctccactcaaccgcgcgtcatggccatgttgcgcgagcatctcgacctcatccgcgctcacctcctcgacgacaaccacgacgccgtcagctccgatgactcggcgccatcgccatccccatcgccgccggggcgtaggccgctgccagcgctttccgtctcgctgcccccgaggccggcagtcgtcctgcagcagcagcacctgagggcggcggcgccgccgttgcagattcctcagcaggagcagcactgctgcccggaacccgaggaggacgatttccggcggtaccgcggcgtgcggcagcggccgtggggcaagtacgcggccgagattcgggacccggcgcggaagggcgcgcgcgtgtggctgggcacctacgacaccgccgtggaggccgctcgtgcctacgaccgcgccgcgttccgcctgcgcgggtccaaggccatcctcaacttccctaacgaggtcgcgttaagcaccgctgcatggtgggcgacgcctgctcctcctcctcagcccagcgcgaccgtggccggtaacaagagggcgaggtcgccgcaggagcaggacgctaggtgcatggttagggaggtgaagaaggagcggattcaggagcccgcaagcggaggggcggactacttctgggaggatgagtcgctgaagggggcgatctgcagcctgccgccgctctcaccgttgtcgccgcacccgcacctggccgtgccgcagctctacgtcagctgactgcctgacttgatgtcgtagcaagacagggacggtggtcttactcttacctgatgatagtcttctgagttctttgatatgctagaggagtatagctccaaatattctttcgttctttattt

SEQ ID NO: 13801 - DNA, 939 bp, Zea mays
  Clone ID: LIB143-046-D6_FLI
tgattttagccgccgccgctgctcatctcacatccctcgagaagacgcctgctcctcgccgatcgatacgatggccgtcttctccgacctccacaccgccgacggcctcaagtccctcgaggctcacctcgccggcaaaacctatgtgtctggtgactccattactaaggatgacattaaggtcttcgccgcggtgccgtcgaagcctggcgctgagtttcctaatgccgcccgctggtacgagaccgtctctgcggctgtagcctcaagattccctggtaaggctgttggtgtaaatctgcctgcgggatcagctcctgcggcagctgctcctgcggatgaggctgaggatgatgatgaccttgatctttttggtgatgaaactgaggaggacaagaaggcagctgatgagcgtgctgccgctgccaaggcctcttctaaaaagaaagaaagtggtaaatcctccgtccttatggatgtaaaaccatgggacgatgagactgatatgaagaagctggaggaggctgtccgcagtgtccagatggagggtctgacttggggagcatcaaagcttgtgcctgttggatacggcatcaagaagatgactatcatgttgacaattgtcgacgatcttgtgtccatcgacactctaattgaggaccaccttacgcaagagcccatcaatgagtacgtccagagttgcgacattgtggctttcaacaagatctagagttcagtttctgagtttgggcaacggcagcggctcagctcgtcaagtttgtgctgggatgccagtttatcccttctagtctattacagaaacgttgttcggagctgagtctattataaacatcttggtctgagtttattgttgagtggtgccagtttttttcaatatacatttatcttaaaaacagcggtactgatgtttttttgtct

SEQ ID NO: 13802 - DNA, 825 bp, Zea mays
  Clone ID: LIB143-046-E2_FLI
gattgaaaaaaaaaacaggcaaggaaaatggctccgaccgccgccaaggacagtggctccgccgatcgctggcgcgaggtgcaggcgttcgaggacagcaagctgggtgtgaagggcctggtcgactccggcgtcaagtccatcccggccatgttccaccacccgccggagtccctcaaggatgtcatttctccaccagctctgccctcctccgacgatgcgccggccatcccagtggtggacctgtccgtggcgcggcgcgaggatctggtggcccaggtgaagcacgcggccgggacggtgggcttcttctgggtggtgaaccacggcgtgccggaggagctgatggccagcatgctcagcggggtgcgccagttcaacgagggctctctggaggccaagcaggcgctctactcacgggaccccgctcgcaacgtgcgcttcgcttccaacttcgacctcttcgagtccgcggcggccgactggcgcgacacgctctactgcaagattgcgccggatccggcgccgcgggagctcgtgccggagcctctccggaacgtgatgatggaatacggcgaggaactgacgaagctggcgcggtccatgttcgagctgctgtcggagtccctcggcatgcccagcgaccacctgcacaagatggagtgcatgcagcagctccacatcgtgtgccagtactacccgccatgcccggagccgcacctcaccatgggcgtcaggaagcactcggacaccggtttcttcaccatcctcctgcaggacggcatgggcggcctgcaggtgctagtcgatcgcggaggcggccgc

SEQ ID NO: 13803 - DNA, 392 bp, Zea mays
  Clone ID: LIB143-046-F9_FLI
gcgccgaccaccaaggccagcgccggcggcttcgaggcggccaccgagggcggcggctgcgactgcaacacctgcaagtgcggcaccagctgcggctgctcctgctgcagctgcaactgagctggcccggcccggcgatggcgcacgagagtcgagaggaggaggacgacgacgaggcgtataaatataatagcggcgtccagtaaataagatcctgtcaactgcacccgccattatccatggtcgctcgctcctcgcctgcgtctcctggtcctggggttcgtctgaacgtcctcgcggcttcacgacggcgatgccgcctccgtcgatcctgtccgtctcgtgccggatttaatattagatctatatgcgtgtttttctgcgttattact

SEQ ID NO: 13804 - DNA, 654 bp, Zea mays
  Clone ID: LIB143-046-G2_FLI
cctagcagctcggcgctccctcttctgactccttcgaggtactcccatcgctatcgaccgggtcctcgagcgcgggagatggcggatcaggagaccccagttgcagttgaggcccctaccccggtccttggggagccgatggacttgatgactgctctgcagcttgtcatgaagaagtcgggtgctcatgatggccttgttaagggtcttcgtgaggctgccaaagcaattgagaagcatgctgctcagctttgcgtgcttgcggaggactgtgaccagcctgattatgtcaagctggtgaaggctctttgctctgagcacaacgttcacctggttactgtgcctagcgctaaaactcttggcgaatggtctgggctttgcaagattgattctgagggcaaggcgaggaaggttgtgggttgctcctgtgttgtcgtcaaggactatggcgaagaatctgagggccttaacatagttcaggagtacgtcaagtcacactagatacagtgcatcggtatctggaacttgtgctctacactagctttaagacctgaatttaaatttgtgctggttcttgggcttttctaggagattatctcaattcttgttttaagtgatgtcatctggtgttaatacaaatcattaagcggtggt

SEQ ID NO: 13805 - DNA, 1071 bp, Zea mays
  Clone ID: LIB143-046-G7_FLI
cgattcccgacacgcttgtgttgtcgcgattggcaagctcggcggctcgtggcagcgggaacgtacgaggcgaaggagagcgagggcgaccgcgcggatcgcatcgcagctctgggcggagatgctggcggtgttcgatcgggcggtggcgccgagcccggaggggctgcggcagccgggcgccgcggggggcggcagcgcggcgggcctcgcggaccggttcagagaggcgcggcccgacgcggtcaccgtcaaccttggcgggtccggcgccctggcgttctcctcgagcaaccagaaccccctcctccccaggttgtttggagcggtggacggcgtattctgcatgttccagggaacaattgcgaacgttgccgtgctcaagcagcagtacgggctgagcaaaggcgctaacgaggtcagcatcatcatcgaggcttacaggaccttgagggacaggggcccttatcctgcagatcaggttgtgagggacataagtgggaaatttgcatttgtcctgtatgattgctccactaagtcggtcttcatggctgctgaccccgatggaaatgttccgttctactggggcgttgacaccgacggccgtcttgtggtctctgacgacgccgagctcgtgaagagtgcctgtgggaaatcctgtgccccgttccccaaaggcttcttcttcacgacgtccggagggctgaggagctacgagcaccccatgcacgaggtgaagccggtgccgagggtggacagcaagggcgaggtgtgcggcacgacgtacacggtcgacgcaaccgccaggaaggagaccagcatcccaagggtcggcagcgccgccgattggtcttcgcagtactaaaattcgttatctttctctgtgtgtgttgaacgggttcgagcgcaggtagcaggtgacacgggcgtgggccgtgtttgttcgtatggaaaccgtgtctggtgtttgttcgtatgatttccgttgctgctttgctgcacgcctgtactgtgacaagaattactgcctttgctatcaggaaataaatttgtagagtttagagttgtttt

SEQ ID NO: 13806 - DNA, 1477 bp, Zea mays
  Clone ID: LIB143-046-H1_FLI
aaagaaagaaaaaacaccctgtcctcaccagttcaacgcctcttctccgttcacccggcgtgtgctctgcctctctctctctctcgtgcagcgaccgccgacgcgcttcgccagaccttcgccggcgacgagcactcaccagggcttgaaaatgtcaacaagcactttgaaagaacccaatgtttctcaatcaaaagacgtggagaatggaaaagacaattctgtgaaatcctgcatcagcaagcctgtgttgaatggcaacaaatgtgccaacaaggaacaaaatgttctgtcttgttgccctggcgctgtgacaaatggaaacgaggctggaaatgcagacgtggagtacattgattctgagaatctagtagatctaccagatgttgatgcaactctatgtaccttagttaaaaggttggattcaaaggactgggttatgacatgtgaagctctcaacaatgttcgtcagttggcgatgtatcacaaggaaagattgcaggagctgctggagcctctagttcctcttatcgtgaaatctgtgaagaacccaagaagtgctgtatgcaaaacagcactgatgacttgtgctgacatctttaaggcctatggtgacctactggttgagtctattgatccactgctagtgcagctgtttctaaaggcttcacaagataagcgttttgtctgtgaagctgctgaggcagctcttacatcgatgacaagttggatctcccctttactactgttaccaagaatgcagccctacctcaagaacaggaatccgcgggttcgagcaaaagcatcagtgtgtttcagcaagagtgtaccttgcttagatatgcagggagtcagagaatatggaatggataagctcgtccagattgcagcaacccaactcagtgaccagcttccggaatcgagggaggctgctcgcaacctggcactggaactacaggtattatatgagaagtctcaggcctctacctctgacgaaaatgagggcgaaccttctgtctcacaagatgctgagtcatgggagtccttctgtcagtccaagctttctgccttaagcgcccaagccatccttcgcgtgacctctactactccaaaagagggtgtcgcctctacttcaaatgctagaaaagagggtgtcacggcggccccaaaagaaggtttggatgtggattgctagcatgagccacacaagcccacaatgagtttgtagatgcgatgagagcgcgattgtccacccccttcgctttttttgatgtacatgcttatggctggtccttggttacatccagttgggaatcggttgattattggttcgggaattcaggtgtgaccgcggtgttaatattggttacgacatatgtctgccataatagttgattgtataatcattttgttccactgcttggtatttgattggccaggtgaatgtagaatttgacccacggtcagtgttatatac

SEQ ID NO: 13807 - DNA, 1249 bp, Zea mays
  Clone ID: LIB143-047-A10_FLI
ttctctcagccacaagaatgtgatatccctcgttggtttctgcttcaagaatgatgaccttctgttagtgtatgagtatttgcaacgaggcagcctggaagagatactgcatggtaaaaaagaatgcaagagcatatttggttggactgagaggttcagcgtggctatgggagttgctcgtgctctggattatctccatagtgataacaacagtcgtccagtgatccatagggatgtcaagtcatcaaatatcctcatttcaaaatgctttgaaccaaagttatcggactttggtctcgcagtctgggctgctgatgtgacatctcagatgacatgcaatgatgttgcaggaactttcggatacttggctcctgaatacttcatgcatggcaaggtgggcaacaaaatcgatgtgtatgctttcggtgttgtacttctggagctcatctctggcaggaaaccactttgcactggttgtccaaaagggcaggagagcctagtgatgtgggcaaattccatcatacagggaggaaagctcagacaacttgtagatccaaacttgcccactgaaggccatgtcgatgaagttgagaggatgacccttgctgcgtccctctgcatcagacaaacacctcagaaccgtcctgaaattgatgctgttctgaagcttctccacggtgacaatgataccctcaagtgggcaagatcacaagtcgggttgtcatgcgagagcagcgatatcgatgaatttgtgatgacaccgccagcgccgaggagtaacaccaacatccagtcctacatcaacctcgcctttgatgtcgatgacgactcagcctctgtcagcagcaacgacttcattgcagccaacacctccttggaagagtatctgaagggaagatggagccggtcgtcgagctttgactgacggacccatggtcagagttaaccctttattagtgtatagatcgttcttgttcttcttctaatttaagtttcaattttgcgccttggatgagagttggcacctgcaatgccctccaccaggaaatcctttgattatgtcttagttatttttttccttttcttttgggggtccctcttactctctgaagaggcaccctgttgttttactgtctgaagagacttatcatactcaggtagtctcatccaaagaggtgacaaataaagtcgggatcatacgaaactgtggctttctttccatacctaaatcaatcatcttttgttctgc

SEQ ID NO: 13808 - DNA, 1072 bp, Zea mays
  Clone ID: LIB143-047-A7_FLI
caaatccagcgggtccgtactcatctgcttcacctccgggctccggctacggcggcactcttctctggcaaccggaccacagaaacctctaggcgacgaatcgagcaggtagaggagtaatcaggcatccatggctgagcatcttgcgtccatctttggcacggagaaggaccgcgtgaactgccccttctacttcaagatcggcgcatgccgccacggcgaccggtgctcccgcctgcacaacaagccttccatctccccgacgctgctgctctgcaacatgtaccagcggccggacatgatcaccccgggcgtggacgcgcagggcaaccccatcgacccggagcggatccaggaggacttcgaggacttctacgaggacatcttcgtggagctgagcaagcacggcgagatcgagagcctccacgtctgcgacaacctcgcggaccacatgatcgggaacgtgtacgtggagttccgcgaggaggagcaggcggcccgcgccctgcaggcgctgcagggccgctactactcgggccgacccatcatcgccgagttctcgccggtgacggacttccgggaggccacctgccgccagttcgaggagcacagctgcaaccgcggcggatactgcaactttatgcacgtcaagcaggtcggccgggacctgcggcggaagctgtttggccacctgcatcgctccctccggagccacagccgaggcagccgcagcccgagcccataccgccgccgcggtagctcgtccaggtccagggaccgcgacgattaccacgactactactaccactactaccgtagtggcagtggcagccgcaggagcagcgagagacaccgcagccacgacagcgacgggagccgccgtcgacgcgggcggtcgaggagccggagccggagcccggtgagggaaggcagcgaggagcggagggcaaagattgagcagtggaaccgcgagcgggaggcagctcaggtgtaagcaagttccccttccctagttgccatgttggttgctgcagtgttattggccttgctagttgccatgttgctgttgctg

SEQ ID NO: 13809 - DNA, 2031 bp, Zea mays
  Clone ID: LIB143-047-B5_FLI
ttcccaccccgtggtgccaagctcgcggagccggcgacgcagcaagggatacggtaccctcccgtccacgcgacgacaggacagacacccaccccatcaccggaagcaccgccaaagcccaaagccggccaattccgacgccatggccgacgtcgacgacgacgctgtcctctccgacgtcgacgaggacccactcccgcccccctccacctcttccgcctcttcccacaaatcccttccacaagctcaaccccaatcacagtccgatgcccaggcgcagcagcagcggctgctggacctggccgcggagctcgaggaggagcgccgcctccgccgcgcagccgaggcctccctcgcagaggccgagccccgcgtcgcccgcttcaaggccttcgcgcaggaagcgctccgcaagcgcgacgacctcaccgcccaagccgcggcctccgcgcggtccctcgccgcgctccaggccgaggccgccaccgcctcctccatgctctcctctggcttcgagaggatctccgccaaggcctccccttcctcgccccccgcaccgctcccgacctcccagaagtactcctccggcctcccggccctcgcgtacggcgttctcaagcgcgccaacgatatcgtcgacgaactcctcgcccagatcgacgccgctaaccgcgaccgcgatcgcgcgcgggagcagatggaacaccgcaactaccagatcgccatcgaggtctctgagcttgaggcatcgctcgcatccaggtctgccgagggcgaatccctctccaagtccctctcccagcgtgaagccgagatctccgagctccgtgataaaatcacctctctcgaggggaagctcgccgcgcagaggcccgtgctcgcggaacagatcgggtgcacctcgaagctgtatcacgagatgcgggaggtggtcaagctggtcgatgccgaagctgtcagtgccctatcggactcggtttttgtctggaaggagactgacgtcgaggagagcctcaaggtgtctctggaagggacgaaattggcctatgagcttgcggcaatagctctggagaaggttggggcttgtatcgatgacaaggagagcaagcttagacgtttggagaacatggtggatggactgattaaagagaaggagcacattagtgtactgctccggaacgcactgcaggccaccacaagtgaggtgttaaaggttgcagaggatggtctgagagaagctggcattgagattggacttaacgagcgaaaggagcacatgctagggagtgtggagaaggacgaggtttataccctggcaggggctcttgagaataccatgaaggagtctcaggtcaaaattattgagctccaacatcttgtcgaagcactaagggcggagtctggtttacttagaacaaggctagaagggcaagagaaggagattggtcagctaagaaagcaaataaaaaatcttgaagagaaggagaaggtggcaaatgaaagcgttgagggtctgatgatggacgtgacagctgctgaagaggagattaaacgctggaagatggcagcagaggaggaagctgaagctggtagatcaattgaacaagagttccaaattcagatatcatcccttcgcaaggagttggacgaagcaaaccgagctatggtggagctagaaaacaagctgaagttcaaggaagagacagctgctgctgcaatggcggcacgcgatgctgcagagaagtctctaaagctagcagatacgcgatcgtccaggctacgtgagaggctggaggagctcaacaagcagctcgaagaatcagatacgagaaccgagtcggtgaatcgcaatggccataggtacatgtgctggccatggcagtggctgggactgaactacgtgcagttacctctagcggagacagaccagacgtccaacgagatggagctatctgagcccctaataatataggtgctccgacctccatacttgtacagattacagatatatacagatcctgctctttcact

SEQ ID NO: 13810 - DNA, 1372 bp, Zea mays
  Clone ID: LIB143-047-B8_FLI
tctcttccgcctccgattgagtggctcaccttctttcccagccagcacgagcttgcaagcaagcgagctcctgagatttcagctcgcttctcctccagaggtcgagcagaccagactcctccgaccgaagctctaccacttcccagttagcctgtccaggaactgcttggccggagatccaaacaaacctctgtgttggggttctccggggttccttgcgctggagggaggtttcgttctcgctggccatggtttggctgagaagcagcagcggcagcatcttgatgccaaatctctgagctttatgaagatcgccactcacctgcgccgctcctgcttcctccactccttctcggttgtcttcctctactggttttatgtgatctcataacttgccctcccccggatccgccattcccccgtgccctctctccgtcccctcaaccttctccctcctttcttgcttccctcaacaatcgccaaataacagcactagcggcagcggtagaggatcttttcgaggtaagctaggccggccggttccctgcgggaaaaagaaaagaaaaggaacctgtcttgatgtcgtcgtcgtcgctgtctccgacggcggggaggacgtccgggtcggacggcgactcggcggcggacacgcacaggcgcgagaaacgccggctgtcgaaccgcgagtcggcgcggcggtcccggctccggaagcagcagcacctggacgagctggtgcaggaggtggcgcgcctgcaggccgacaacgcgcgcgtggcggcccgcgccgccgacatcgcgtcccagtacacccgcgtcgagcaggagaacaccgtgctccgggcccgcgccgccgagctcggcgaccgcctccgctccgtcaacgaggtgctccgcctcgtcgaggagttcagcggcgtcgccatggacatccaggaggagatgccggcggacgacccgctgctgcgtccctggcagctgccctacccggctgccgccatgcccatcggcgccccgcacatgctccactactgatgattgcctccaccaaccacaccaccatacatctgaggctgtcagctggggctggttggcaacaagacaagaagaattggctgcctctcaacaacattcacatctactacctacctggctgccttgagaattacagggcctctactatctgctgctgtgttaaatctacctcctggtttctccaataattgtcgctgttctgtactcttctcttatgttctgtctgtcagtgtgtatgagatgatgctcatcttatgttatgtaaggcttaatcatgtgtctagttgtactttctgtcttgtaatgttatcagttatatgaataataagtgttatgt

SEQ ID NO: 13811 - DNA, 428 bp, Zea mays
  Clone ID: LIB143-047-E1_FLI
ggagaggaggttccgaattccggcgacggctctgcgcccagccctctacactcagcaccagttgggaccaacgaagcaccagccgtcgaagcgagagaccaccagcagcagacaagctctccgtcgtcgccaccgcctccagatctcatcagcatctgagtaaccggaatcgaaaacgttaccgttcctcgcaaaaatccccgcttcagtgtagcaagcttaggtcgtaattttaggtttgcaataagtttatttggcctcctgtgctgtacatatccgagtttgtttgttggttggttgtgtccggtctgtcatgtttcatttgctggtgcggtgtggtaggagtctgtagcgagttgagtttgagtgagccacgttgctagagcctttgatttcccttctctaatactagtgcactctctcttgtc

SEQ ID NO: 13812 - DNA, 1645 bp, Zea mays
  Clone ID: LIB143-047-H3_FLI
tctccctccctagtcgctccccaaatcggatctccaggccggcagaagttgagcggactgactggtcactgtagttcgatcgaatccgagtagggctgatacagttcgattcggcgggaggcatggcgtccgaaaagcacttcaagtacgtcatcctcggcggcggcgtcgcggcggggtacgcggcgcgggagttcgccaagcagggagttaagcctggggagcttgcaatcatctccaaggaggctgtggctccttacgagcgtcctgccctaagcaaaggttacctctttcctacgaatgctgcaagactcccaggattttatgtatgtgtgggaagtggtggagagaagctattgcctgagtggtactcagagaaaggcattgagctgatccttagtacagaaattgtcaaagctgatctttccaccaagactctgactagtgcagctggagcaaactttacatatgagatcttgctcattgctactggctcctcggtcataaagctcaccgattttggcacacaaggagctgattctaacaacattctatatctaagggaaattgatgatgctgacaagctggttgcagctatccaggcaaagaagggtggcaaggcagtggttgttggaggaggttatatcggcctcgaactgagtgcagccctgaagatcaatgactttgatgtcactatggtgtttcctgaaccttggtgcatgcctcgcctcttcactgccgatattgctgctttctatgaggcttactatactaacaaaggtgtaaagatcttgaagggcacgctagctgttggttttgatgctgatgccaatggtgatgtcactgcagttaagctaaaggatggcacagtacttgaagccgatattgttgttgtcggtgttggaggcagaccattgactactctcttcaagggtcaagttgctgaggagaagggtggaatcaagactgacgcttcctttgaaacaagcgttcctggagtatatgccattggtgatgtggctaccttccctttgaagatgtacaatgagttgaggagagtggaacatgttgaccattctagaaagtctgcagagcaggctgtaaaggcgatcaagggcaaagagtccggtgaaccagttccggagtatgactacctgccatacttctactcccgatcattcgacctggcgtggcaattctacggcgacaacgtgggcgaaaccatcctgtttggcgacagtgaccccacctccagcaagcccaagttcggctcgtactggattaaggacggcaaggtcttgggcgccttcctggagggcgggtcaccggacgagaacaaggtcattgccaaggtggcgaaaacccagccgccggtcgctaacctcgaggagctcaagaaggatggcctccagttcgccagcaagatctgagacgctcccgttccatgtaaaattccgtgtcatcgtgaaggttcttctggagctctggtcatgattgagaaatgttctgctacagatgttatactacatacgtgactacactacatgatatattcggttttctgattgtgatatctgtacgtggctacactcacatgtgagatttgaataagtcctgcagcctcagggctcagctagcacagcac

SEQ ID NO: 13813 - DNA, 523 bp, Zea mays
  Clone ID: LIB143-047-H6_FLI
actcggtcgcatcttccccattctccatcgacgcaccggcggcggcgcaagtgaagcgaagaggaaaggaagctacgagatgtcggcgaccactgcagcggtgcccttctggcgggcggcggggatgacctacatcggctactccaacatctgcgctgcgctggtccggaactgcctcaaggagcccttcaagtctgaggccgcgtcccgcgagaaggttcatttctccatttccaagtggacggatggcaagcaggagaagccaactgtccgcacagaatcggatgactaagggctggcgccatggcgacatagtccttcctacagatgatttgaagcgtcgttgcaagtttctgggacttgttatttagttggcttgatttgtaatcaatgctgaagaataaatactttttgcgacaatggtctttttacaatgtcgtgttgttttcgttgctaattgcacttgccctaccctaatcaagcatgtgaactaatggaatgcttcagttttgtgcagtttggt

SEQ ID NO: 13814 - DNA, 423 bp, Zea mays
  Clone ID: LIB143-048-D3_FLI
cttgggctgtcggcctcacgttttccactgcttccagaggcttcctctcgagtccgcagtctctcttccctacgaagttcagaagttgtcacaatgactcgcggcgaccagagggaacgcgaccggcagagggcgcaggcgcggcggcccgcggccaaggggcgcgacgacgggctcaccccggagcagcggcgggagcgggacgccaaggcgctgcaggagaaggctgccaggaaggcggcgcaggccgcgggaggcgcctgcgccaagggcggcaagaacaccggcaagaagtagccggggtctttactctttagttcgcaggatctgctcgtgttggaagatctgtatttgcctagatctggaatgcaatgcgatttcgtgggcgttgtctcgagcagtgctgaaacaacggttcacagt

SEQ ID NO: 13815 - DNA, 699 bp, Zea mays
  Clone ID: LIB143-048-H7_FLI
cccgcgggaggtgttcgaggactacctccgcgacatagcgccccggtacacggccgagacctaccgcctgctcacccacaactgcaacaacttcagccacgaggtggcgcagttcctcgtcggcactggcgccggcgtgcccgactacatcctcaacctccccgccgaggtcatgtccagccccatgggcccgctcatcatgcccatgatccagaacctcgagtccacgctcaggagcaacgtcgctccgcagaccacgcagttcgtgcccacgcccgcctccgtatccgcgccgaccgaggctcccgcctccgagcgaaaagcgccggcgccggcggagaaggcttcgaaggaagctcctgcgcctgcgaagaaggaagcccctactcctgcggctgacccgctcgggagcgccagggggaaggtgcaggaggaggtgatgaaggagttcgcggccatcatggccagcggtacgctacgggccagcgaggcggcggcgctggccatgcgccgggtcatggagcgccacggcgacggcgccacgatgcagcagggctagacgaatcaggctgtgaacgcgttccggttccatgggaattggaatttgtcatctgcatgctgatgccgccgccgtatggaaaaatttggagaagttattcctgatatgttcgtgcgattatttgggttgtcattaattgc

SEQ ID NO: 13816 - DNA, 1201 bp, Zea mays
  Clone ID: LIB143-049-B4_FLI
cgaaaaccctaaaccctcgctacccggcggcggctacaagctcttcgtcggttcagcaccatgaggccaccggctagaggaggacgtggtgggaggggtggcaggttcgatggcggcggccgtgggggcggcggcggcggccgtgggtttggcggtggtagaggcgggagaggggacaggggagggagaggtggcaggacccccagaggcggccgtggcggcggtggcaggggtggccgcggcggtggcatgaagggcgggagcaaggccgtcgtggtggcgcacaagcacgccggtgtcttcatctccaagtccaaggaggatgcgctctgcaccaagaacatggtcccgggagagtccgtgtacggagagaagcgtgtctccgttcagaatgaggatggaacaaaagtcgaatacagggtgtggaaccccttccgttccaagctggctgctgctgtgcttggtggtgttgacaacatctggattgctcctggtacccgtgtgctgtatcttggtgctgcttctggcacaactgtatctcatgtgtctgatattgtagggccggatggtctggtctacgctgttgagttctctcacaggagtggaagagaccttgtcaacatggcaaagaagaggaccaatgtgatccccattattgaggatgccaggcatccggcaaggtaccggatgttggttggcatggttgatgttatcttctctgatgttgcacagccagaccaggctaggatcttagcacttaatgcttcatacttcttgaagaacggtggccactttgtcatttcaatcaaggctaactgcatcgactccaccctgcctgctgaggccgtgtttgcagcggaagtggagaagctcaaggcggatcagttcaagcccgcggagcaggtgacgttggagccctacgagcgtgaccatgcatgtgttgtgggtgggtacagggtgcccaagaagcagaaggccacctcttaggatcggaatccgtgctcgtcttgcctaccaaagatgcttcgttgtattgtggtttattaagaaactttgaaggattagtcaaagtatgtgaaccttctgcagtgaaggctggtttagcagcgacagctgttagggtctgatgcagtgtttgctggtttaacagcattattattattattgttgatgaaacatgggtttggtttcgttgatctcc

SEQ ID NO: 13817 - DNA, 1455 bp, Zea mays
  Clone ID: LIB143-049-D5_FLI
gtttcctctgttcccccattccgtcgtgtcaccaccgccgccgccggagtgtgtcatcgccgattcgcctggtatggcagcaccgcccgggggagcggggatagtgtggcagacgccggccaacccgcccgagtcgcacgactacatcatccgcaacggtcggcgctacgtgaggccttactacttcgagttcatctcccatgtgaagaacagatgggctggaaagaccatcgttgacctcttcactgatgagttcaaagggcgttcccgcgattactatgttcatgcagtgaagtgtgggaggcttcaggttgatgggcaaatggttcacacagactatattgtgaaatcatcacaaaagataagccacttcttgcataggcacgagccacctgtcttggcgggtgatatttcaatacttaagaatgaagttgatgtcgtaactatttgcaaaccagcttctgttccagttcatccatgtggtcaataccgcaagaatactgtagttgggattctgcaggcagagcatgggttaacacccctatttccggtgcatcggttagatcgtttggtttcaggcctccttatatttgcaaaaaatgccgacagagctgaatgtttcaggcaacagattgaagctggtctgctgcaaaaagaatatgtggccaaggttgttggggtttttcctgatggtgagcaaaccgtcgatgccaatgtaaatttcaacgcacgggaaggaaggagtaccgtggagattagtggtggtgctggtgaagaaccaaatggaaaacaagcactcactaggtttcaaaggatttgcacggatgggactcacagtattgtcttgtgcaaacctgtgactggtcgaactcaccagataagggtgcatctaaagcaagctggttatccaatagctaatgatgagctgtacctatcggggaacttttgtccacgatcaacaaaaggaacaaatgccagtaaaaaaattgcaccatcagatccagacagtagtgctgctgatcatggcagcaaagatgcaggaacggatgtggagtttgatatcgaccccatgtgcacaaactgtccaaatcttgctccagtaggttatgatagagatgaggaaggactatggttgcattgtgtgcggtacactggtcctgattggagctacgaatgtccttatcctgattgggcgttccttggtagcgtgtcaacaaagaagatgaagtcatgatgtagttcatggtgattggtgaatagtaagcccataaaaaaactgaacaatcaaatagtattgttttggcgttacctatgactgggcttccgaggttttcattcaaatcaaacacattagatccggttttcctcggcttctcattcagccaattcacggttcaaaatccactccttaaaattcaacatacattatcgcatccagcctttttgattggttcc

SEQ ID NO: 13818 - DNA, 500 bp, Zea mays
  Clone ID: LIB143-049-G3_FLI
gtacgtagcacagtccattattgccgtctcccttttgcgtgagcaaagaaagagagcgagaagcagtcgccatgtctggcatcatccacaagatcgaggagaagctccacatggggggcgaccacaagaataaggaggaggagcaccacaagaaggccgaggagcaccacaagaaggaggagggggagcaccacaagaaggacggcggggagcacaaggaaggcatcgtggagaagatcaaggacaagatcaccggcgagcacggcgacaagtccggcgaccacaaggagaagaaggacaagaagaagaaggataagaagaagcacggcgagggccacgaccacgacggcggccacagtagcagcagcagcgacagcgactgagatctggtgtcgcagcacaggtgcaacacatgtatgcttgctggatggaggattcataccagctgatgctgatgtagtgtttcactggtgtcatgcatgtatcgtgctattataatc

SEQ ID NO: 13819 - DNA, 1626 bp, Zea mays
  Clone ID: LIB143-050-E12_FLI
ctggaagagtctgtcggccagctgctgagtttctggcatcttacccagacatatgtacctatggtgttgatgaccatgatgcagatcaaattcatgttatcgtggcatctttgtatcaaaaagatgcagaagagacagttgatggtattgaaaatacaactgctacccaacttgatgttgctgatattggaagcctttcagatcttgtttctcaggttgaggttgtaattagcttgctgcctgctagttttcatgctgccattgcaggagtatgcatagagttgaagaagcacatggtaacggcaagctatgttgatgaatccatgtcaaacttgagccaagctgccaaagatgcaggtgtaactatactttgtgaaatgggcctagatcctggcatagatcacttgatgtcaatgaagatgattgatgaagctcatgcacgaaagggaaaaataaaggcatttacatcttactgtggtggattgccatctccagctgcagcaaacaatccgcttgcctataaattcagttggaacccagctggtgcactccggtcagggaaaaatcctgcagtctacaaatttcttggtgagacgatccatgtagatggtcataacttgtatgaatcagcaaagaggctcagactacgagagcttccagcttttgctctggaacacttgccaaatcggaattccttgatatatggtgacctttatggtatctccaaagaagcatccaccatatatagggctactcttcgttacgaaggttttagtgagattatggtaaccctttccaaaactgggttctttgatgctgcaaatcatccactgctgcaagatactagtcgtccaacatataagggtttccttgatgaactactgaataatatctccacaattaacacggacttagatattgaagcctctggtggatacgatgatgacctgattgccagactgttgaagctcgggtgttgcaaaaataaggaaatagctgttaagacagtcaaaaccatcaagttcttgggactacatgaagagactcaaatacctaagggttgttcgagcccatttgatgtgatttgccagcgaatggaacagaggatggcctatggccacaatgagcaagacatggtactgctccaccacgaagtcgaggtggaatacccggacgggcaacccgccgaaaagcaccaagcgacgctactggagttcgggaaggttgaaaatggcaggtccaccactgccatggcgctgaccgtcggcattccagcagcaataggggccctgctattgctaaagaataaggtccagacgaaaggagtgatcaggcctctgcaaccggaaatctacgttccagcattggagatcttggagtcgtcgggcatcaagctggttgagaaagtggagacttgaaagttccctgatacacagataaagatagtatgatatagcagggcacatgtatcttttgtattaactccgttctggaatatatatttgtgaactaaaatgtgacaaataaaaagaacgggtggagtatattgtaagagacggcaaagaaacctctgtatatatgacctgtcgatatcaaataatgccgatcagttagttggcttggctc

SEQ ID NO: 13820 - DNA, 607 bp, Zea mays
  Clone ID: LIB143-050-E5_FLI
aagagatgctcagacatttctttgaggacaccttcgtcgtcactagactcgaccctgatggcaaaaagtttgatagagtttctcgtgttgaagctcgcagtgagcagttagatatgtatatgcagctagatgttgccacagatgtttatcctatgcatgctggtgagaaatttaacatggttatagcgcctactctgaatttggatggcaccccagatactggctactatactcaggctggcagaaaaactctggcagacaattatgagtacgtcatgcaagggaagctttacaaaatctcagaagacacatcatccagccaaaacgctaaagtggaaatgtatgcatcgttcggcgggcttcttatgctgctcaggggtgacccttccactgccgctagctttgagcttgatcagaggctctttctgctcatccgcaaggtgtaaaactgtggttgctgaccacttaggtgtttgccttgctcgtcacttatttaatttccatccgtgggtgaagcttgttatatactgttgtaagtactgttttctatatcgccatggatttatggtagacgagttcatgtttcttgctaaaaagattgttatcc

SEQ ID NO: 13821 - DNA, 1529 bp, Zea mays
  Clone ID: LIB143-050-F1_FLI
ctcacttgcatttttggcacaccagaacagaagaagaaaaaaaaaacaggcactgagctgagatggcgaagcacttggctgccatgtgcaggtgcagcctcctagtgcttgtactgctctgcttgggctcccagctggcccaatcccaggtcctcttccagggtttcaactgggagtcgtggaagaagcaaggtgggtggtacaactacctcctggggcgggtggacgacatcgccgcgacgggggccacgcacgtctggctcccgccgccgtcgcactcggtggcgccgcaggggtacatgcccggccggctctacgacctggacgcgtccaagtacggcacccacgcggagctcaagtcgctcaccgcggcgttccacgccaagggcgtccagtgcgtcgccgacgtcgtgatcaaccaccgctgcgccgactacaaggacggccgcggcatctactgcgtcttcgagggcggcacgcccgacagccgcctcgactggggccccgacatgatctgcagcgacgacacgcagtactccaacgggcgcgggcaccgcgacacgggggccgacttcgccgccgcgcccgacatcgaccacctcaacccgcgcgtgcagcaggagctctcggactggctcaactggctcaagtccgacctcggcttcgacggctggcgcctcgacttcgccaagggctactccgccgccgtcgccaaggtgtacgtcgacagcaccgcccccaccttcgtcgtcgccgagatatggagctccctccactacgacggcaacggcgagccgtccagcaaccaggacgccgacaggcaggagctggtcaactgggcgcaggcggtgggcggccccgccgcggcgttcgacttcaccaccaagggcgtgctgcaggcggccgtccagggcgagctgtggcgcatgaaggacggcaacggcaaggcgcccgggatgatcggctggctgccggagaaggccgtcacgttcgtcgacaaccacgacaccggctccacgcagaactcgtggccattcccctccgacaaggtcatgcagggctacgcctatatcctcacgcacccaggaactccatgcatcttctacgaccacgttttcgactggaacctgaagcaggagatcagcgcgctgtctgcggtgaggtcaagaaacgggatccacccggggagcgagctgaacatcctcgccgccgacggggatctctacgtcgccaagattgacgacaaggtcatcgtgaagatcgggtcacggtacgacgtcgggaacctgatcccctcagacttccacgccgttgcccatggcaacaactactgcgtttgggagaagcacggtctgagagttccagcggggcggcaccactagactagacccattccgcccagcaacccctacagataattctcttttcaggtccattttgaacctggaaaagaaatttaagagaggctaaataaccggaatacgattgtgtactgagcttctttcagctaattattgaaagaagattat

SEQ ID NO: 13822 - DNA, 1256 bp, Zea mays
  Clone ID: LIB143-050-H1_FLI
tggctccgcgctctcttccgccgccagtccgccggctcaactccagccgccgcgtgcccctcctctccccacccgatgcgggccctcgcgcgcgccgcgtcgctgctccgccgcgcctcggggtccgcgcctactacggcgtcgctgtaccatccgccgcggaacgtaggcccttgcctcgtgaagaatctgccaggtttctttttcaatgggtattctactcttttggctccaccaaatgaagtgttgattccaccagaactcctttctagcaggactgtgtggacaccagatcgggagcttgggcagtatgaagacctggtagctagggtcacaaacttccataatgaggacaagggcttcatggttttggatggcgatgtttttgatgttccaattaggaaggacattgttcaccgagtagtaaggtggcagcttgctaaaagacagcaggggacacactcaactaaaactatcagtgaagttagtggcactggaagaaagccttacccgcaaaaaggaaccggaaaagcacgacatggaacactgcgcggtgcccagtttcgtggtggtgcaaccatgcatgggcctaaacctcgaagccatgcaatcaagctgcagaagaaagtacggcggctggggcttaagattgccttgtctgctcgaactgctgaggggaagctcttgatctttgaggacttggaagttcctagccacaagacgaaaaacattgtgcaatacattagacagatggatgactcaaagaaggttctgttggtggatggaggcgacattgataagaagctaaagttggccactcaaaaccttcactacgttaacgtacttccttccattggcctcaacgtctacagtatcctccagcatgacacccttgtaatgactcgggccgctatcaacagaatcgtcgagcggatgcatacccccatcaaccgctagcaaggagggttctgagtcgcaccactgtttcttacagccagcaacctgtgctttttcgtcccctgttaaagctcgaaggtttcctgttatcttggtgctaacatggagctgcgacgtcagctgtttattttctgtcagactgaaggcaccgaccgagataggagggaaatgatcgggccttttgtaagcaggtcattggatgtttattttagattatttttttggcgttttacccacactacccttgaaacttagtgagtacttatctaccaaataagattatataaattggattatat

SEQ ID NO: 13823 - DNA, 795 bp, Zea mays
  Clone ID: LIB143-051-A12_FLI
gatccttgtccctacgaccagcgacacgcactctgcacccagcgcgagaaaaaactacatcgatcatcaccagcgagccagccggccgagcgagcagcaccgatggcggcgtacatgcgcgtgacgcaccgcgacgaggaaggcaagaaggtgacggagaagatgccggtcccggagacgcggcgcccggacacggccaagcacttcgagcgcaagctggaggagcagggcctccaccgcttcgagcggcacccggcgaacgcgccccggggcgtgggcatcggcgccccgccgcccaagtccgggcgcggcggcaagtacacctgggagggccccggcggcctcgtcgaggaccagctcgacccggcgccgcccgccatcgaccccaacgaccccaactacgaggaggcggaggagggaggggcggcggacgtggacgacgaggcggcggccagggaggtggtcgtcggggaggtggaggtcgctaaggtcgccgagagcagggacggcgtcgccagggtcgacgtcgcgccgggcctgctccaggaccagaagcagtaaaaagacttgtcttttctggatacgtctagactctaagactgtgtgtcagtgtgttcgagtttgttccgtgcagagagtgcacgtcaactccgctttaattaatctgcttttgttaatatttctactgatcagtaatatgaaccggtggttgatatttggatggaccttgctctcggcttaacctgtaaagtttattctctgaagagctcctgcacacagctactgattgggggc

SEQ ID NO: 13824 - DNA, 1064 bp, Zea mays
  Clone ID: LIB143-051-A9_FLI
gctctgaacaaatttattgctgatcgttattcttggaatcactcagtatcagaataccatgtatacgagttctttaagatatggaactgttctcgagaaagagctaattttcttgtccacgagttcttcacaacccattacttccaagatggcattcatcctattccgggggctcgagatgctctccaaactctttcttctttctgtagcttgtctgtagtaacatctcggcaggatgtaattaagaatcacacattggaatggattgagaagtattatccaggcttatttgagcagatccatttcgggaatcattttgctttggaaggtcaatcaaggccaaaatcagagatttgcaggtctttcggcgctcaggttctaattgatgacaaccccagatatgctctagagtgtgctaatgatggcatgagggtccttctgttcgattacgaaagctcgtatccttggtgcaaaactggagccgatgaactccatccgctggtgacaaaggttcacaactgggaagaagtcgaggagaaacttctctcttgggtagtacctgatagctgacactcttctgtcttgtgagaagcactgcttgagaccagcaaatgattccttttgcctggtttctaaaggaacctgatagggtgaaagactgcaatgttcctagagcttgattttcaatacagatgtcgatagcctctccaagagtcattctaaaacccactctaaatcatcatcagaagagtcatttgcataaatttgactccaactccaacagtttttctatatcctgggatatttttcattaaactctctattcacaataattagttaggatatggagagtcttggggatgttgtcaacgtaagctaggatattcagcttcattaccgcagcctggttgaggcatattcgactgtacttggtcagtctgagctgtaggcgcttctgctctcacacatcagaatcttgttttatccttttgccgcagccgggtgtactatgtatatatcgacgctgccatatggctaagatggtatttgaattgttctaatac

SEQ ID NO: 13825 - DNA, 973 bp, Zea mays
  Clone ID: LIB143-051-B5_FLI
ctaagatcgagctccagcagcagcaagtcaagttcgggagagagagagacacagatcgatcgatggcgatgatgaagaagaagggcggcgccgcaacaacagcggtggcagcagtggcgttggtcctgctggcggcggcggcggttagggcggacgtgaactgcgcggacgtggacgcaagcctgcgcccctgcgtcggctacgtgacgggcaaggaggcggccccggccgccgagtgctgcgccggcgtgaagcggatcagggccatgccgtccggcccggcggagcggcggcaggcgtgcgagtgcgtcaagcaggcggcggccaattaccagccgctcaacgccgacgccatccgcgacctccccgcgcagtgcggcgcgccgctgccgttcccgctcaccctcaacttcgactgcaccacgtgcgtatatatatatatactaggtttgggacctccatggaggaaggctagtcctttcgcggcacctagagcaatcttcatcctgttggaccaaggtactcagggaccctcagctcctcaacagtgagctcgctgacattgaccctcagctcctcaaaatgtgagctcactgacattttgccacaacatcttaccgacgtggaggtctagatttgtcgcccctgtcacgctccctgacagtgccactcatcggaccagcgatcgagcaatgcccttccgccttgctgttttcctgtccggttgccgacgagcctccaaaccctattgtataagtacttatggaattacaggaacattttttatggtgcaaccccatcacttccatcagcacaacacttctacaaagatgagttgagcctctagtccctaaaaactctaggagctatttttttggtcgcagagagggtccagtgcgagtgttttcagtaaggtcggttcattgtttacatgtatattagatgattaactttggtgttttgcttcaacttt

SEQ ID NO: 13826 - DNA, 714 bp, Zea mays
  Clone ID: LIB143-051-F1_FLI
gctctggaggaatttgagaaaataagagaggagaagaggaaagcactacttgcattgaaggctgaggagaggaaagttgaagttgacaaggatttgcagtctctgcagccactttcaaacaagaaagaaaatgatgaagttttcattaagctggttagtttccctgtaattaatgctttgataccttaagtttgctgagctttgcacgggttcttcgatgttcttttgttctcgtagggttctgacaaggataagaagaaggaaaatgctgagcgtgatgagcgtgccaagaagtcggtgagcatcaacgagttcctgaaacctgctgaaggagaaaggtactatggcggccgtggccgtggaaggggccgtggggagcgtggtggttttagaggcggatacggagggggatacagtcgtggcccagctgctgctgctccatccattgaagatcaagctcagttcccaagccttggtgggaagtgaagggcgcccagctgctgctgtcaccgagcgttgtgttgtctgctgttgtcatatttaaattttgtccgacgttaaatttctgtgccacggtttaaacggaacaaataatgatgttgcatgtggctatctttagttatgtggtacttgacgttgaataccggagttgttgtttatcagaattaacctccaatttttgtaggccatcttttaccattttgttgtcttagc

SEQ ID NO: 13827 - DNA, 715 bp, Zea mays
  Clone ID: LIB143-051-F3_FLI
ggacactacacagcgcgcgactgacatgtcgatgctcaccagcatactgggccgcaagcatcagcagccgccgccgccgccgcagcagcagcagcagcagcagaagggcggcggcgcgcgcactggcaccggcgccggcgccggcacggaggcggcggcagtggagccggtgagcatcgacatcgcggagcaggggccgctagtggacgccatcacgctggcggcgttcgcggcgccggcgctaggcctgccgccgttcgcgacggccagcatggactggaaggagacgccgacggcgcacgtgttcatggccgacctccccgggctgcgccgcgacgaggtgaaggtggaggtggaggaggagaggctgctccggatcagcgggcagcggcagcgcgccgccgaggagaagggcgaccgctggcaccgcgtcgagcgcagctccgaccgcttcgtgcgcaccgtgcgcctcccgcccaacgccaacaccgacggcgcgcaggccgcgctccaggacggcgtgctcaccgtcaccgtgcccaaggacaacgaccgcaaggcctacggcaggctcatcaccatcaccaattaattaattatatatatatatatatatatatatatatatattaatcatatatatatatatattgtcattatatatgtaagcagcatgtgtatcgttatcatcaccgaataaaaaaatgattatgcc

SEQ ID NO: 13828 - DNA, 878 bp, Zea mays
  Clone ID: LIB143-052-E6_FLI
atcatccgggatgcaatccttgccgaggggagtcctgctccagtagtggtatcagaaggggcaaataccatggatgttggcagggctgtacttgtgcagaatgaaccaaggacaagactggatgcagggacatgggggacgatgggggttggattggggtactgtattgcggctgcagcagctgaacctgaacgactcgtggttgctgtggagggcgattctggattcggcttcagtgcaatggaggttgagacgttggtgaggtaccagctgcctgttgttgtaatcgttttcaacaacaacggtgtctacggcggggaccggagaagccctgacgagataaccggaccctacaaagatgacccagccccaacctcttttgttccggcagcagggtaccataagatgatggaggcttttggagggaaaggctatcttgtggagacaccagacgagctcaaatctgccctttcagaatcgttccgcgccaggaaaccagcggtgattaatgttatcattgatccttacgctggcgcagagagcggtcgaatgcagcacaagaactgaaggcgcttgcttggcttttgtaccataccatagcaggatgcagatgcgacttgatacaaataagcagcaaccgtcaatcaatccatttgtttcttccttacgacctcgcttcgttgttcgtggtacagatgtggggcgcttttaattggaagtcccatttgaaggcatgtgaatgtgttatgattatctaaatgccacgatgcaaactttaaaggcgtgttgatgatgatgtgtggaaaacctgtgcccatatatgagcctgtataattatttctcaaagtaataaagtcagcgttttagggcttgtttgg

SEQ ID NO: 13829 - DNA, 1222 bp, Zea mays
  Clone ID: LIB143-052-E9_FLI
gcgagagacgggcaggggagaggaaaaaaaaatctaaccctagcatccgcagcgctagggttcgggggttgcgatggcggcggcggcgagacagcgggggacggtgaagtggttcaacgacaccaagggcttcgggttcatctcccccgaggacggcagcgaagatctcttcgtgcaccagtcgtcgatcaagtcggagggcttccgctcgctcgcggagggcgaggaggtggagttttccgtctcggagggtgacgacggccgcactaaggccgtcgacgtgaccggccccgacggatccttcgtcaggggcggcggaagcggaggaggaggcggcggcggctacggctcccgcggcggtggcggatctggcggcggcggtcgcagctacggtggtagctggggcggcggccggagatccggcggcgggggcggtcccggcgcgtgctacaagtgcggcgagcccggccacatggcaagggactgccctagcgccgacggcggaggcggctacggcggaggcggctacggaggaggaggcggcggcggcggtggctgcttcaagtgtggcgagcctggccacatggccagggactgctccagcggcggcggcggctacggcggtggcggcggcggcggtggaggcggctgctacaactgcggccaggccggccacatggccagggactgccccagcggtggcggcggtggcggagggaggttcggcggcggcggcgggggtggcggcgaccgctcctgctacaactgcggcgaggccggccacatcgcccgcgactgccccacgtgaggtgtgtccgcgtccgtccgtccagccagatcagatcggatcgctccaccacctgctggtctgatggcgccgcccccttctagatctcgcttaaaaaaacacccccctctcgctgtgtgtcggagtaccgctttagttttgccgatccgggcacgagtgcccgctgcctctttcctctcatgcgtaagaggaacccgtccgccgttttcagatttcgttcggtccgtagaagaactctcaagttaagttaagttatcatggtgtgtgcttggtcgttgttcgtcgtcgtcgttaaggttttaagagatgatttggtcctgtgttgccgaggggaagtcgaatctgcttttttctttttttgtggtttgttccaccagactgaggaaggagatgagatgattattctcccagatt

SEQ ID NO: 13830 - DNA, 1152 bp, Zea mays
  Clone ID: LIB143-052-G1_FLI
gcaagcgcgcgcgcacacagagagagagagagagagagagagagagacaagacaacagcaacagatagaccgggccaagttcgtgagtccatcgtgtacatacggccgagtggcgacgccgtcgtcttcaccacgcacgccgcgcctcttccatagtctcgctcgcctccattaattccaatcctctctcctccgctagcgctccaccagcacgcaccggcagatgaagaacatggcgtctacgacggtacggtgatcaccttcatcatcacatcactcgttcatcgcccgccggcccgccggttgttggtaggccagggtcagccactcagccgagccagccatgaagctcgtcgtcgagatctccgacgcagccgacctcgcccccaaggacggcaccgcctcctgcaacccctacgtagaggtggacttcgacgaccagcgccagcgcaccgccaccaagcccgccgaccgctccccgtactggaaccagacgctggtcttcgacgtccgcgaccccgcgcgcttcccttcctccccatcgacgtctccgtcttccacgaccgacgcctccaggaccacaacgccctccgcccacagaccttcctcggccgcgtccgcatcaacggcgcctccgtcgcgccgtcgccacaggaggcggtcctgcagaggtacccgctcgagaaacggagcttcttctcacgcgtctcgggcgacatcgcgatcaggatctacctcgtcggagatgatgtcaataatgaaagcgtacaggttcctgctcctcccaaccaccaccaccacccgcagcagcagcagcagcagcaggagtcggtcgcggctgctgccgccaccggagatcccgaaaggatggtcaggtccgccttcgcaccacagcagccgtcggcggttgagcagccagcggcagctgggaacggcggggatgagcacgaggcacgccctcctcgcatcttccgctccgtgccagcagccgagccccgccgcgcgacgctccacgctgtggccgcgcctcctcccccgcccggccagacggtcgtcatgcccaaacccgctgcctccgcccctcccggcccgcttcggcctggtcgagaccaagccgcctctgccggccaagatgggcccgcgcgcggccgc

SEQ ID NO: 13831 - DNA, 389 bp, Zea mays
  Clone ID: LIB143-052-G12_FLI
cacgagcactgcatcggtgaatctgcaagcccgcccgcccgtcgctcgccaccgccatgttcggcatcgtcttcccggaccacacctttcccctcgacgccaccgctttcgcgcaggtggcgcccaattcctgggtcctcgatctctccactctcgcgctcgccgccgcgccgcgctcggcagtcgtcttcctgctccccgctgccgtgacagcgctgccgcccggcaaggccgtctccgtctacttccaggccgccaccaaccgccccttcgcattcttaggtgcgctcgggcccacgcgcccctcggccagcttcccgcttccggaggccggcgacgagccggagcctgctgtgggccccgctaaactgggtgtcgccgtggaggac

SEQ ID NO: 13832 - DNA, 1126 bp, Zea mays
  Clone ID: LIB143-053-D12_FLI
gtcgcgcggcaagagcttcccggcccgaaaccgaaagcaccaccaccaccaccaccaccaatctctgcgttttccgtctgcggcggcggcggcagcagcggaggaggtggacgagatgctgtccgccgacatccccccaaaccagaccatctacctcaacaacctcaacgagaaggtcaagaaagaagagttgaagagatcgctttatgccctgtgctcgcagtatggaaggatactggatgtggtggccctgaaaacacagaaactgagagggcaagcatgggtggtgtttagcgagattacagctgctaccaatgctttccgtggattgcaagactttgatttctacggcaaaaaaatgcgagtacaatatgcaaaaacaaaatcagattgtattgcaaaagaagatggtacttatgcacctaaggagaaaaggaagaagcaagaggagaaagctgctgagaaaaaacgacgagcagaagaggcacaacaagctggccccaatgctgctgctgctcaaagcaatggaactggctatcaagcgtctcgtctggccaaggcttcgcaggagccacctgctcctccgaacaacatcctcttcatccagaacttgccagaccagaccacgagcatgatgctccagatcctgttccagcagtatcccggcttccgggaagtccggatgatcgaagccaaaccaggcattgccttcgtggagttcgaggacgacgggcagtccatggtcgcgatgcaggctctccagggcttcaagatcaccccggagaaccccatggctatatcctatgccaaaaaatgagaaccctcgcggaatccctgtacccaatacccataatattttccgttccgccatccggaatcgagccacagtatctagtctactttccggccatgtatttttggaaagcacttgcttaatttagaagttagactcttgccacttttaaaccgtgtttggtgctcagtctttatgttgtgcctgcttttgctcttgtcaagtctggtattgtgcctatatataggccttgttcgtttgtgccggattggtgggtcagaacgattcctaaccggattgcttgtctaatttatataaactttgattagctgg

SEQ ID NO: 13833 - DNA, 896 bp, Zea mays
  Clone ID: LIB143-053-E2_FLI
atcgccgccccgggtgggctctagatcccgatggcctcgcgccgccgcaccctgctcaaggtcatcatcctcggcgacagcggggttgggaagacgtctttgatgaaccaatatgtgaacaagaagttcagcaaccagtacaaggctacgattggggcggatttcctcaccaaggaggtgcagttcgaggacaggctcttcactctgcaaatatgggacactgctggtcaggaaaggtttcagagtcttggcgttgcattctaccggggagcagattgttgtgtcctagtctatgatgttaattctatgaaatcgtttgataatcttcacaactggcgtgaagagtttctaattcaggcgagcccatcagatcctgacaatttcccttttgttctgttgggtaacaaagttgatgtagatggtgggaacagccgtgtggtgtcggagaaaaaggcaaaggcatggtgcgcctctaaagggaacatcccgtactttgagacgtctgctaaggatggaacgaacgtggaagatgccttccagtgtattgtaaagaatgctctgaagaatgaaccggaggaagaattgtatgtgccagataccgtggatgtggtaggtggcaaccgggcccagagatcatctggctgctgttaagacatgaggcatccacgaggcgtggtgatcatcatcggctatgcagtgatcaaacaatacctccttaacattgctgggcctccatggttatctacgtgtccgtattccatttgttacctttccagtctcctgctatgtacctttcccatgctgtcagtcaatccgtagacttcatttgtgcagttccatcagtagcgtcataccttgtgaatacagttggacaaaataagagcaagtctgaactg

SEQ ID NO: 13834 - DNA, 899 bp, Zea mays
  Clone ID: LIB143-053-F2_FLI
tttcattcgccgccgccgcctcctctctgctgccgtcgccatggggagaaggcctgcgagatgctatcgccaaatcaagaacaagccataccccaagtccaggtactgccgtggtgtccctgaccccaagattaggatctacgatgttggcatgaagagaaagggtgttgatgagttcccctactgtgtgcaccttgtctcttgggagaaggagaatgtctccagtgaggctcttgaggctgcccgtattgcctgcaacaagtacatgaccaagtctgcaggaaaggatgccttccaccttcgggtccgggttcaccccttccatgtccttcgtatcaacaagatgctttcgtgtgctggggctgataggctccagactggaatgaggggtgcctttggcaagcctcagggcacctgtgctagggtggacattggtcaggtactcctttctgttcgatgcaaggacaacaatgctgcacatgccagtgaagctctgcgacgcgccaagttcaagttccctggccgccaaaagattattgagagcagaaagtggggcttcaccaagttcagccgtgccgactacctgaagtacaagagtgagggtagaattgttcctgatggtgtcaacgcaaagctgctcggtaaccatggaagacttgagaagcgtgctcctgggaaggctttcctcgaggccgttgcttaagtccaatctacagttggaatgcgaatccagacgttttgctttagcctatcttattttgctttgtgcaacatgaattttaagtgtatggggtattacagtgccttgtcttgtgtgaacctgcttatctcgtgctgaacatcgttatgcatggaagtacttatcttttgttctgctaaaaattaagtgttctgcgtct

SEQ ID NO: 13835 - DNA, 2195 bp, Zea mays
  Clone ID: LIB143-053-G1_FLI
aagcaaagcacgcaatccaatttccctccatttctctagatctcgagttgctctgctacttcttttagattccttctttcgttcgggagagcgattctctagctggtggcaatggcgaagggcgagggtccggcgatcgggatcgatctcggcaccacctactcgtgcgtcggcgtgtggcagcacgaccgggtggagatcatcgccaacgaccagggcaaccgcaccacgccgtcctatgtcgccttcaccgacaccgagcggctcatcggtgacgccgccaagaaccaggtggccatgaaccccaccaacaccgtcttcgatgccaagcggttgatcggcaggaggttctctgacccgtcagtgcagagtgacatgaagctatggccgttcaaggtcatccctggccctggtgacaagcccatgattgtagtctcctacaagggtgaggagaagcagttcgctgctgaagagatctcctccatggtgctcatcaagatgaaggagattgctgaagcctacctcggctctactatcaagaatgcagtggtgacagtgccggcctatttcaacgactcgcagaggcaagccaccaaggacgccggtgtcattgcgggcctcaatgtgatgcgtatcatcaacgagcccactgctgctgctattgcctacggtcttgacaagaaggcgagcagctctggcgagaagaacgtgctcatctttgaccttggtggtggcacgtttgatgtgtccctcctcaccatcgaggagggcatcttcgaggtgaaggccaccgcgggtgatactcaccttggaggcgaggatttcgacaatcgaatggtgaaccacttcgtccaggagttcaagcgcaagcataagaaggacatcagcggcaaccctcgtgcactgcgccggctgcgcacggcgtgcgagcgcgccaagcgcacgctgtcatcgaccgcccagacgaccattgagatcgactccttgttcgagggcatcgacttctactctacaatcaccagggctcgctttgaggagctcaacatggacttgttccgcaagtgcatggaacctgtggagaagtgcctgcgcgacgccaagatggacaagagcagcgtgcacgacgtcgtgctcgtcggtggctccacccgcattcccaaggtgcagcagctgctgcaggatttcttcaacggcaaagaactctgcaagagcatcaaccccgacgaggctgtggcgtacggcgcggctgtacaggccgccatcctcagtggcgagggcaacgagaaggtgcaggacctgctcctactcgacgtcacgccactgtctctcggcctggagactgcaggtggcgtcatgacggtgcttatcccgaggaacaccacaatcccgaccaagaaggagcaggtcttctcgacgtactccgacaatcagccgggcgtcctgatacaggtgtacgagggtgagcgcgcgaggaccaaggacaacaacctcctcggcaagttcgagctctcgggcatccctcctgctccccgcggcgtgccccagatcaccgtcaccttcgacatcgacgccaatggcatcctcaacgtctctgctgaggacaagaccaccggccagaagaacaagatcacgatcactaacgacaagggccggcttagcaaggaggagattgagaagatggtgcaggaggctgagaagtacaaggccgaggacgaggaggtcaagaagaaggtggacgctaagaacacgctcgagaactatgcctataacatgaggaacaccatcaaggatgacaagatcgcctccaagctctcggcagatgacaagaaaaagatcgaggacgccgtcgatagcgccaccagctggctggacagcaaccagctagctgaggtggacgagttcgaagacaagatgaaggagctcgagggcatctgcaaccccatcatcgccaagatgtaccaaggcgctggcgcgggcatgggcgatgcggctggcatggacgaggatgccccgtctggtgggagcggtgctggtcccaagatcgaagaggtcgattaaattggttagcatcgggcggtttgttttggtgtggtctgaagtactcctgaactctgaaggttgtctgtgagatggggtggtgtccacagtctgtgggctgtggtcgaacttcttaataaatataagttttagttcct

SEQ ID NO: 13836 - DNA, 3012 bp, Zea mays
  Clone ID: LIB143-053-H11_FLI
gtctccgcttctcgtgttcttgttcgtctccgcctcaggcaaactccacacggacacggtcacacctcgctcgctctcgctcccgtatcgcggtttccttttcgaagccttgctaggtttagctggggcctccgtctatcctgtcaatggccccttaggcggctgtacttcagacttcagaggtgacgtgaggcgtggggacgcgcgtagctgattggttcgaggaggcggggatggacccggacttctcgccggcgagtgggggcccgagctttgagttcgccttcaactcggtcaacttctctgaccgggtgttgcggatcgagatcgtcgctggggatgacgccctcggggccaagggcgccaccggcgaggggtgctcatctcttgccgactgggcgtgccaccgcaagcgacgacgggaggagctccgacgcgacaaaggtgagagaggatttctgattatctttttttttttcatattccctagaatttgcgaattggctgtggattccaaactggggaaagacagtggttggttgtttgaattgaattattccatgcgttctctggaacttttgaggtgatttgatttgaccttaccatgtgctcgggctttactaaagccttcggcctcaagtgctaaaatcccccctttctattcaaaataggaagggtattttagcccccctcgttcccctccaattccctgactcccaaactagccccaagtgttgtgaaggcactttttgttttaatcgaggctgtgaaatgtgggattgtggttctctttttcaatcctttgagttggcgtagtggcaattcagattatcatttactaagcaatctgttaccaatgaaatgaccaagtggtggaaattagtggggataattattgcaattgacacttggctgtgggtgatatgttctgctgtattggcacgatgtcattcatctctgcatttggtttgtgcaaactaattatttgtatgccctaccttgatcaatgcctgtaatatgatttacataatcatgaacatatgaacaacacactcaagaccagcctgtgcgaccgaacaaagcttgcaagtttgggatgtaatctctttggctattgctgcatcggttgtaaatgaggaagaggaaaggagcgaggaagaagataaagaagggagagtgtcaagggggtgcatatcttggctgttggatcgatccaacacccaaaaaatgtgattgaagccatagccaaatatcaggcaactgataaggatgctgatctatattagtgatatttttttgtgctgaccatcatgccttggcaatttactatctcattttctttcactgattgctgtaatttccagtttattcccatcttatgtctttcatagttctgcatgatcttcaactatcaaatttatcatgcgtataacttttgaactactgttttatggacccagaatctagaaaatacatgccagatccagcaaactgcaaagttgaagctgaagaatgtgatgcctacgaggaaggcaatgagcctgtagctatgatagaagaatctccgcctgatattgaggcagatggtgaggatggaaaaagcagcgactcatactgtagtatggagtgtactcaggttttgagagttaagtctatgtacatcagctctgcaattctagctgcaaagagccctttcttttacaagcttttctcaaatggaatgaaagaatccgaccagaggcatgcaactcttaggataactgcttcagaggaaaatgcgcttatggagcttctaagctttatgtatagcggcaagttgacgacaaaccagccaactgtcctgctggatatattgatgatcgctgacaaatttgaggttggttcctgtatgcggcactgcagtcaattgcttagaaatttgcctatgaccacagagtctgcactgctctatctggatctaccttcaagcatttcaatggctgctgcagttcagccattgacggacaccgccaaggaattccttgccaacaaatacaaggatttgactaagttccaagatgaagcaatgaacattcctcttgctggaattgaagccatcctatggagcaatgaccttcaggtcgcgtcggaggatgctatctacgacttcatgataaagtgggcacgtgctcaatacccaaaattggaggaaagacgtgagatcttgggcacacgcttgctgccccttgttcggttctgccatatgacctgcaggaagttgcggaaggttattgcctgcagtgatctggatcacgagcaggcgacgaaatgtgtcacagaggcacttctctacaaagctgatgcaccacataggcagcgtgcccttgcagcagacgtgatgacatgtaggaagtatgctgagcgagcttacaaatatcgcccgcttaaggttgtagagtttgataggccgtaccggcagtgcatagcatacttggacctgaagcgagaggagtgcagccgacttttcccatctgggcggatatactcgcaagctttccatctagctggacagggcttcttcctctcagcacactgtaacgtggaccagcaaagtgcgttctattgttttggtctcttcctagggatgcaagagaaagggtcgacaagtgttaccgtggattatgagttcgctgcaaggacaaggccgtcaggcgagtttgtcagcaaatataagggctactatactttcactggcggtaaggctgttgggtaccggaatctctttgcgatcccgtggccgttattcatggctgatgacagtctcttctttatcgacggggtattgcatctcagagctgagctgaccataaaacaaccctagatgaggccgtgtttgtgccgcgcgcgtgtccaaatccatgcaatggtgttctgcagtgtagaatatggaaatcttgtgtgctgttttgttttgaaaacgacaactcaattctctcttgttcagttgtttgtacacctgaggaggatcatgtc

SEQ ID NO: 13837 - DNA, 512 bp, Zea mays
  Clone ID: LIB143-053-H12_FLI
ggattccgtatttcgggttgtgcgatgctttgaggatgatgatatagttcatgtcaatggcaaggtcgatcccagatcagacattgatgtcattaacctagagctgatattttcggatcttgaacaaatagagaagaggttagataagcttagcaagagcaaaactaaagatacacaagtaaaagtgaaggaacaagcagagaaatcacgattggaaaaaattcagcaagcacttatggaaggaaaaacctgcaagatcgatctatttggctgagcatgagaaacaagctataaaacatctttatctgctaactatgaaacctgtcatttatgttgctaatgtaacagaatcttatcttgctgaacctgatatcaatcctcatgtcaaagaggtgtctaaaccaacatcagacttgcagtctggtatggttacaataccagctcgggtttattgtatacatcgaagtacaagaacctttgaagaaatttctgataaataattttatattttt

SEQ ID NO: 13838 - DNA, 649 bp, Zea mays
  Clone ID: LIB143-054-A9_FLI
attggatcttttccccttttgttgtgctcatctcatgtggttctgtgactgctgagagataggtgggcgaggcagccatggagttgatggtcggaggcagatctgcttggatgcaagtggagagggggctggcgcgccgcacgcggcacctacctccagcagcggcgccagcgccggcggcttcttgtagatctggaagcgccaatattttcttctctagccgtttagcaatcatcatatataggaatgtggacgtgctccatgtacctcttcccctactaatcaagcaaggtagcaagaatatgtactgcttgggaccatgagatgctagagcctgacatgctagagccctcatcctccatgtttgatgtggttatcatctgattcaagtaaccttgtcacttgggcaggtgtcatctaaagaaagaaaaagagaggttcttggaagccaaatccagagttgatgctgacttcagaagaaaggggtaccttgtattagtggattcatacacgaaggtcactaaaatggaatggtttttccacatagatagagcacaaaataattgatctcgatctagatgaagttaattttgtgtacaagttatttttcatgcatggattaatgatcaacacgcgtacttattttcct

SEQ ID NO: 13839 - DNA, 1086 bp, Zea mays
  Clone ID: LIB143-054-C8_FLI
ggacttttcttccttcgcctctacaggtttggaatcggcgctgtccgtcttcgctcttctcgccagggcaaattaaagctacaatgcaggctgcctactatgcaaaggatcttttggtttgaagtccagttgaccgaagttggaaaatacttctgatacttacagatttcacagaggtcttgtttattttctactattttccttcaagcacgtggaatagtacgtttgacaaacaatttgctgacgaggttttcgaacacggctgaacacgcgcgcaaggcgtgcacagtacacgcgcgcagggggaggaggagaacaagaggatggtgaaggcaaggcccaagccaacgccggtcaaggcggccccagaagtgatcttcgacccaatggcctctggtgcccggaagccccgccgcccaggggcgccgtcagccagcaaagaatggcacagcttcatgggatcgagtctgtcggatatgtatcggaagccagttttggagaaatctgctgacacatctgatgaggagcctgacattgatatcatgaagctgctgaaagatgttgagatcattggtgcccctacatttaaggggcgaaagcaaatcgagaaccgcagagtagttgagttgggtggaaagtccgttaagaagcaccgcacaccattaagtgttgcgaagccagctctgaagaatcagaagaaacgagaacagaagaaaatggaagaggaaaaactacttgggatctttaggaagagggacaaggacaccaaacctcacaagacaaggccagaggaccgagtgcttagggccacagaagggcgctttaggaacggtatactgaacgtcaagcatcttctggcgccaccgaaaccatcaggcaaggacatgtcggaaccgaagatgaggaaggacaagcacaaggggaagggtaagcagaaggggggcagaaggaagagacgttgaagaaagcacacttctgtaacctggtttgctattaagaatttaagatagatggttgatgaaacgtttaaatgacaacacctttttgtgtccgtcctgaaattaagacgtttccttgctctgctgg

SEQ ID NO: 13840 - DNA, 1548 bp, Zea mays
  Clone ID: LIB143-054-E3_FLI
ggacctaccgtcgtttgagtcaccataaaaaagcaatgtttagtattcaaattcaacgcgcgctggcgcgcgccattgactagtatttatatagtgggctctccgtaagtttctttgagccgggtagctacacagtacgcacacctatcccggctgcagcgcggttccagccactggtgccacgtggtttgtgctcttgtgggcacactggcctccacccatctctctcacgtctccccatccgcagcaaaggcacacagtacagattcggcccatcgttttatagccacaccatggctaggaagtgctcacactgtggcaactgcggccacaactccaggacctgcgggagagaaaccatgctctgcgaagctggcgacaacggcggctatggcggcctaaggctcttcggagtgcaggtccgtatcggcggcggcggcgcaggctcggcgtccatgaagaagagctacagcatggactgcctgcagctcgcggctcctggttgttccctcgtctcgccgtcgacgtcctcctcgtcgtcgtcgctgctgctgatgtcgattgaggagggatcggagaggggggcgccaaatgggtacctttctgacgggcctcatggcagagctgtgcaggagaggaaaaaaggagttccatggagcgaggaggagcacaggcagttcctttccggcctggagaagctgggcaagggcgactggcgaggcatctccaggagctacgtgccgacgaggaccccgacgcaggtcgccagccatgcacagaagttcttcctcaggcagagcagcttggggaagaagaagcgccgctccagcctctttgacatggtaccgatttgcgagaacagtgcgagcatctccgatccgctgagcagcgaaggggcctcaacctctctgtcgctgaacgtgccacgccacggcgtcacctccgtctccgagagggcggccttggacctgaattcgacggaggaagacgacagcggggcggacgcgtcgtcggcatcggcatcaggtgcagggaccagaccaccgttcccggcagcgcagacggagccgctgcagccttcgtcgcttggccgtggacgcggtcaccactgctctccgttggacctggagctgggcatgtcgctgcctgccccatccatcggaacatgacgcgccgccgccgccgtacttatcgccatggaatcccacgcaggtcgcgccagaattcgtcagcgcaggttgccaaggccgaggccgtgcgtgcctgctgtctcgcacaaacgtcccacgtgtaatcagaatcgggtctgctcctgtatgagtatgactatgccatgttccccgcgcaggattgaaaccgtaaggttacgctagttgctagctttttttttgaacccttgtgaatgatattgttacgaaaaatagctcctaacataggttcactgtgatatatgttatgtacactgtgatatatgttacgtagaccatatgttcgttttgatattaaatttattttttatggttattaaatatgactatgtgtcatctc

SEQ ID NO: 13841 - DNA, 560 bp, Zea mays
  Clone ID: LIB143-054-F12_FLI
ggtcttcttgttcaatccccatctcgatcggggaggccaccaaccaccatatggcgggagggaaggtttactcgttcgaggaggtgaggaagcacagcgaccgcaaggactgctggctcatcatcgccggcaaggtgtacgacgtcacgccgttcatggaggagcaccccggcggcgacgaggtcctgctggcgtccgtcggcaaggacgccaccgcggacttcgaggacatcggccacagcgcctccgccaaggagctcatgccccagtactgcatcggcaaggtcgacgcggctaccttcccggccaagcccgcctacgtcgtcaccaaggacgacgccaggtcgtccgagaaggccgcgacgagcgccggcgcttgggccacgctcctgcagctcgccgcgcccgtcctgctgctggcgctggccttcgcgctgcagcagaactatgccagggccaaggcggagtagacaagatacagatagataccatcgttgattccgctgagtcgcggccgtgcggcctctttggaagcatctgaattacattttcttcctggc

SEQ ID NO: 13842 - DNA, 2099 bp, Zea mays
  Clone ID: LIB143-054-G2_FLI
cctgaagcaacaaacaccagaagcgcaccaactccccaaccaccggagaccgcaccccagcaaaggatggcatctgactccacggccgccgtgacggtggacggcagcgcgcttgcggggcgcgcgctggccgcggcgggcacgcggcacatgttcggggtggtgggcatccccgtcacctccctcgcgtcccgtgccgccgcggccggggtccgcttcctcgctttccgcaacgagcagtccgcggggtacgccgccgccgcctacggcttcctcacgggctccccgggcgccctactcaccgtctccggcccaggatgcgtccacgggctcgcgggcctctcccacgccaccgccaacgcctggccgctcctcatgatctccggatcctgcgatcaggctgacgccggcaggggcgacttccaggagctcgaccagatcgccgccactaagcccttcgccaagctcgccgtcaaggcaacaaccatcgccgacatcccgcgcctcgtcttccaggccctcgccgccgccgtgtccggccgtcccggagggtgctacctcgatatcccgtccgacgtcctccaccaaaccctccctgaatccgaggccgcggctctcatagcagcagcagccgccgattcggccgcatccgatccttccccgtcaatgcacaagtctcttgacgagggaatcgccaaagctgcggacctgctccggtgtgcggagcggcctctggttgtgattgggaagggtgcggcgtatgcgcgcgcggaggaagcgattcggaagctggtggacaccacgggcatccccttcctcccgacgccgatggggaaaggggtcgtgcctgactcgcatccactctccgccacggcggcacgctcactcgccatcgggcagtgtgatgtggctctggtcatcggtgctaggcttaattggttgcttcactttggcgagccacccaagtggtccaaggatgtcaagttcattcttgttgacgtctccgaggaggagattgagctccggaagccacacgtggggattgttggggacgcgaagagagtaactgagctgatcaaccgggagatcaaggacaatccattctgcttggcaaggtcgcacccatgggtcgaagcgatcaccaagaaggccaatgacaatgttcttaagatggaggcgcagctagcgaaggatgttgtgccattcaatttcatgacaccattgcggatcatccgggatgcaatccttgccgaggggagtcctgctccagtagtggtatcagaaggggcaaataccatggatgttggcagggctgtacttgtgcagaatgaaccaaggacaagactggatgcagggacatgggggacgatgggggttggattggggtactgtattgcggctgcagcagctgaacctgaacgactcgtggttgctgtggagggcgattctggattcggcttcagtgcaatggaggttgagacgttggtgaggtaccagctgcctgttgttgtaatcgttttcaacaacaacggtgtctacggcggggaccggagaagccctgacgagataaccggaccctacaaagatgacccagccccaacctcttttgttccggcagcagggtaccataagatgatggaggcttttggagggaaaggctatcttgtggagacaccagacgagctcaaatctgccctttcagaatcgttccgcgccaggaaaccagcggtgattaatgttatcattgatccttacgctggcgcagagagcggtcgaatgcagcacaagaactgaaggcgcttgcttggcttttgtaccataccatagcaggatgcagatgcgacttgatacaaataagcagcaaccgtcaatcaatccatttgtttcttccttacgacctcgcttcgttgttcgtggtacagatgtggggcgcttttaattggaagtcccatttgaaggcatgtgaatgtgttatgattatctaaatgccacgatgcaaactttaaaggcgtgttgatgatgatgtgtggaaaacctgtgcccatatatgagcctgtataattatttctcaaagtaataaagtcagcgttttagggctt

SEQ ID NO: 13843 - DNA, 878 bp, Zea mays
  Clone ID: LIB143-054-H1_FLI
ggggagagcagctgactgcgtgctcctgccttcggtgggcgacggcaggcgatcccagtccagcaccccccctccctccctatctctctgatctctccctcgctctcgcagccgccactgtagaagcttcgaggctgctgctgcgcccatggccgcggaagccaagacgccgtccctcgctgaggaatattcacttccaccacaggaagttccagtggaaaaggcagctgaggagaagccctctagtggtactgagactgaatctgctccttcaaccaatgatgagactccttcatctgtagaagataagaatgaaacgtctgaagtacaagatgctgctgaaaagtcagacgcagaagaaactaacactgctgcagaggaagcaagtgagactgccgaggaggaagaggctgagaaacctgagatcaagattgaaacagctccagcagattttcgtttcccaacaacaaatcaaacgaggcattgtttcacacgctatgttgaataccacaggtgtgtggctgcaaaaggtgaggatgcacctgagtgtgataagtttgccaagtactatcgatccctgtgcccaggtgaatgggttgaacgctggaacgagcagcgtgaaaatggcaccttccctggacctctgtaatcctacaatgcaaaaagaattaggaactcacgatgttgtgccggccttctccttggtaactggcgccaagttagcagggagagagacaaatcatcctctttggagctctctacaaaataagagattctttttgacttgaagaatgccttgttgctcttcctaacggtcttgttctgcgctgctgagataacagcgtcacagttacatttttgtccgtatatacagtttt

SEQ ID NO: 13844 - DNA, 1027 bp, Zea mays
  Clone ID: LIB143-055-A8_FLI
gcgcccccacatctatcgacccgaattctccactcaatggacccacccaagccgccgtcctcggtcgcctcgtcgtcggggccggagacgccgaacccgcacgccttcacctgcgagctcccgcactcgatctacgcgctcgccttctcccccgtcgcgcccgtcctcgcctccggcagcttcctcgaggacctccacaaccgcgtctccctgctctccttcgaccccgtccgcccctccgccgcctccttccgcgccctcccggcgctctccttcgaccacccttacccacccaccaagctccagttcaacccccgcgccgccgcgccgtccctcctcgcctcctccgccgacacgctccgcatctggcacaccccgctcgacgacctctccgacaccgcccccgcgcccgagctccgctccgttctcgacaaccgcaaggcctcctccgagttctgcgcacccctcacctccttcgattggaacgaggtcgagccccgccgtatcgggaccgcctccatcgacaccacctgcaccgtctgggacatcgatcgcggggtcgtggagacgcagctcatcgcgcacgacaaggccgtgcacgacatcgcctggggggaggccggggtcttcgcctccgtatcggccgacggctccgtccgcgtcttcgaccttcgggacaaggagcactccaccatcgtctacgagagcccccgccccgacacgccgctactaaggctggcgtggaaccgctctgacctccgctatatggccgcgctgctcatggacagcagcgccgtcgtcgtgctcgacatacgtgcgcccggggtgccggtggccgagctgcaccggcaccgggcgtgcgccaacgcagtcgcgtgggcgccgcaagccactaggcacctctgttcggctggggacgacgggcaagcattgatctgggaactgcctgagacggcggcggctgtacccgccgaggggattgatcctgtgctagtgtacgatgcaggcgccgaaataaaccaacttc

SEQ ID NO: 13845 - DNA, 1219 bp, Zea mays
  Clone ID: LIB143-055-B7_FLI
aagctattgttctttttcgttggcatttcaaaatgatgatcaaaagtcagaaggcagcatggaattgctgaattcagtgaaagctatttcgatccatcctctttccaataacaagtttttggtactggattcatctggagtgttgcatgtcttcattttttcaacaacacaaatggtctcaagaggtgccatcaagcaatattctgaaaatatccatacatatcgcttgcattatcccatgaaagtgcaattatctgctgtcttttcagttacctctataaagacacaatttttttgggtttcagatggtggacatactgtacatgttatgtccgcagttgagactgaatcccctaacggtgataatggagacgttactggagaaagagagttagcgcctatcaagctttcagctattgaagcaatctttacaagcgaaagagttgaggacattgtatctatctccaaggattcagttcttatccttggtcaaggcaacatgtttctgtatggaacttcttgaatttggttctttatcatgcatgggcatggttcaagactttgcagctttggatggtcttttggctaaagacaggatgagttttggtgattttgaagatgaacttatccaccagtccttgaagtcgtgagctttactatttattaatcacagtaagcagatgaaaaaagctcatgttttttcagaggacagcaagaatctgaaggtgacgccagattatggacggaccacgccgtaatgaccctattgctctgcatgcgtactttacatgcaaagactggcacaattcttgttgatatgacttggaaagagcaatgctgccaaatctattcccagtctcagttgtcgtggaaagtggatcaccatgaggccattcagctatggaataatacagctggtgctagactgctagtgtaattcagggactggacttgcggtgtagtggagtcgaggtttgggcatgttacttactgcatactacctctgttcttaaatatttgtcacccgctagtcatttttgaattaaacggtgacaatttaaaaagaacggagggagtatatcaaaaaaggaataatgtagtactcttgtaagagttaagatggaatgttgaaaggcgcgactttgagccattcttatcattggttttttattgctgtatttttttttgtgacattccactattccggtatacccaaatc

SEQ ID NO: 13846 - DNA, 1174 bp, Zea mays
  Clone ID: LIB143-055-C11_FLI
gcgagggggagggcgagggcgagggcgactgcgaaatgatgctgcaggaacagatggactcgctggtggccgacgacgtcagcagcggaggagggtcgcctgaagaaggggccatggacgtccgcggaggacgccatcctggtggactacgttaagaagaacggcgagggcaactggaacgcggtgcagaagaacaccgggctgttccgctgcggcaagagctgccgcctccggtgggcgaaccacctcaggcccaacctcaagaagggggccttcacccccgaggaggagcgcctcatcatccagctccacgccaagatggggaacaagtgggcgaggatggctggtcacttgccagggcgtactgacaatgagatcaagaactactggaacactcgaataaagagatgtcaacgagctagccttcctatttatcctgctagtgtatgcaatcaatctacaaatgaagatcagcaactgtctggtaattttaacggtggcgagaatatatccaatgatcttctatctgggaacagcctttatctgccagattttaccagtgacaatttcattgcgaacccagaggctttatcctatgcaccacagttgtcagctgtttcaataagcaatttgctcggccaaagctttgcatcaaaaagttgtagcttcatggatcaggttgaccaagcggggatgctgaaacaatctggctgtgtgcttcctgcattgagcgatgccattgacagtgtgctttcctcagctgatcatttttcaaatgactctgagaagctcaggcaggctttaggttttgattatctgaatgaagccaatgctagcagcaagagtattgcacctttcggggttgcacttactggcagccatgcctttttaaatggcaatttctctgcttctaggcccacaaatggtcctttgaagatggagctcccttcactccaagatactgaatctgatccaaatagctggctcaagtatactgtggctcctgcaatgcagcctactgaattagtagatccttacctgcagtctccatcagcgaccccttcagtgaaatctgagtgtgcatcgccgaggaacagtggtcttttggaagagctgcttcatgaagctcaggcactaagatctgggaagaaccaacaatatgaaatctcgtgac

SEQ ID NO: 13847 - DNA, 1015 bp, Zea mays
  Clone ID: LIB143-055-F2_FLI
cgctgcgccattcgccagcgacgagcacccaacaggctcagaaacatcgctgacatccacatgcaccacagtagttcagtagagtagctgttggaacccacacaccggcgatggcaactgctcctgtgacatcctccatggctacgaactccacctgtgtgcggctgcctagcatgcccctgaggcgtgcacccgccatcgtctcctttgcctctcgtccatggtcaaccgcaatgacctcatgtactggattgtcgcggcactctgatgtggttgccgccgcggggcaccagaagttgatggggtctttgaacaacaacgagggactcatgtttggggtggttgtggcacggttcaacgaggtcgtgacaaatttgttactacagggtgccctggaaactttcgagcgatactctgttaaagcagaaaatataacagttgttagtgttcctggaagctttgaagttcctataacggcacaaaagcttgggaaatctggaaaatttgatgcaattctgtgcattggagctgtgattagaggtgacacaacccactatgatgccgttgcaaactcagctgcatcaggtgtactcaatgctggattatctgctggtgttccttgtgtatttggtgttctaacctgtgaagacatggatcaggcactgaaccgtgctggtggcaaggctggaaacaaaggagctgaagctgctcttactgccattgagatggcctcgctgttccggcatcacttaggctgacaccttgtgtattctgattttctatacacgaggcggcagcatttcctcctatcaagagttttggctaatagagagcttttccgccgcggctagtataatttatttccaagtctgttggtccggtgcggattggttgctttccttctatgagacctgaaaagctcacaagacatatctgtaatgtaaacctgacaccatgaataattgtcgccacgaacgaaatatggtcatgaataaagatgcactagtgttttgtt

SEQ ID NO: 13848 - DNA, 855 bp, Zea mays
  Clone ID: LIB143-056-D10_FLI
tgattctcgcttcgggtgcgagaggtcgcgagttcgtttctcgcaacaccccccaccccagtccccagacaagtcgctcgcgcgccacaagttcgtcgatgactgcgaggccgccctcaacgagcagatcaacgtggagtacaacgcctcgtatgcataccactccctcttcgcctatttcgaccgcgacaacgtggctctcaaaggatttgccaagttcttcaaggaatccagcgacgaggagagggagcacgctgaaaagctcatggagtaccagaacaaacgtggaggcagggtgaggctccaatcgattgtgacgcctttaaccgagtttgaccaccctgagaaaggagatgctctgtacgctatggagctggctctggccctggaaaagctggtcaatgaaaagctgcacaacctgcatggtgtggcaacaaggtgcaatgatcctcagctgacagacttcatcgagagtgagttcctcgaggagcaggtggaagccataaacaagatctccaagtatgtcgcccagctgaggagagtgggcaaggggcacggggtgtggcacttcgatcagatgctgcttgaggaagaggcctaaaaagaagaacggacagatgaatgaaggaaacaagtgtgtaatgttgatcaggcggaggaataatgggtcaactgacaactctgggtcggtggatttgtagttggtttgggttttttagttgtagaacggtgttgcccccctcctagagagggatgaacacattatgcatgcgatgtgtcagttcggtcggtgctatgctcgttgggatttgattgtcggaaataaaacatgggtgatgaatgtgtaccctccct

SEQ ID NO: 13849 - DNA, 1279 bp, Zea mays
  Clone ID: LIB143-056-D6_FLI
gtggcggctggtcccaagctcggggcgggcgcgacgcgcgagcaccgcaccgatgccgatgctcctcccaccccctcccctcctcctcatcacccaactactacctcccatcccatccgcgccctccttcggtcctctcccatccgctccgctcgcagcccctccccttgcccccgcgatgtcgtcgtcgtcaccgccgccgcggcccgacgacgacgacggtgcgcaggaggtgggcgccggcgatgggaggtcgctgggctacggcgaggcggagtactgggacgcgcggtacgtggaggagggcggcgcgccgtacgactggtaccaacgctacgacgcgctccgccccttcgtccgctgcttcgcgccgccggcgtcccggatcctcatggttggctgcggctccgcgctcatgtcggaggatatggtcactgacggctatgtggagatagtgaacattgacatttcgtcggttgtgattgagatgatgagaaagaaatacttcgatgttcctcagctgcaatacttgcgcatggatgttagagatatgagtatgtttccggacgaatcgttcgattgtgcaatcgataaagggactctggactcattgatgtgtggtgtggatgctcccctcagtgcagctcagatgattttggaagtggacaggcttcttaaaccaggaggaacctttattttgataacatatggtgatccatcggtacgaatgcctcatttgaatcaatcggcatgtgattggaaagttgtactttacattctaccaagacctgtgttcactggaaagataacgaggcgtgtactggatcctgttccactgaccgagaggggtagactccctgatggatttgtcccagaggatcctgattcccattatgtctatgtctgcaagaagatgcagggattaacaggcacaggttccccaactgtaaaccacatagagaggcaaggggaagaataaacaaataggctgatttcacctcccacaagattagtggattgttatgatttatatacatgatcagatacgtttccaccattgttatggccatccaaatgtagaagcgtgccattgcatatctaactgatcttgtaaaagttgcaagaatccgggagtaaatgctttgtgcaagagctgtctttttttctttcttcctttcttttctgtatcatcttggaaaacacaacggaattgtttggtacattcgaggaagagatttatttttattattgttcgaagaaagaaaggaattggcgggcg

SEQ ID NO: 13850 - DNA, 1703 bp, Zea mays
  Clone ID: LIB143-057-A1_FLI
caacccccgaagccgagccagcgaaccaccccgcccgcagccgcaagcaagcagccaagcagtgtgaactgaccgtccgttccgtccagcccaccatggaggcgccgccggtaccggagctcatggatctggacgcgccccctcccgccggttccccccgccgtcagcgacaagaagaaggaaggggaagggggagacactgttacgggtcacatcatctccaccaccatcggtgggaagaacggcgagccgaagcggaccatcagttacatggcagaacgtgtcgtgggtacgggctcatttgggatcgtcttccaggctaagtgtttggagactggagagaccttcgccattaagaaggtgctgcaggatcggcgttacaagaaccgggagctgcaacttatgcgtgccatggagcaccccaacgtcatctgcctgaagcactgcttcttctcaacaacgagcagggacgagttgtttctaaaccttgtcatggaatttgtccccgagaccctgtaccgtgtcctgaagcactacagcaacgcgaaccagaggatgcctcttatctacgttaagctctacatgtatcagcttttcagaggcctagcctatattcataatgtaccaggagtctgccatagggatgtaaagccacaaaacgttttggttgatcctctcacccaccaggtcaagctctgtgactttggtagcgcaaaagtcctggttcctggtgaaccgaacatatcttacatatgctctcgttattatcgtgctccagagctcatatttggagcgacagagtatacaacttcaatagacatatggtcagctggttgtgttctagctgagttgcttcttggtcagccactgtttccgggagagagtgctgttgatcagttggtagagattatcaaggttcttggtactccaacccgtgaggagatacgatgcatgaatcccaactatactgagttcaggtttcctcagataaaggctcatccgtggcacaagattttccacaagagaatgcctccggaagccattgaccttgcttcccgtctccttcagtattcgccaagtcttcgctgctctgctcttgatgcatgcgctcatcccttctttgatgagctgcgggcgccgaatgcacgtctaccaaacggccgtccattccctccgctctttaacttcaaacatgagctagcaaatgcctccccggacctcatcaacaggcttgtaccggagcacattagacggcagaacggtgtcaactttgggcatatcgggagctaggagggcaggcggctgccatggtctagtttttggtcttggtaccccatgtgcagggccggttgcaggtgaaggtgatattgctgcaccatctgggagaggaggggctcagcagtacctgagagagctgaaactatgtaaattatctgaccgcgaaggagtacggccagtgttaagccagtaaactggcgcatgttggtccagagtagttaaggtaagaatgtagcaggtggagactggtaaatgcctagggtcgtttttagttgttaccagtattttgtaatgtaatgttcgtcggtacttcccagcagtagtgtagctgctcctgttttgttcgcccgccatgatgtaaatgatcatcacccaactggaacccctgttatctcgttacatgcttaggcctctgatcgtttcgt

SEQ ID NO: 13851 - DNA, 2176 bp, Zea mays
  Clone ID: LIB143-057-H1_FLI
cgaagcaagcaatccgaattctctgcgatttctctagatctcgaccacccctactagttttggttcctcctttcgttcgagagagcgtttctagtggcaatggcgaagagcgagggtccggcgatcgggatcgacctcggcaccacctactcgtgcgtcggcgtgtggcagcacgaccgggtggagatcatcgccaacgaccaggggaaccgcaccacgccgtcctatgtcggcttcaccgacaccgagcggctcatcggcgacgctgccaagaaccaggtcgccatgaaccccaccaacaccgtcttcgatgccaagcggttgatcggcaggaggttctctgacccgtcagtgcagagtgacatgaagctatggccgttcaaggtcatcccagggcctggtgacaaacccatgattgtagtcaactacaagggcgaggagaagcagtttgctgctgaggagatctcctccatggtcctcatcaagatgaaggagattgctgaagcctaccttggttccaccatcaagaacgcagtggtgacagtgccggcctatttcaacgactcgcagaggcaggccaccaaggacgccggtgtcattgcgggcctcaatgtgatgcgtatcatcaacgagcccactgctgctgctattgcctacggtcttgacaagaaggccaccagctccggcgagaagaacgtgctcatcttcgaccttggtggtggcacgtttgatgtgtcgctcctcaccatcgaggagggcatcttcgaggtgaaggccactgcgggcgacactcaccttggcggcgaggacttcgacaatcgcatggtgaaccacttcgtccaagagttcaagcgcaagaataagaaggacataagcggcaacccccgtgcactgcgccggctgcgcacggcgtgcgagcgcgccaagcgcacgctgtcatcgactgcccagacgaccattgagatcgactccctgttcgagggcatcgatttctactccacgatcaccagggctcgcttcgaggagctcaatatggacttgttccggaagtgcatggaacctgtggagaagtgcttgcgcgacgccaagatggacaagagcagcgtgcacgacgtcgtgctcgtcggtggctccacccgcatccccaaggtgcagcagctgctgcaggacttcttcaacggaaaggaattgtgcaagagcatcaaccccgacgaggctgtggcgtacggcgccgctgtccaggctgccatcctcagcggcgagggcaacgaaaaggtacaagatctgctcctgctcgacgtcacgccactgtctctcggcctggagactgcaggtggcgtcatgacggtgctgatcccgaggaacaccaccatcccgaccaagaaggagcaggtcttctccacgtactccgacaaccagccgggcgtcctgatccaggtgtacgagggtgagcgcgcgaggaccaaggacaacaacctcctcggcaagttcgaactctccggcatccctcctgctccccgcggcgtgccccagatcacggttaccttcgacatcgatgccaacggcatcctcaacgtctctgccgaggacaagaccaccggccagaagaacaagatcacgatcaccaacgacaagggccggcttagcaaggaggagatcgagaagatggtgcaggaggctgagaagtacaaggcagaggacgaggaggtcaagaagaaggtggacgccaagaacgcgctcgagaattatgcctacaacatgaggaacaccatcaaggacgacaagatcgcctccaagctccccgctgaggacaagaagaagatcgaagatgccgttgacggcgccatcagctggctggacagcaaccagctggctgaggtggaggagttcgaagacaagatgaaggagcttgaggggatctgcaaccccatcatcgcgaagatgtaccagggcgagggcgcgggcatgggcgctgctgctggcatggatgaggatgccccgtctggtgggagcggtgctggtcccaagatcgaggaggtggattaagttggttagtgttcgaggtttggtttggtgaggtgtgaagtgcctgaactctgatggttgtttgtgaggtgtggtcgcaatagctgcggcctgtggtgaacttctcagaaataaataagttttcgttcct

SEQ ID NO: 13852 - DNA, 821 bp, Arabidopsis thaliana
  Clone ID: LIB146-018-F11_FLI
tcgccgggaaaaaatcacagatttcttcgacgccgccgatgaggttccggtacgcaatggtttgttcgtcgaatcagaaccggagcatggaagctcacgctcttcttaagagacaaggactcgacgttgcttcgtacgggactgggtcacatgtaaaactacctggaccatctctgagagagccaaacgtttacgactttggaactccttacaagcagatgttcgatgagctcaggcgcaaagatcctgaactatacaagcggaatggtattttgcagatgattaagaggaatttatccgtgaaacttgctcctcaaagatggcaagataatgctggtgatggtgtgtttgatgtggttatgacttttgaagaaaaggttttcgattcagtccttgaagatctcaacaacagagaacaatcacttacgaaaacaatacttgtgatgaacttggaggttaaagataaccacgaagaagcagctataggtggccgacttgccttggaactctgtcaagagattgaagggaatgaaacatgggaagatacgatcgatgacattgttgcgggttttgaaaaacaacacaggcggaaactggtctacagcatctcattctactgaagataccatcatcagtcgcattaacggtcagattatgtagagtgttcttctgtgaccccagtcttgagatgttgaacaaattatttttagttcatcggttttatatgttttagggttaaatacttgagagtgtagaagaaattgcatgttagaaactgagaattcgtcttccaaacacattctcttgtgttgtttctcatt

SEQ ID NO: 13853 - DNA, 1399 bp, Arabidopsis thaliana
  Clone ID: LIB146-020-E3_FLI
ccaaaagataaagaaaaacaagaaatattttgtttttcgatctgaaaaagtgaaagcttcttcaaaatctttgctttagagatcgtttggtgattttgtttctttattttttttttatagtttcttcttcttgattctttcatatggatggacatcagcatcatcaccttcaccagcttcaatatctcaacaagcatcatcttcatactcaatcgcaaacgccggaaatagcctctccggtagctgtcggggataggtttccacagtggagcgtcgaagagacaaaagagttgatagggataagaggagagctagatcaaactttcatggagacaaaacggaacaagcttctttgggaagttatctctaacaagatgagagacaaaagctttcctcgtagccctgaacagtgcaagtgcaagtggaagaacctcgtcactcgttttaagggatgtgagacaatggaggcagagacagcgagacaacagttccctttttatgatgatatgcaaaatatatttaccactagaatgcagagaatgctatgggctgaatccgagggaggaggagggggaacaagcggggcagcgagaaagagagagtattcttcagatgaggaagaagagaatgtgaatgaagagctagtagatgtcagcaacgacccaaaaattctaaatccgaaaaagaacattgcaaagaagcgaaaaggcggtagtaatagtagtaatagcaataatggtgtaagagaagtgttggaagagtttatgagacatcaagtgagaatggagagcgagtggagagaaggatgggaggctagggagaaggaaagagcagagaaagaagaagaatggagaaggaagatggaggagcttgagaaggagaggttggcaatggagcggatgtggcgggatagagaggagcaacggcggtcgagggaggagatgagagcagagaagagggattcacttatcaatgcattgcttgctaagcttactagagatggttccctctaatcttttgtcagctttgcttaacctaaattaacttgttcttatatgcttgtttggggtgtagtgtaggtacaattatttggtgggggaagataatatctacggcaaatctcaacactcatatattgattgatatgatgacatatttgagttttagtgaggctttagtaatttatcatccccacattatttcttcctagtttatattttggcgagccaaattcttatagcatatcatttaatcttagtagtatactggttttaattagtaatttgtaggaccgtatgtgtagtattttagagtaatttggattttgttagagttaacctacaaatccatatatagtgcagcgaatgtaatatcggtttcaaatattatcttcatgcag

SEQ ID NO: 13854 - DNA, 1939 bp, Arabidopsis thaliana
  Clone ID: LIB146-023-C1_FLI
tgaaactgactcaagtatttgtaatgctaggaacgataagaatcaattacttcttggtataagacgagccaaccgaccacaaactgtcatgccttcatctgttttgtcaagtgacagtatgcatttaggccttcttgctgcagcagctcatgctgccgctacaaacagccgattcaccatcttctataacccgaggtatcgtcttaagtaccttctgaatgcacttatgtgttgattctcttcgttttgcatcaaacggattcggtttttctgcagggcgagtccatcagagtttgttatacccctggctaagtatgtgaaagcggtttatcacactcgcgtctctgttggtatgcggtttaggatgctgtttgaaactgaagaatctagtgttcgtcggtaggtgaattatcagagttcctataatttactctgctttttgctgatgaatgtccttaagaatcttcgtttgttgtcaggtacatgggtacaataactggcatttgtgatctagatcctactcgttgggctaattcgcattggcgatctgtcaaggtttagctcaaaaccaaacctttagtagaaaatattcattggtctttgcattctcgtatacatatatcattcatcatctgatcaaaatgcaggttgggtgggacgaatctactgcaggagagagacagccaagggtttcattgtgggagattgagcctttaacaacattccctatgtatccatctccttttcctctcaggcttaaacggccgtggcctcctggtctcccatctttccatggtattgtaaatttcaaaactttaacaaatctctgaaaggtttctatttctagtcttttatatcttctaattttggttgcatcccttttttgcaggccttaaagaagatgatatgggtatgagtatgagttcaccgcttatgtgggatcgaggactccaatctctaaactttcaaggtatgggagtaaacccgtggatgcagccgagacttgatacgtcgggcttgcttggtatgcaaaatgatgtgtaccaagcaatggctgcagctgcccttcaagacatgagaggcattgatcctgcaaaagctgctgcttcacttcttcagttccaaaattcgccggggttctcaatgcaatctccgtccttagtgcagccgcagatgctgcagcagcaactctctcagcagcagcaacaactctctcagcagcagcagcagcagcaacagctctcccaacagcagcagcaacagctctctcaacagcagcagcaacagctctctcaacagcagcagcaacaactctctcagcagcagcagcaacaggcgtatcttggcgttcctgaaacccaccagcctcagtctcaggctcaatcacagtcaaacaatcatctttctcagcagcagcagcaagtagtggataatcataatccgtctgcgtccagtgctgctgttgtttccgctatgtctcaatttggttctgcttctcagcccaacacgtcaccactccagtccatgacctctctgtgtcatcagcaaagcttctccgataccaacggaggaaacaatcctatttctccacttcacactagttctaagagtaacttcgatttagcttcttctttttgttgtcgattctttacatctagttttgtgatatcaaacatttacaacactgattaattaatggaagaggacaaagctttttttcttttcttccacctatttttagttcttactactctctgtaaatccaacttatgttctgcagttcagtggtttatgatctcaagtcagaggttgggttcatattgtttgccaaagattattgaaacagtcacaggttctaggctgggttgttaacgtgtttatattgccataaattcttgaagcagagtcaaaagggagggagcaaaacaaaggagaactt

SEQ ID NO: 13855 - DNA, 804 bp, Zea mays
  Clone ID: LIB148-003-F7_FLI
gcggggaccttctgctacatcgacccggagtaccagcagacgggcatgctcggcgtcaagtccgacgtctactccttcggcgtcatgctgctgcagatcatcacggcgaagccgcccatggggctgtcgcaccacgtcggacgcgccctggagcgcggcgagctgcaggacatgctggaccccgccgtgcccgactggcccctggaggaggcgcagtgcctcgccgagatggcgctccggtgctgcgagctgcgccgcaaggaccggccggacctcggcgccgtcgtgctcccggagctcaaccggctgcgcgcgctcggcgaggacaacatgcagtactgcggcgccatcatcaggggtggcggcggcggcggcggcatgcacagctcgtcgccgttccacagcaacatctcacggtcacacgccgagatgatgatcgattcccagtacccaagatcagtgttcagctcaagagcgggcgattcgcccatgccgccgagaaggtcgaacgcttgacgggcatgaaatggacttttatttccagcatcggtgacggggtggtggtgatgtcttgtgcaggtgcataagctgcctagcacgagggggagctagagcaggtgttgtttctagcatgagtttggtgcagaattttattacacgaggtacgagctatgtattactagtaaatacagaatcgtacggctctgccattgccgtgtacctgttcttgtaacctgtggagcttcctctgttgtgtaatggatttttttcagttttgtgaaacagaactgttggattaggggc

SEQ ID NO: 13856 - DNA, 2131 bp, Zea mays
  Clone ID: LIB148-003-H4_FLI
gcgccgccccccctctccgcctcaaggctctcctctcggaggtctgataggcaacccaataatggcagaagtcctatcaggatctcatgaacaccgtctaagctctgccttagatggacactacgacgagaagaggaaatccaatgtggaatacacagaggacgagaagaaagccgtgatcgcggctctgaaaaagaaggctttgagcgcctcacagaagtttaggcattccatgaagagggggaggaagagcagcaaggtgatgtccatctcgattctggatgagcgtgaacctgaggaggtgcaggctgtggatgccttccgccagcttcttgtacttgaagagctgctaccatcgcagcatgatgactaccacatgatgctaagatttctcaaggcaagaaagtttgatatcgagaaggcaaagcaaatgtggtctgatatgctgaagtggagaaaggagttcggtgcagataccattctcgaggaattcgaattcgaagaagctgataaggtggcagaatgctaccctcaaggttaccatggggttgataaggaaggcaggcctgtctactttgaacggcttggacagatcgatgtgaataggctaatgcaggtcactacaatggatcgctttgtcaagaaccatgtcaaggagttcgagaagaactttgctgttaagttcccagcttgctcaatcgccgcgaagcaccatattgaccagagcacaacaattcttgacgtgcaaggagtggggatgaagcaattcagtaaagctgcaagggagctcattggcatgcttcagaagattgatggtgacaattatccagagaccctgtgccgcatgttcatcatcaatgcaggccagggattccggcttctatggggcaccgtcaagagctttcttgacccaaagaccactgcaaagattcatgttctgggtaacaagtatcagagcaagcttctcgaggtgattgatgctagtgagttgccagaaatttttggtggaacctgccgatgtgaaggtggttgcatgaaggctgacaaaggcccttggaaggaccccgaaatcatgaagatggttcaaagtggtgatgggaggtgtggatcactcggtacggcctctttcgaggctccggagaaaatgatttgtgaagacgacacgtatcctaagaaacaagctttgtttgatggggaaacacaattagctggagacgagcattctcagtcacagaaaatttcccgtggccggattgaacatcctcacgtgtcacctcttcacgaggaacttatccccacttcaattcatacccctggatcaccctattcttgtgatgtcccgatggttgaagaggccatagacgccatctgcaagagccacggaacaccaccagatgagaagattgccatcaccaaagctattataaatgtatcgaatggatccaagcccccactctttgctggcatcatagcacttgtgatgagcatcgcaacgatggtccgtctgacccgcagcatgatgcctgggaaggttctcggtgctgccataggtggagctaccctctcagaaggtaaatcaaaagtacaagagcgccagcggtccaagctatcagaagaggctgtggaggaagctgaagacgccgtctctgcaaagcgcctctcggagcttgaggagaaggtcattgcactcctgacaaaacccgcatcaatgcctgctgataaggaggaggttctgcaggctgctgtctcccgcgttagtgcactggaagaggagcttgcagctacaaagaagaccttgcaggagactcttgagcgtcagttggagatcgttgcatacattgagaagaagaagaaaagcaagcgtttctttcgttggtagaagcaaacagcagtgaattgttcacgcccacgagaaaaaaggttttgcgtgtgatggaagcgagctggtgcttgcgtatgccagcaagctgcgattctgagtgtaacacataaggatgttctttcattcttcttttttgttcccttgttgcatcaaattgtgccttaaccacgtcgatgtgctgccaaattgtcaatccctgatacggtcaatcatggatggaccgactgcaatataaatatattataccac

SEQ ID NO: 13857 - DNA, 1097 bp, Zea mays
  Clone ID: LIB148-004-A3_FLI
cactaacccaagacaaaacatggatgtgaatgtgagaaccatgtggtcgtcgatgcgggcacaggttgcgatggctgtggtgttggtgttcttggtgagcggcgcatggtgcggtcctcccaaagtccccccaggcaagaacatcacggccacctatggcaaggactggctggacgctaaagcgacatggtatggcaagccgacgggtgccggtcccgacgacaacggtggtggctgcgggtacaaggacgtgaacaagccccccttcaatagcatgggcgcatgcggcaacatccccatcttcaaggatggtctgggttgtgggtcctgcttcgagatcaagtgcgataagcctgtggagtgctccggcaagcccgtggtggtgcacatcacggacatgaactatgagcctatcgcggcgtaccacttcgatttagcaggcacggcgttcggcgccatggccaagaagggcgaggaggagaagctgcgcaaggcgggcatcatcgacatgcagttccgaagggttaagtgcaagtacgactccaaggtcaccttccaccttgaaaaggggtgcggccccaactacctggcactgctggtcaagtacgtcgacggcgacggtgacattgtggcagtggacgtcaaggagaagggctccgacacgtacgagcctctgaagcactcctggggcgccatctggaggaaggacagcgacaaaccgcttaagggacccctcaccgtccgcctcactaccgagggaggcaccaagtccgtctacgacgatgtcatccctgccaactggaaggccaacaccgcctacaccgccaaataattaactttagtgctgacaatactttaagccgacctatgctagctatactagattgggttggatcccaagcaatgcattacacatgcatgcattggaccgtgatatctatttgctaccactaccctattacgacagtgatgctggcgccaacaatgatggtgtcatcctccttctccatcttcttcatctccatatatagctagagtgagacttcgctgttgtttaaaagagaagagttaagaaatggattgacaagttatataat

SEQ ID NO: 13858 - DNA, 690 bp, Zea mays
  Clone ID: LIB148-004-B6_FLI
ctcctcttcccccgccgggcaacaactcagccgccgcaaccgccacatcagccatgggcgcctgcgcaaccaagcccaagacgcttgaggggcaggccccagctgaggccgccgtctccacacccaaggttgcgcccgaggccactccaatctccgttgaggttgcggctgatgaacaggtagctgagaaggtggtggtggaggagccggctgcggcggccgacgttgagcatcagaaggctaatgaggtgctcgctccagaggcggccgtcgccgagcccgaccacaaggaggaggaagccgtggagaagaccgtcgtcgaggaggagaagccagcggcagcagcccatgcagaggaaaaggtcgccaccgccgccgagaccacgacgacggtggaggcgaagaagaacgccgaggaggccgggaaggagaagctggcgcagcaaagctgatcgactgtccgtgcatgcgtgccaattaatataattggctgatgatgcctgatgttcagtgtgtgatactgtgatcaagcaaggagacgacacttgaattctctacagtttggcataggtcgggagagacactctcgaccggccacaccatgtaacaaactaaccttcgatgtctcccattattttcctccacggagttcttctgatgaaacaacatgttctaattgggcttactgtg

SEQ ID NO: 13859 - DNA, 635 bp, Zea mays
  Clone ID: LIB148-004-B9_FLI
cagagcagggttgttgactggaacatggtgaagaaaggggaggatgaggaggagaagaagctgaatgcaacatacataatcagtgttgctaggaagctaggttgcactgtcttcttgctacctgaagacataatggaggtgaacccaaagatgatcctcaccctgacagcaagcatcatgtactggagcctgcagaatcaagggccatacaagagttcaggaccacaggatgctcttctagaggaagaggaaggcgaggaggaggaagaagaagaagaagaggaggaagaggaggaggaggatttcgaaggaggtgtcgaagatggtgtctctgaaacgaccacttgataagaattgtcacgcttgactagccattgccggtaaagtcactggtctattaggggcatatatatttctaaatgctgaggcctgaggcagagaagaaaatctaagggggtgcaaagaagaaatttttgggtgacatagttaattttattctttgaatgccaaagacaaaatagcagcagttaaaatttgcttagctggaaacagtgcgcacaattgcgccgccaaatctagtaatcttgtaagctaacactgtatgaaaacgtgagataataccaacatattttgct

SEQ ID NO: 13860 - DNA, 2117 bp, Zea mays
  Clone ID: LIB148-006-G4_FLI
ccgcttcgcgctgagagcttcgagaggctggagaagatcgggcagggcacgtacagcagcgtgttccgggcgcgggagctggccacgggccggctggtggcgctcaagaaggtgcggttcgacagcgtggagcccgagagcgtgcggttcatggcgcgggagatcctcatcctccgccgcctccgtggccaccccaacgttgtcggcctcgagggcatcatcacctcccgctcctctccctccatctacctcgtcttcgagtacctcgagcacgacctggccggcctcagctcctcccccgacatcaccttcaccgagccccagatcaagtgctacatgcgacagctgctggaggggctggcgcactgccatgcgcgcggggtgatgcaccgggacatcaagtgcgccaacctgctggtgaacaacagcggcgagctcaaggtggcggacttcgggctggcgaacctcttcgcgccggcgccggcggcgccgctcaccagccgggtggtcacgctctggtaccgcccgccggagctgctcctgggcgccacggcgtacgagccctccgtcgacctctggagcgccggctgcgtcttcgcggagatgcacgcgcgccggcccgtcctgcagggccgcaccgaggtcgagcagatccacaggatcttcaagctctgtggctcgccgcccgaagacttctggcgccgcttggggctctcccacggcgccgtcttccgcccgcagcaaccttacccgagccgcctccgggacaccttcgccgcgtccatgcccgaccacacgttccgcctcctcgccacgctcctctccctcgaccctgccggccgtggcaccgccgccgccgccctcgacgccgagtacttcacgacggcgccatacgcgtgcgagccggagagcctgcccaagtacgcgcccaacaaggagatggacgctaagctccgagaagaatctagaaggaggagcaaccttccgagccaaggcggcgaggcggataagggtctgtcgagggggcacaagagcatgcggctgcaggacacgaaccagagccacgtgcacgccgaggaatcgctgcccgttgtggccgaaaacggggtgacaatggcggggaacgacggcgactcgcggctgttcgtcgacctggagcccgttccggccatcagcaagcggcacggcggcagcgtcggcggcgaccacgcggcgccgtgcgccagggctaggaccatgtccaccagcttcaaggagccgccttgtgtcgccgaacacctccctctctctggccccgtgcagctcgcggcgtccaccggcttctcctgggccaagaagccccggcccgacgccacgacggcggcggtaactgtgacgatgcggagcggctccatggggccagggaccaacaggaacaacaacagcggaggaggagacggagcaagaaccacctccggctccggcgccaccgccaccgccacagcagcggcggcaccatacgaggcggagaagcaggaggtgatcaagcagtgggcacaggtcgctgacgccttcagcgcctctgaagcttacaacagcaggttgaggcagacgcttgacgccaagcagctcaagactggaatgatgcacaaggggaaggtgaacagggtggacttctcagggccgctgctgtcgcagccccggcgcatcgacgagctcctgcacatccacgagcagcagatccggcaagctggtcgccggccatggttcatgaaaggcaccgaggaggaggagcactgatggcagagacacggcatggacacaactaaacgcccatcagatttgcacgtacttaccacagagcaagagaagatgctggaaacatatcaaaggagttggaccgtgagctagctctcctgatgagcaggtgttttttcagggccggggacagacaaacgagtcggcctcatgccatcagggaagagctcagatggaagctgctgtagtggttttcaggtttcatgcaaccagaatttgctctacgcctctacctgaactagacaacaatgttgttgttgttggtgttgtataagatctttttgtgctcgcttgtgatgataatatgcatgacaagctcc

SEQ ID NO: 13861 - DNA, 964 bp, Zea mays
  Clone ID: LIB148-033-G12_FLI
cttctccaccaccaacactagtcagctcaccaccaccagcacctaagtcattacctccacctactcccgtgagctcgccgcctccagaagtgaagtcctctcctccaccaaccccagttagctcaccaccaccagcgccgaagtcgtcacctccacctactccagtgagctcgccacctccagaactgaagtcctctccaccaccagccccagttagctcaccaccatcagcgccaaagtcgtcacctccacctgctcctgtaagcttgccacctcctgaagtaaagtcttccccaccaccagcaccgattagctctccaccacctccggccaagtcaccacctccaccggcccctatgagctcacttcctccccctgtgaagtctccacctccaccagcgccggtcagttcgccaccacctccaatgaagtccccaccgccgccagcaccaattagctctccgccaccagcaccagtgaagccaccatcgctaccaccaccagccccggtaagctcacctcctcctgcggtcacctctgccccaccaaagaaagaagaagattcaacggcaccaccggcagaagccctacctccaccttcattcaacgacatcatccttccacctatcatggccaacaaatacgcatctccgcctcctcctctattccaaggatattaagctctatggagagatggtcgaccaagaatgaattgaacaacaatatataaggttgcatgcgcaaccaaacagctacatgtacattgcaggcgtgtgtgaaattgtttatttattttttgcatgtgcacgcgtgagtatttgcttctccgtacatactctatgtatgaacgtgtgcatgtgtgaactaactacatgagacgacaaggtgcaagagacatgtctggggcgtcatttgtatggctttaattttttttattatatatagataaggaaatattttcctt

SEQ ID NO: 13862 - DNA, 454 bp, Zea mays
  Clone ID: LIB148-033-G9_FLI
ggggtgaccgtctggaggtgctggtggacaagacggcaaccatgcaggggaacacggtgcgcttcaagcgccaagctcgccgcttcaggaacaccatgtggtggaggaacgtcaagctcacagctgcagtgatattcatcctcaccgtaatcgtgtacgtcctgctcgcctacatgtgtcgcggcttcaccataccgtcatgctttccgtaatctccatccgtcccggtgccagtgcggaccaccagccctagctctagctgcctcacaacttggttttccgggttctgtaacagcagcagcggtgctgcagttctctctcttgtacgagggaaacaacagctcattctcaagttctgcaacaaccagatctgatttttttttaaaaaaaagatggtagtcaaatggggaagctttcccacctgattttctatcattaaacacacgaacttctg

SEQ ID NO: 13863 - DNA, 582 bp, Zea mays
  Clone ID: LIB148-034-B7_FLI
gaattcaagttccctcagataaaagcccatccatggcacaagctttttggtaagcgcatgccacccgaggctgtcgatctcgtgtcaaggctgctccagtactcaccgaacctgcgctgcactgctgtcgacgcctgtgcccatccgttcttcgatgagctgcgggaccccaaggcttgcctgccgaacggacggccaatgccaccgttgttcgacttcacagcagccgaactcgaagggctccccgccgagcttgtccaccggatcgttcctgaacacatgaggaaggaagtgaattaggtggacggacgtactggggcaaaaaaaaaaaaaactccctgtttctctgttggttctgagagatgtgtgagggcacggatatggaggagcggtggtgtattgtaattgtaaagagggctgaaagaaaggtccctctggttgggcgtgtcaccaaagagtggccctagaggcaaaccttacgtttgctcgttgcccttggtgtgtacccagatgtgtatcgatgacataggctggctgctgtatcatcatcagggttgacgctgaacaagagaaattcaagcc

SEQ ID NO: 13864 - DNA, 849 bp, Zea mays
  Clone ID: LIB148-035-D6_FLI
cgcgcgcattacttgcacgtacgagctcagaaggaaggcagaggcaaaagcagccatggcgaactcgtcgtccggccttgcggtgaacgacgagtgcaaggtgaagttccgggagctgaagtcgcggcggagcttccggttcatcgtgttcaggatcgacgacacggacatggagatcaaggtggaccgcctcggcggaccgaaccagggctacggcgacttcaccgacagcctccccgccaacgagtgccgctacgcgatctacgacctcgacttcaccaccatcgagaactgccagaagagcaagatcttcttcttctcctggtcccctgacactgcacgcaccaggagcaagatgctgtacgccagctccaaggacaggttcaggagggagctggacggcatccagtgcgagatccaggccaccgaccccagcgagatgagcctcgacatcgtcaggagccggaccaactgaccgtcatcgtccatcaacgaccaagcaacaacacatccacactatatactcaattcacattgcatgcatcgttattattacatcatttatttcagaccccccgcccactgctaaccgtagtccataagagattcatcatccgtggactatgctcgatctcttccgtacgatacaattctcaaatatttctatttatttcctaagtgaattattatatatgtactatttcattccaggttcattttacttgtgaccattcttcagttcttttttctgtaaggatcggtatatcggagcatatgtgcatggctatgccagttgttgggcgtaagaatgtatttttttctgtaatatagaaaaaaactattttaagc

SEQ ID NO: 13865 - DNA, 1054 bp, Zea mays
  Clone ID: LIB148-035-E6_FLI
cgtgatggacgcccgtctccgcctcggcttcttcctcctcctcgtggccgcggcgttcgcgccgctggtctccgcgcagctctctgcagatttctacaagacgtcgtgccccgacgccgagaagatcatcttgggcgtcgtcgagaagcggttcaaggcggaccccggcaccgccgccggcctcctccgcctcgtcttccacgactgcttcgcaaacggctgcgacgcgtccatcttgatcgaccccatgtcgaaccaggcctccgagaaggaggcgggccccaacatctccgtcaagggctacgacgtgatcgaggagatcaagacggagctggagaaggagtgccccaacgtggtgtcgtgcgcggacatcatctcggtgagcgcccgcgactcggtgaagctgtcgggagggcccgaatacgcggtgctccttgggcggcgcgactcgctcgtgtccaaccgcgaggacgccgacaacctgccgggcccggacatcgcggtgcccaagctcatcgacgagttcgacaagcagggcttcaacacggaggagatgatcgcgatgctgggcggcggccacagcatcggcgtctgcaggtgcttcttcatcgagaccgacgccgcgcccatcgacgaggcgttcaagaagaagatcagcgacgcctgcgacggcaaggactcgggctccgtccccatggactccacctcgcccaacgacatggacgggagctacttcggcctggtgctggagaagaagatgcccctcaccatcgaccgcctgctggggatggacaagacgaccgagcccatagtcaaggccatgtcggacaagaccaccgacttcgtccccatcttcgccaaggccatggagaagctcagcgccctcaaggttctcacggggaaggacggcgagatcaggaagacgtgctccgagttcaacaacccgcagaacaccagcggcagcacgtcggtgatacggatcagctccatcgacgccgaccagatggccggcctgtcgcagccagggtcgacgtccaggaaggtgggcggccgc

SEQ ID NO: 13866 - DNA, 727 bp, Zea mays
  Clone ID: LIB148-035-F8_FLI
ctgcatctccatcggccccgggacctccaaggtgaacatcaccggcgtgacctgcggccctggccacggcatcagcatcggaagcctagggcggtacaaggacgagaaggacgtcacggacatcaacgtcaaggattgcactcttaagaagacgatgttcggcgtccgcatcaaggcgtacgaggacgccgcctccgtgctcaccgtctccaagatccactacgagaatatcaagatggaggactcagccaaccccatcttcatcgacatgaagtactgccccaacaagttgtgtactgccaacggcgcctccaaggtcaccgtcaaggacgtcaccttcaagaacatcaccggcacctcctccaccccggaggccgttagcctgctctgcactgccaaggtcccatgcaccggcgtcaccatggatgacgtcaacgtcgagtatagcggcaccaacaacaagaccatggctatatgcacgaacgccaagggcagcaccaagggttgcctcaaggagcttgcatgcttctagaccctccgtcgactgacccatctctctagttataatttttctcttgtccttgcattgcccattacatgctatccattggtaacgcacaacagtaaaatgacagacatccgacagctatattatgttcgacggtgtaacaccctgaatttgagggtataaaatttcttctctaaataccaaccaaattcaggtgtt

SEQ ID NO: 13867 - DNA, 1009 bp, Zea mays
  Clone ID: LIB189-009-A1_FLI
tgacaacggagcttgtcttaaaagacaccttgtctgcaacggaatgaatgactgcacggatggtagcgatgaaaaaatgtgtgaaaactgggagtgcaattttgatgaattgaaatgcccgtcttccaaccaatgtattccgatcgtctggaaatgcgatggaaccaaacaatgcaccaatggaacagacgaagaaaactgttcagaaacatgcccgaaccctgatgatttcttctgcccaggagggccttgcataagcagcacaaaacgctgtgacggtgtaaacgactgctcgaacggaaaagacgaagccgattgtaaagatacgtaagactgcgacgattccctttaggtcgttaccgctttgttttttaaaaacatttttctttgttatgatttttgtaaatatgtacgtattttcagtctgttacctaaggaaaaaaaaccatgttcctataaaccataaaggatttggattacattccattttactcatgaaatttactcattttctgacattatttatataccttttgttatcaaaatcatttttttcctttttgtcattacgtacttaacttttttttttaaatctagttaattatatttatttaattaggtaataccagtcaagtttaaacgttcaaaggaacgttgtgtgatgcgaactcactttcgcttttttgtaaataattctagtttatattcaaaaaatatgaaaattgtgatgttaattttttttttgtattattatgacattcactgtttttatttaaaacaaacaacgaaaaatcgcgaatagaacaaattcccacttattaacgctcaaatgtgtacatttttatcaatcgattattttgtatagaattagtttatttcttacgctagttatatttttgtaaaaagaaaaaaaaaaatcgtatgaaatagtttatgattaatattttattatatttctgtggcaaattgttaataattttcgaaatttaaataaatgtataaaatatgt

SEQ ID NO: 13868 - DNA, 1116 bp, Zea mays
  Clone ID: LIB189-009-A9_FLI
agcggagcggaggaggagagactgatccagacgcaaagggcatcgacagagaccgagcccaataataaatcttgctggatacatacaggaaacagcgcgagggaacgagaagttagtttccatggagaagaagcagaagaagcacgcacacgcgaggtcaaggagcttcaccggcggcgggctggcctccttcctcaggtccaccgtctcctccttctcctccgccttcccgcccagcggcaggaggtcctccttcaaccaccgcaacgccttctcgggccccatcgtcgtctccatcgtcccgccggaggctcgcggcggcggcggcaggaggaagcgcccggggtacgtgacgcccgagccgtcgtcgcccaaggtgtcctgcatcggccagatcaagcgcagcaactccaggcgccagaagaaggtcaacccgtcgtgcggcaagggcggcggcgcctgcccgctcccgccgaggccgccagcggaggacaagaagccctgcagcaggaccagcagcagcaggggctccctcgtgaagcggatgcccttcttccgccgcagcaggtcgcgtcctcgctcaagggcggcgtcgtccaaagatgggctcatcgtcgtcggtgacgggaaagagagcgacggcgacagcgcggtggcggatccagcgccgccgccgccgccgatgggcctcggccagatgaagcggttcaccagcgggcgcgccgcgtttcaggacttcgactggcgggaggaggagaggacgacgggccgtgacagcgatgaggacgacgacgggttcgtagcgcattcggcgccgctggtgctcgggggcggggtggtagcctcggagccgaggaaggaggtgaacctgtggaggcgtcgccccatagttcctcccactcagctacagcttccctaggatagcgagctgcatctgcatgcgcgcgcgttcgttcgtctctgtgtgcctgccgatgcctggtgttttctttagtttgtatatacagctcacgcgtgtataatgtgatgatcatacgggtttagttgtttttgtaagtgtgtggtgctcatctttggaaatgaagaccattctgcctagctagagcttggcgtttt

SEQ ID NO: 13869 - DNA, 713 bp, Zea mays
  Clone ID: LIB189-009-B10_FLI
cactacaccacaccacacacacccgacgacgatcacacacacgtagaagatcgagttcgttcgatcgtgaccgtgacgcaggaagctataagctagccaagacaggaataataatggcggcgtcgacggtggcgagcctctctgtcccggtgacgacgacgaccttcgcggcggcgggcggcgccgacgtgctgatcgtcgtcccgaggagggcgggcgccgggcgcgtcgtctggttccccgcggcggcgcgccgcggcggcggcagcgggcggttggtcgccgtgcggtccagcgggccggccacgccgccggagatctccgacaaggtgtctgagagcatcaagcaggcggaggagacgtgcgcggacgaccagaagggcgacgccgagtgcgcggcggcgtgggacgaggtggaggagctcagcgccacggccagccacgcccgcgacagcctcaaggagaccaacgccaacgacccgctcgagaagtactgcaaggagaacccggactccgaggagtgccgcatctacgacaactagctatagtcgtagctatatagggcgtggaatgatactctcgatcggcgcgtcatacgtggaatgaacttgtatgaagctatacctcaatgcttctctacctgccgccgccgccgcagcagcaccccgtatgatatgatacacagctgggatggtatactgatattttgggtt

SEQ ID NO: 13870 - DNA, 1887 bp, Zea mays
  Clone ID: LIB189-009-B6_FLI
accagaggacggctggaaagggtaacttcgcctcctgatttcctcccccgcccgcgctcacccggtgaccgcatctcgggcgcagccacctcccaatctccgatggcgctccaaaccctaaacccctaccggcacgcggcggccgtctccccggtcccgtcgcccgtcccgcaccgcggccacccgccgccgcatgccgtcctgcacctccctccccgccgccgcctagcgggcggcgccgcccggccgctcgccgtcgctgccgccgtctcgggggccgtcaacgaggccaggaggcgtggggttcctcaagagggcggggaggacgggaggaaggacacggacctcgccacgctcggaaacctatgcgtcgacgtcgtgctcagcgtgccccagctcccgccggcgcagcaggaggagcggaaggcctacatggagcgactcgccgcctcaccgcccgatcagaaattttgggaggctggtggaaactgcaatttagcatttgctgcagctaggcttgggcttaactgttccactctgggacatgtaggagaggaaatatatggaaaatttcttcttgatgtgcttcaagcagagggcattagtgttgttgggatgcttgaaaataccaatgctgctgcatgccgccaggcctatgaaacacttctatgctgggttcttgtagacccatttcagaaacatggtttttgcagccgtgcagacttcagtaaagagcctgctttcagttggatacgtaaactcccagtggatatcaggacagctattcatcactccaaaatactgttttgtaatggctacgcttttgatgagttcttccctgatgtgatcgcatcctctatcgactgtgcgatttgttcgggaacagcagtgttttttgatcctggtccccgtgggaaatctctcttacatgggaacttggatgagcagagagcacttgagcatgcactgaggcttagtgatgtcctcctcttgacatcagacgaggctgaatcactaaccaacatcagaaacccagttcaggctgggcaagagttgctaaagagggggatccgcacaaagcaggttgtcatcaaaatgggctccaggggttcgatcatgatcactaagaacacaatatcctgtgcgcctgctttcaagatcgacgttgtggacacagttggatgtggagatagctttacggctgctatagcttttgggttcctccatgacttgccagcagttaacacattaaccctggcaaatgcagttggtgccgcaaccgctactggctgtggggctggcagaaatgttgctcgcctggataaagtactacagctcatgagagaagccgatctcaatgaagacatcacgttgtggactgagctgactgaaggaaactctctccgtatagaggtctcgattctgtctgggatagcaagaaatggttttagtgagaacattgtggctgttcctgttaccaaagtggtttctgaagttttgccaatgttcgaagcagtgccagtgcgaagcgctgtccaggcttgattacatactgagctgactgaaggaaactccccgcgctgaggtctcaattctgtctgggatgacaagaaatggttttagcgagcacattgtggatgttcctattaccgaagtagtttctgaacttttgcctacgttcgaagcagtgccagacgaagggctgtccaggcttgattccatactgaatagttgatggttgtattcattttgtcattcacatagattcttattttacctccacgattacacgctgttttctggtgatgagtggtagttgggggctagcctccaggtaaagatactttctgaacagaatatggttgctgaagctattgatagctgtac

SEQ ID NO: 13871 - DNA, 372 bp, Zea mays
  Clone ID: LIB189-009-C11_FLI
atcgacggtgccctcgtcgtcaacgtcggcgactttcttgagatcctgagtaatggaaaattcaccagcgttgagcacagggccgtggtacacccaaccagagagagaatgtcggcggcgctgttcctgtaccctcgccagaacatgagggttggtccattgccggagttcgtgaatggcggtaaagagcggtatggatcaacggattatgaggaatttatgaagcattactttgcaacgaagcttgacggaaggaagcacctagacagattgaagttggagcagtaggcagtagctatctctaccgtatctatctcgctggagggaccaataaataatttttctatgcgatatataataaatggcgaccac

SEQ ID NO: 13872 - DNA, 665 bp, Zea mays
  Clone ID: LIB189-009-D12_FLI
tggcctccaccacgaagatgcaggagcatgcgggcagcgacaagtcgtgtgtttggcacgctgctgactttgccgatggcgaacttaaggaggagatgtttgccatcaggtttggttcggtagaaaactgcaagaagttcaaggagttggttgaggagatagctgagtcgcttacaaagaacgagggcaaggaaggtgaagatggtggttccacggctggattgctggcgaagctcactgtgagcgagggcaaatctgagggaagtggcaagtctgagtccactgattctggcaaagtgactgaaaccaaagccgacacagccccagctgagtagttggtgtggttgcacttgcacgcagattcgcctggtgctgaactagtttgtctgtccgcgtccagtggaagtttggtgccctttagccatggaatacgattgctatcatttgggcccgggccgagttggaggagtctcaggtgttcggtctggtttggtccgggcttgattttgctaaaaacttgggagtccatgggggttgggaacgtttgatatgtgagtcgctagtatttaactgcatggatcgttgtggattgcggtaaattcataaagtggaccctatatattttttatttcgttcaatacacattcatatcatcaatgatttat

SEQ ID NO: 13873 - DNA, 1364 bp, Zea mays
  Clone ID: LIB143-057-C12_FLI
ctctcctttcctctcctctaggctctagtcctctcgcatccgcagcttccccagccagctagggtttgcagatgacgaccgcggcgcgccccacctgggcgccggccaagggcggcaacgagcaggggggcacccgcatcttcggcccctcccagaagttctcctcccgcgacctcgccgcgcacacctccctcaagccaaggtactctctctctctctctcccacctctctctgcgacctctatctgttcgtggaacctagtcgtcctcgctgcatggactctcttacctcttacctgtccagacagctcgttcatggacgctttcttctttgtccctataaccataatcaatcctttcatcggttggcccccgggattttcgatctggttcccaggtccccgattagagcgcctgccgtcggttcgatgctaccacgagatagtcgccatggtgtggccgccttgtacaccggtgcccaaccttggccttcagaatttcgcgcttgcccgccccaattgtcaagtacaggatgcttaatcttgcctgacagcctttctgtaccacgtgttatctatcactacttataaaatcgagtcacatcgagtgcctgtgttaatgtttcagaaacagtatgcctttagtgccgcgaggtatattgaattagtaacaagaggtcatggttttgatttcttccagcatcattctcttttcctacatctgttcggagtcgctttactcctatacttacattacagccaccactacttcaatagattaagatgttattcagtgcaaagtaatgcctaccacctgtatctgtatgttgattgttgtgtttgtttgataattcatttgacttaacatattgttatttctatttgggggttggaaacaccatggttctctcaggtcatcagcccccaccacaaaaaaaaaacagttcttacaaaacatgctatgctgaaatattagctaatctttgtaagtccaagtgtccatcatcaaacgaatgcctgcagagtctaccaaaataattgtctggatattgaaactgaaatccagcaggaccagtggctggggaagaatctgacagaaagttcattaatcctaatccatgtaaagatgttatattatcctttttgagtttggatcctgttgcctagttaactacacaaagcaaatcatttttgggatcctgactttttccccctaaatggccaagaacgaatttcattgcgattgtaacaaaattacaaagttgcacatggcgcagaaaccaaaacagaattacttctagaagcaaatgcattgaagagaaaaatcacacagggtcaaagggatctaactcaaagacgaccccc

SEQ ID NO: 13874 - DNA, 716 bp, Zea mays
  Clone ID: LIB143-057-D12_FLI
gtcaaatgtacatatgaattcttctgattttctttatttggtttgtgtgaaatacacagtttttggtgaagattttttgaagctgagaagatggtgctgaagacggaactctgccgcttcagtggccagaagatctatcctgggaaaggcatccggtttattcgtgctgattctcaggttttcctttttgccaactctaaatgcaagcgctacttccacaaccgcctgaagcctgcaaagcttacctggacagcaatgtacaggaagcagcacaagaaggacatccatgctgaagctgtcaagaagaggcgccgtgccaccaagaagccatactcgaggtccattgtgggtgcttccttggaagtgatccagaagaagagagctgagaagcctgaggtccgtgatgctgctagagaagctgctcttcgtgagatcaaggagcgcatcaagaagaccaaggatgagaagaaggcgaagaaggctgaggtgtccaagtcccagaaggcgcagacgaagggtgctgttcagaagggttccaaaggccccaagttgggtggcggcggtggcaaacgctgaaaaggaacgaagtgtcattccgagacctcatcaaagccacctttgtagtaccttggttaattttgtattttctttcagagttacttgtgactcttaattttgcatctttatatattgggagaaatgatcgccgttcgttc

SEQ ID NO: 13875 - DNA, 665 bp, Zea mays
  Clone ID: LIB143-057-D9_FLI
ccaaccacatccagtccaccccatccccctcgaccccgacaaccccgagtcccgacccgatggcgcccaaggccgagaagaagccagcggagaagaagccggcggccgaggagaaggcggagaagacgaccgcaggcaagaagcccaagtccgagaagcgcctgcccgcctcgaagtcctccggcaaggagggcggcgagaagaaggggaagaagaaggccaagaagagcgtggagacctacaaaatctacatcttcaaggtcctaaagcaggtgcaccccgacatcggcatctcctccaaggccatgtccatcatgaactccttcatcaacgacatcttcgagaagctcgccggcgaggccgctaagctcgcccggtacaacaagaagcccaccatcacctcccgcgagatccagacctccgtgcgcctcgtcctcccaggagagctcgccaaacacgccgtctccgagggaaccaaggccgtcaccaagttcaccagcaattgagcagcctgcagcgtccacggatttgttaggtctccccttcttacaagggttcttcgtcgtgtcctctacccctccccctccccgcctatgtatgtgctgtgaaattgttgatgttctcgtcgggtgaacaaaggccagtagctagcttgcctgcttcat

SEQ ID NO: 13876 - DNA, 2012 bp, Zea mays
  Clone ID: LIB143-057-E1_FLI
cgtcggcgaaggcaaggccgtgcgccgccgccgcgcccgtgaatctccccagggcctcctccgccaccagctcgacatgtgctcccgcaacgccgacctcaccaccgcgctccgcctctacgacgacgccctctccccggacaaccccatcccgctctccctccaccactacaactgcctgctctacctctgctccaacgccgccgctaccgactctgacagccatatctccgccaccgccgctcagcgcggcttcgacatcttcgccaggatggaggccgacggcgtccagcccaacgaggccaccctcaccagcgtcgcgcgcctcgccgccgccacccgcgaccctgccatggccttctccgtcgtccgccgcatggccgctgcgggcaccccgccgcgcctccgcacctacggccccgccctcttcgcctactgcgatgccaaagatgccgacggcgccaagcaggtcgaggctcacatggacgcatctggcgtcgtgcccgaggagcccgagctcgcagcgttgctccgcgtcaacgcggacacgggcaaggccgatgaggtttacaggctcctgcacaggacgcgcgtcctcgtcaggcaggtctgcgacaccactgcccaggtcgtcgaggcctggttccggtcggacgcagcgtcccaggcgggggtggacagctgggatcccaccaaggtaaaggagggcgtcgtcaagggcggcggcggctggcatggccagggatggcttggcaagggcgcatggagcgttggctggaccgagatgggcaaggatgggacatgccaacgctgtggggagaggcttgtctgcattgacattgatccagccgagactgacaactttgcaaattcgctcaccgaactggccattaagcttgaggccagggaagatttcctcagttttcagagctggctacgccgccatggaccattcgatgctgttatagacgctgctaatgtaggcctttacaaaagtaaagatttctgtttttcacaggttaactctgttgtaaatgctatacagagagtaactaaatcaaagaagttgccactgatcgttttgcataggagccgtgtaaatgttggtcctgcaaaagccccatacaaccagaagattctggacagttggaggaatgctggagctctgtatgcaacccctcctggctccaatgacgattggtattggctgtatgcagctgtcagttgccgatcgttgcttgttacaaatgatgagatgcgagaccacttgttccaactgcttggcactagttttttccctaggtggaaagaaaaacatcaggtcagactaactttctccgggcatggccctacccttcacttgccgcctccttattcaattgttattcaggaatctgaagatggaagctggcatgtaccaacaacaacaggcgatgatattgaaaagccacggcagtggttgtgcactactagaaaatctttgaggtagatgtgatttaattttggcccagtcaagttgacacagaatggtgccaagttgccaaccttggtgggaactgggaagggtggtggcgtgacaaaccctgaaaccagcaaagcttaaatgcagcaacttgttggcccgaacgaaagaaagctgattggagtacaagtgatgaatatgagcaggccatggatatggaaagccttttgttgtaacatcgtgagctgtttattgctagcccaggttattctagagtagtttgagaaccgtggtaaggtaatttgcttcatgtgagttttacttttattaaatgacgtgccatgccagtgatttgaaggatgtggcaggcaagtaatcaaagaaagagatgaatgttatctaatttgtcattagcacacatacctaacctctggcgccccaatggtttctgacggactggtgaatggtgattgatgagggactgtgttgcaccgtgagttttggtgttaaattttcttaaaagtttaattaaatttagtatatttatagt

SEQ ID NO: 13877 - DNA, 1465 bp, Zea mays
  Clone ID: LIB143-057-E9_FLI
aacaaatcaccctgccgatcgccatggacgaacagcaggcggaggagggcgaaagcgcgcgcgtcaagaggacgccggaggaggggtcgtcgccgctgtccgctctggcggatgacgtgctgctacagatcctgggacggctcgaggcggacccgcgggactgggcgcgggcctcctgcgcgtccccgcgcctcgccgctctgctccgggcggcctgcctcccgccgcgactgtcgcgggcgctccccgccgagctcctccccgcgccgtcaccggacggggcgcccgcggcctgggcggcgctccacaagctctccgtctgttgcccggggctcctccgcgccggggtgctcctcgagcccaccgacgatttcgggctcgatctcgacatcgggcctgacgtccccatctacgcccgcaccgacgcctcctccgccgaggggttcgaggccacggccacctcccgccacagcggaaccatcgtcgcggccgggagcgcgccccgcgccggcgaatctgccaacgtcgccgcgtggtcgctctacgacgacctgtacctggacgcggcatacgactgctcgtccgagctgcagatcccgcctgccgctgcggctgtggaacccgccccgcccgcgcccgtggcggcgatccgcgacgtggaggaagcaacgaccacaaatgctgtctcatgcggcgtcgcccggcgcggcgtggtggccgggagccgactgcatccgcggcggtggctgggcaccgtcggcgcgcacctggcatcggggtcctggacgctgagccgtgagcaggggaacaagctccttgccagccgcttccgcggcgaccggctatacctctgcgactggcccgggtgcgtgcacaaggaggagcgacgcaagtacatggtcttccgcggcgtgttccacaacttcgcccggtctcaggtccggcgcgcgctcagggacacgcgccgccccaccgtcgccatcgagtgcgccttctgcggctgcaaagagacctgggacctctactcggctttctgcctccgcagtttctacggctaccacgacgacggcgagcctgtggtgcgcgcctacgtctgcgagaacggccacgtcgcgggcgcctggaccgaccgcccactctactcctgatcttggagtggacactccgactgacatggtattgcatcaaagactgcaccctgccattgccagatgctcgctcctaccacttgagctgtttctagacataattatgcgtgcctgcatatagcaatccggattttcgtcatgttctgatacacgtgggatgtgtattctttatttctttcttcttgctgttgctgttgtttgtgagaatggttgagtagaataaggatgccggttgatttgcagcataggatataaagagatttgcttaaaattgtaaacctgatgctacgagaaattggaaccgctgttttattgcc

SEQ ID NO: 13878 - DNA, 328 bp, Zea mays
  Clone ID: LIB143-057-H5_FLI
acgtggccgtcgtcgacgagaaggtcatggtgaagatcgggacaaggtacgacgtgagcagcgtggtcccgtcggatttccacccggcggcgcacggcaaggactactgcgtctgggagaaagcgagcctccgcgtcccagcggggcgccacctctagcagctcagactgctcagtcttgtgctgcattgcaaacacagcagcacgacactgcataacgtcttttccttagtttcctgaattttaccttttcctagttcaatttcatatatgtatttctacatgtacacactatcacaatcagataaataaacaagcttagtcacctg

SEQ ID NO: 13879 - DNA, 1841 bp, Zea mays
  Clone ID: LIB143-058-A11_FLI
gagatcgggacgatgatgggagggcgcgctctgctgctgctcctggtctcggcgctgctcgttcagatccgcgcctctgacccgctgctgtacgagccgtttgatgaggacttcgagggtagatggatcgtctccaagaaggatgaataccaaggtgtatggaagcatgccaagagtgatgggcatgaggactatggcctccttgttagtgacaaggcaaggaaatacgccataatcaaggagcttgatgagccagttaccttaaatgatgggacagtggtcctgcagtttgaagtgagacttcagaatggccttgaatgtggaggtgcctacattaagtacatccgccctcaggatgctggatgggatgccaaggagtttgataatgagactccatacactattatgtttggtccagataaatgtgggtcaaccaacaaggttcatttcatccttaagcacaagaatcctaagactggaaagtatgttgagcatcacctcaaattcccaccttctgtcccatacgacaagctctctcatgtctacacagctatcttgaagccagacaatgaggtcagaattttgatcgatggggaagaaaagaagaaggcgaacttcctttctgctgatgactttgagccagcacttatcccatccaagaccattcctgaccctgatgacaagaagccggaggactgggatgagagagctaaaatccctgatccagatgcagtgaagcctgatgattgggatgaggatgcccccatggaaattgtggatgaggaagccaccaagcctgagggatggttggatgatgaacccgaggagattgatgatcctgaggcagccaagcccgaggactgggacgatgaagaggatggtgaatgggaggcaccaaagattgacaaccccaggtgtgaagaggcacctggatgtggcgagtggaagaggccgatgaagcagaatcctgcttacaaaggcaagtggcatgcacctatgattgacaaccccaactacaagggaatctggaagcctcaggagatacccaaccctgagtactttgagcttgacaggcctgattttgatccaattgctgctattgggattgagatctggacaatgcaggatggcatcctgttcgacaatatcttgattactgatgatgagaaagttgccacctccattctcgagaagacctggaagcccaagtatgatgttgagaaggaaaaggagaaggctgaggaggctgctgctggtgcagatggtctttctgacttccagaagaagatttttgacgtcctgtacaagattgctgatattccgttcttggcaccctacaagaccaagattattgatgttatcgagaagggagagaaacagcccaacatcactattggcattttggtctccgttgtcatcgtgttcgttaccgttctctgcaagctcctgtttggtggcaagaaaccagtggcacctgtgaaacctgcagctgaggcgaagaagcccaaggccgcggagacggacggtgctggaagcagtggtgacaaggatgagaaagaggatgaaaaggaggagacaggcccacgtcggaggacccgaagggagacatagacctgtttttgacgtgttttagctcttctggcgtctgcttattttgagaactcttaatatttgtgagtgtataataggagcttatgtcacctctgcggcttcccccgctgctgatttgtttttaatggttagaccaggacccttcacgagcgtagaatttagttcttgttggtcatttatgtgctgtgcctgacggtgttcaatcagatagaggtgatggtttttttggt

SEQ ID NO: 13880 - DNA, 1424 bp, Zea mays
  Clone ID: LIB143-058-D1_FLI
ccaaacaccaacagcaacaccaacaacggcggagctgccaaagaaagcaaaccagaggagagaagagaggaggggttggctggctggccctggccgtcgtccgccggtagctcgtggtcgctcgctcgctccatcattcctccctctccgccggcgtgcccgcccgcccacatgacggagtcagagggcgagacggaggctgcgcgcgcggccgtgctgacgccgccgctgtcgctggggggcggcgggctcgcgggggagctccgcccggccaacctcggccaacgggtgctcagcctcttccgcaacgtccgcccgggctccgacctctcccacttccagctgccggcgacgttcaacctgcccaagtcgcagctgcagctgtacggcgaggccgtgtactgcggcggcgaggacatgctggcgcggtgcgcgcgcggcgccgacagcctgcagcgcatgtgcgccgtggtggcgtggagcatctccaccacgcggccccccatcttcggcttcgcgccctacaacccggtgctcggggagacgcaccacgtctccacgcccgccggcctcaacgtgctcctggagcaggtctcgcaccgcccgcccgtgacggcgctgcacgcgacgcacgcgcgcggggaggtggagctggtgtggtgccagagccccgcgccgcggttccacggcgccagcgtggaggccgcggtgcggggcgcgcgggagctgcggctgccgcgccacgccgagacgtacgccgtcgggtgcccgggcctcgtgatccgcctgctgccgtcgccgggctgcgagtgggccggcgacgtccgcgtctcctgcgccgagtccgggctcgaggccacgctcagctaccgccgcagccgccgctccttcctcggcctcggcggcggcgacgcgcgctgcgtcaggggcagggtcttccgctccgcagcgcccgacgacacgctgtgcgaggtggacgggttctgggaccgccaggtctcgctcagggacgtcgccaccggcgaggtctccgtgctctacgacgcacggcaaaccatcgctgacctcgccacgcccgtcgtgcaagacagaaagggcgtgtccgcctcggagtccgccgtggtctgggccgaggtcagcgccgcaatcctgaacaaggactgggaggcggccaggcaggcgaagcggcgggtggaggagacggcgaggcggctcgccaaggagaggaacgagcgcggggaggtgtggactcccagccacttctcgctgtggcagaacaagcacggcgactgggagtgctggccgctggaggactccgtgccgccggctcctattgtcgtcccctctccttcgtgactccaagtccactagcagcagatctttgttcactgataacatacgacgaacgaacgtcaacgtcgaat

SEQ ID NO: 13881 - DNA, 597 bp, Zea mays
  Clone ID: LIB143-058-D12_FLI
cttttccaggtagctgctctctattccgccagcgatcgagagaccaagaggagcaggagcgatggcgaggagctcgttcaagctggagcaccccttcgaaaggaggcaagctgaggctaaccgcatcagggagaagtaccccgatagaattcctgtcattgttgagaaggccgagaggagtgacatcccagacatcgacaagaaaaagtaccttgtccccgccgacctcacagtgggacagtttgtgtacgtggtgcggaagcgcatcaagctcagcgccgagaaggcgatcttcatcttcgtgaagaacaccctcccaccaacagctgccctgatgtctgccatctacgaggagaacaaggacgaggacgggttcctctacatgacctacagcggcgagaacacctttgggctgctatgagtggcgccacgccgccgtggatcgacgtcggacaatgcccctcctcctgtaaatacttaaaaaaaataggcgtctcaagaatccgtgtacataataatctggcatgtcttgcatcaaaagcaactcgttgcgtccactgtctgttgaaactattgaagcgtactaaacatttaagc

SEQ ID NO: 13882 - DNA, 2440 bp, Zea mays
  Clone ID: LIB143-058-D8_FLI
caagaaagcaacggcagcaagaaaccttgtaaacatcggagcatagatcgcggcggtgatggcggccaaggggaggacggagctggacgtgggcgccgacggcgtggccgtaatcaccatctacaatccgcccgtcaactcgctctccatcgacgtcttacatagcttaaaagaaagctatgaagaagcacttcggagaaacgatgttaaagctattgtcgttacagggaaaggagggaaattttctggaggatttgatattagttcctttggtggtgttcaaggaggccaaacaatgcaaccaaaggttggctacatagcaatagatattctcacagatactgtagaagctgcgacaaagccatcagtggcagcaattgatggtcttgctcttggtggaggtttagaagttgccatggcatgccatgcacggattgcaactccaacagctcaattaggtcttccagaacttcagttaggaattattccaggatttggaggaacacagcgactcccacgactggttggtctgacaaaatctttggaaatgatgctgttatctaagccaatcaagggcggtgaggcacaccaactgggcctggttgatgccttagtttctcctaatgatttggtgaatactgctcgtcaatgggctttggatatatatgaatgtaggaggccctggatcaaaagcctttataagactgacaagctagaacctcttggggaggctagggaaattctgaagtttgcaagagctcaagctcaaaagcaggcagctaatcttcatcacccacttgtttgtattgatgtcattgaagaaggtatagttgcaggaccacgggctggactctggaaggaagcaacttctttccaggaactgcttttctcagatacttgtaaaagcttagttcatgtgttcttttctcagcgggcaacgtctaagattccaggtgctacagacttggggttgatgcctaggaaaataactaaagttgccattctaggtggtgggcttatgggttcaggaattgcaactgcgatggtattaagtaactatcctgtgctacttaaagaagtaaatgagaagttcctaactgctggaatcaacagaatccaagccaatttgcagagtcgagtaaggaaaggaaaaatgaccgatgagcgatatgagaaggctatgtctctcgttactggtgtccttgattatgaacgtttcaaagatgtagacctcgttatagaggcagttattgagaatgtgaagttgaagcagcaaatattttctgacttagagaagtactgtccttcacattgcatccttgctactaacacatctacaattgatcttaatctgattggggagaaaacaaaggctcaagatcgtattgctggtgcacacttctttagtcctgcgcatgtgatgccacttctggaaatagttcgtactcagcacacttcaccacaagttgttgttgacttgctggatgttgggaagaagattaaaaagacaccaatagtcgtcgggaactgtactggctttgcagttaataggatgttctttccatacactcaatcagcactcttttatgttgatcttggtatggatgtttataagattgatcgtgcttgtaccaaatttggaatgcctatgggtcctttcagactggcagatctggttggttttggtgtggctgtggccactggtatgcaataccttgaaaatttcccagagagggtctacaaatcaatgctacttcctctgatgatggaggacaatagggcaggtgaagccacccaaaaaggattttacaagtatgagggcaagaggaaagcgactcctgatcctgaaattatgaaatatattgaaaaatctaggagcatggcaggagttacaccagatcctgagctgatgaagctaagtgagaaagacatagtcgagatggtgtttttcccggtgataaatgaagcctgccgagtccttgatgagggtatcgccgtcaaggcttctgacctagacatcgcttcgatcttcggcatggggttcccaccttataggggaggtgtcatgcactgggcagattccatcggcgcaaagtacatccatggaaagttggaggagtggacaaagcggtatgggggcttcttcaagccctgctcttacctcgctgaaagagctgcaaaagggattcctctgagtgcaccaacaaagaaagttcaggctcggctataagatgatttccttgtggacggaggagactacgttgaataatggattccggtgaagcatttggaatgcgtagagctgtaggctaccactatcacatgcatgtaacgcaatatactactgtgaaaataaagtgcactgcacggcggtttttttatataaatatcaaggatttttttcttgtcacctgtaaaaatttaatcagattttttgtgg

SEQ ID NO: 13883 - DNA, 926 bp, Zea mays
  Clone ID: LIB143-058-G2_FLI
gactcacgacgacggaaacagtagtgctgccagtagagctctcagaactcgggaaaaaaaatgtcagaggccgccgtgcgtgtgatcggcctatggccgagcccgttcgtgatccgcgtcctgatcgccctgaagctgaagggcgtcgagttcgagttcgtggaggaggtggtgggcaggaagagcgagctgctgctgaggtcgaacccggtgcacaagaagatccccgtcctgctccaccacggcaagcccatctccgagtctctgatcatcgtccagtacatcgacgaggtctggtcctccggcgcgccggccttcctccccgccgacgctcacgcccgcgccgtccagcggttctgggcgcagtacgtcgacgacaagctgccttgggcgatccgcatactgaagggaacggacgacgacgggggcaaggagcaggcggcggggcagctgtccgcggccctgcagctcctcgaggaggctttcgcgcagctcagccaggggaagcgctacttcggcggggacagcgtcgggtacctggacatcgctctggtgtcgcatgtcggctgggtgaaggcggtggagaagatcgccggggtcaccctgctggacaaggccaaggtcccgaacctggtggcgtgggctgatcgtctgtgtgcccacccggccgtggtcgacgccatccctgacgcggacaagttcgttgagttcagcgtcacctatggctccttttcgaagcctatcaatgctcccgccaagtgagcaaaaagggtccgtgcatgctttcgtcattttcactttcactgcgcgtgtgccggtgcgtgtcaaaattgcatagcaaggggattcttctcccacatagatcttcttgtgatcatagtcaccaaatcagctctgaaaatgaagattttctgcccttccaaagg

SEQ ID NO: 13884 - DNA, 1171 bp, Zea mays
  Clone ID: LIB143-058-H6_FLI
cacgaaattctgagatccatccagaaacgtcgctccatggcgattatctccgacttcaaggaggacgagaccccgcagcagtcggcggcggtcggccccggcgtcgaggagaccctggtggcagcgctagagaggaccggcggtgcactcccctttctccaggcggccatcgatgtcgctcaccgcaggtctggcctgttccgcgacccttcggcggtgagcaaggttaccgcgatggcggcggccgtcagggcgcaggtggagaccgaggagagggcagccagagaggtcaagaggaaggcggaggaggccgagaggaaggctgcggtcgaggcgcagaaggctgacatggaggcggcgacggcgacggcggaggagaagctggagaaggaccgtatggatgcggataaggcggaggaaggcaacgttagacaaccaaatgctggcaatggtcttgatttggagaagtactcatggactcaacagttgcctgaggttaacatcactattcctgttcctcaaggaacaaaatcaagatttgtggtcgttgatataaagaagaaccatctgaaggttgttctgaagggccagccacctatcattgatggtgagctctataagccagttaaggttgatgattgcttctggagcatagaggatggaaaaactctttccatattgcttacaaagcacaaccaaatggagtggtggaagtctgttataaagggtggccctgaagttgatacccaaaaggtggaacctgagaacagcaaactctctgatttggatcctgagactagacaaactgtggagaagatgatgtttgaccagcgccagaagcagatgggccttccgacaagtgatgaaatgcaaaagcaagaaattctcaagaagttcatgtctgagcacccggagatggacttctctaaagcgaaaatgccttgaggatttgttcgggcagttatttctaccagtctgcttaggttgtctttgagtctggtatcggtgtcaaacaaatcttcatctgtttttttttttgtaatgcgtcaggaatatcaggcttgttctttttcatctcaatccatatgcattggaagcgtttgggtgggtttaaatccatagtaggtcaaaagctttactaaattttccaatgcaatccattccattggtc

SEQ ID NO: 13885 - DNA, 1665 bp, Zea mays
  Clone ID: LIB143-059-A2_FLI
gtccacatcacttgttcttggaaaggacaatcaaaatgacttcactgcctttgagtactctatttgggctgaccttggggaggacttcatctttgtcccccatgattctagcattggaaggaacaaagtcctattttatccagcaagacagcagtattcagtttctatgaatggatgccaagatactgttcctctaatcactgcaagaactggtctatatcttgaaggatcagtgttacctgcaacttctgatgttgacatcaagattctagcagctggaaagagcaactatgcccatctgaacaaaggggatgtagcaacagaggcaaagacagattctgaaggatcattttttgcaggtcctttgtatgatgacatagtatataaagttgaagcttcaaaggatggttaccatctcaaacaaactggcccatacaccttttcttgtcagaagcttggtcagatattagtgcggatttatggtgaaaattcagagcttttaccttcagtattattatcattgagtggcgagaaagggtacagaaataactcaattagtagttctggtggaaccttcacctttgacaacttatttcctggaagtttctatctccgaccacttctaaaggaatataaatttaatccgtcagcagtagctattgatcttaattctggagagtctagggaggctgaatttcgtgcaaccagagtggcttacagtgccatgggttctgtaacactattaactggccaaccaaaggagggtgtttttgttgaagcaagatctgaatccacaggtttttatgaggaagctaccacggattcttttggtagatttcgtcttagaggacttgtgcctggatcgacttactctataagagtggctgcaaaagataatcttcagtttgcagcagttgagcgtgcttcacctgaatatttgtcagttaatgttggtcatgaagacatgactggtattgattttgtggtttttgaacgccccgaagtaacaatcttgagtggccatgtggaaggagatggcattgatacgttacatccgcatctctctgttgaaatcagatcagcaacagactcttctagagtagaagctgtacttcctcttcctctttcatactactttgaagtccgagatttgcccaagggcaagcatcttgttcagcttcgatctggccttccatcacatacacataggtttgaatcggagttagtcgaagtagatctggaaaaggatccccaaatccatgttggtcccctcaaatataaaactgaggagcgtcatcaaaagcaggaactgaccccagcaccagtttttccgcttattgttggagtttctgtggttgcactggtgatcagtatgccaaggttaaatgacttataccagagcgctgtagggatgacttctctgggttcagggatggcaccgaccaaaaaggagccacgcaagaatatattaagaaagagagtgtaaatggcagattagcttagccttaggggtcgagaaatgagacatgacaaattgagcaatttcaagagtggaatagcttctggtttccccctcgggtaattttgccgacgaaaaggaatgccagttttgttgtacgatagcactatgcacagtttttgaagccttagattgtgccgttttgc

SEQ ID NO: 13886 - DNA, 920 bp, Zea mays
  Clone ID: LIB143-059-A8_FLI
cacagacacatccaacgagcccgaccgccagagctcgccgccgtcctccgcagacaatccaccatggcgatggtgctggggatggtgctggggaagatcccggtggagacgcccaagcacgaggtcctccacaccggcgccggctacgagatccgcaagtacccgcccagcatcgccgcggagttgacctacgatcccaaggagatgagaggagaccctgatggcgggttcaccgtcctcgccaactacatcggggtcctcggaaagccgcagaacaccaagcccgagaagatcgccatgacggctcccgtcatcaccaccgagcccatcgcgatgaccgcgccggtgattacggacgaccagcaggcgccgggcaaggtgacaatgcagttcctgctgccgtccaagtacaccagggtggaggaggcgccgcggccgacggacgagcgggtggtgatccgcgaggtgccggagaggaagttcggcgtggcgaggttcagcggggtggccacggacaggacggtgagggagaaggcgaagggacttaaggccgccctggagaaggacgggtacaccatcaaggtcccgttcgtgctggcgcggtacaacccgtcgttcacgctcccgccgctgcgcaccaacgaggtcatgttccccgtcgagtgatccggcaaggcgccggccaccgcccagctaccggccgcggttcttctgtgaaatgacggcttgaggttcaggaggaactgtgtttgtattttgtatctgtatttctcttgaagttgttgtagaatatgctttatgcaacgagttatggataaattttactactcttcgatcaatgaagaactaaaccctggtgtggatccgtatttcagacagtttttagttataaggtataaagcaatttacatttatattat

SEQ ID NO: 13887 - DNA, 1384 bp, Zea mays
  Clone ID: LIB143-059-B1_FLI
ccgaaaaaacccaaagtcacgtttcctcctcaacaaaaaccctcgcaaaaatctgggatctatctagaagcaccactcaacaaaccctaggttgcctgatcggctgatcgctccatggcgatcatctccgacttcaaggacgacgaggcaccggagcagcagctggcggccggccacggcgtcgaggaggccctcgtggcggcgttggagaggagcggcggcgcgctccccttcctacaggcggctatcgatgtcgcccaccgcaggtccggcctgttccgcgacccttcggcggtgagcaaggtcaccgcgatggcggcggcagccagggcgcagatcgaagccgaggagagggtgaccagagaggcggaggccaagaggaaggcggaggaggacgagaggaaggcggaagccgaggcgcagagggctgccaaggaggcggtaatggcgacggcagaggagaagccagagagcacggtggagaaggacatcatggaggtggataagaaggaggaagccaacgtgagacaaccaaatgctggcaatggtcttgacttggagaagtactcgtggactcaacagttgccagaggttaacatcaccattcctgttcctcaaggaacaaaatcaagatttgtggtatttgatttaaagaagaaccatctgaaggttggtctgaagggccagccacctatcattgatggtgagctctataagccagttaaggttgatgactgcttctggagcatagaggatgggagaaccctgtccatattgcttacaaagcatgaccaaatggaatggtggaagtctgttataaagggtgatcctgaagttgatacccaaaaggtggaacctgagaacagtaaactctctgatttggatcctgagactagacaaactgtggaaaagatgatgtttgaccagcgccagaagcagatgggccttccaacaagtgatgaaatgcaaaagcaagaaattctcaagaagttcatgtctgagcacccggagatggacttctctagagcgaaattagattgaggatgtgtttgaccatttgtctgaatgcgttattagtatgaaacattttttgatcagtttgcatgtaatgcgtcagaaatatctggagatagacttctctagagcgaaaatagcttgaggatgtgttcggccagttatttctaccagtgtgcattaggttgtctgagtgcgttattagtatgaaacaaaaattttgatcagttcacgtgtaatcgtcagaaatatccggagatggacttctctagagcgaaaatagcttgaggatgtgttgggccagttatttctacagtgtgcattaggttgtctgagtacgttattagtatgaaacgaattttgaacagtc

SEQ ID NO: 13888 - DNA, 1091 bp, Zea mays
  Clone ID: LIB143-059-C3_FLI
ggagaccggcgccctcctcttccctgccattaacgtcaacgattccgtcaccaagagcaagtttgacaacctgtatggttgccgccactcactccctgatggtctgatgagggccaccgacgttatgatcgccggtaaggttgccgtggtctgcggatacggtgatgttggcaagggttgtgccgctgcactcaagcaggctggtgcccgtgtcattgtgaccgagatcgaccccatctgcgccctccaggctctgatggagggtcttcaggtccttcccttggaggacgttgtctcggaagctgacatcttcgtgaccaccactggcaacaaggatatcatcatggttgaccacatgaggaagatgaagaacaatgccattgtctgcaacattggccactttgacaatgaaattgatatgctcggccttgagacctaccctggcgtcaagcgcatcaccatcaagccccagactgaccgctgggtgttccccgagaccaacactggcatcattgtccttgctgagggtcgcctgatgaaccttgggtgtgctactggccatcctagctttgtcatgtcctgctcattcactaaccaggtcattgcccaacttgaactgtggaaggagaagagctctggcaagtatgagaagaaggtgtatgtgctccccaagcaccttgatgagaaggttgctgctctccacttgggcaagcttggtgccaagctgaccaagctcaccaagtctcaggccgactacatcagcgtgccgatcgagggtccctacaagcctgcccactaccggtactaggcagccagcacacggcttgcagctcactcgggccgttgtgtgctatgaagttcgctacactggcctgtcagttatcttttgcatgcatatgcattatcatatacgcagtcgcgtagcaggtttccttatggttatcgcttgagctgagggggagggaaggagctgtttgcttttgctgaagaataatggtgtagtcggctggggtgaggcgatgtgcgttgccagatacagttttgtcttgttgactctacttatctgattatcatttgtaagcgatttgctc

SEQ ID NO: 13889 - DNA, 837 bp, Zea mays
  Clone ID: LIB143-059-F10_FLI
gcccaatcgatcggcgctagccgctagcacgcctataaaatgccacttcattgaagtagatccatgcagcgccgagccatagccacagcccaccgcgcgagcaacgatgttcaggtgccccagcaatggctacggccaaccgcaccccaccgcgaactaccaccgcacccactccggcgaacacgtcaccaccaaggtcgcccagaaaccctgccatgccggcggcgccgtgcagcagcaccacgttgtccacaaggagtcgtcgttcaaggagctggacgggggtaaccgccgctgcttcgacaactatcccatgaacgctgctaacaacgcgaaccaccaccgctacgaggcctacgaggaaacctacgaggaaaccaactgcgaggaggagacgtacgcgtacggcgccggccgccaccatggtcacggcagcggcggcggcgggcgccgcttccagtaccagacccacgaggagacctacgaggaggaggaagaggaggtcgtcgtgggcgggggcgacggcgccggcgccggctgggcccagctcaggcgcccatcctgccgcgcatgagcagcaggcacctgctcgtacgtggaatgtgcggatgcgatgcgagtccggattggtggacgccacgcgttggttcatgggtacaattgcaaattctaataataacctgcaggtgacaacctagctaatctcgtacgtaaataaattgtactcctagtcccaatccccattaatccatcgatgctctgcatccaccgtatgtattccatgtatggctgtgagttgtgacacaagtaaaaccaaattgacaaaaaaagatcatg

SEQ ID NO: 13890 - DNA, 1087 bp, Zea mays
  Clone ID: LIB143-059-F4_FLI
cttagctccactccagctccaatcacagtcgtgaccagagcgcgagagctagctagagggccgtgaaaatgccgatcaataggatcgccctggggagccaccaggaggtgtaccacccgggcgccctcaaggcggcgttcgctgagttcatctccaccctcatcttcgtcttcgccggccagggctccggcatggccttcagcaagctgaccggcggcggcccgacgaccccggcgggcctgatcgcggcggcggtggcgcacgcgttcgcgctgttcgtggcggtgtctgtgggcgcgaacatctccggcgggcacgtgaaccctgccgtgaccttcggcgccttcgtgggcggcaacatcaccctgttccgggggctcctgtactgggtggcgcagctgctggggtccaccgtggcgtgcttcctgctccgcttctcgacgggcgggcaggccacgggcaccttcgggctgacgggcgtgtcggtgtgggaggcgctggtgctggagatcgtgatgaccttcgggctggtgtacacggtgtacgccacggcggtggacccgaagaagggcagcctgggcaccatcgcccccattgccatcggcttcatcgtgggggccaacatcctggtgggcggcgccttcgacggcgcgtccatgaaccccgccgtgtccttcggccccgccctcgtcagctgggagtggggctaccagtgggtgtactgggtcgggcccctcatcggcggcggcctcgccggcgtcatctacgagctgctcttcatctcccacacccacgagcagctcccctccaccgactactaaaagccgaagccgaccgacctaggggtgcgcagcgcagctagcgcatccagctctctctccccgctcgccgccgtttagtttctctcgtgcacgtgcatgcatcgtcgactgtctcaggccgccgctgcgccggcgccgctcgcatcgtttgcttccttggaccagcagtcgtcgccgtcaggctgaactgcttgtaaccgtgaattccggacccgtttgcttctgtaagatttgtgcatttgcctgagtacacctcgatctgcagc

SEQ ID NO: 13891 - DNA, 1832 bp, Zea mays
  Clone ID: LIB143-059-G1_FLI
tgctctcattgacaacagacaacaagcagtctggaaccttcaacctgtctggatccattagacggcaggttctgtctcccgctagttctcttcttagtccatgtagggggtgtttggtttgaggaatcactttatccaaaatgtagtggtgcatcatgggtccattcctcaaatttgttgggatgacctcattcctcatattagtactaactaaataactataaggaatgaggtgatgatggatcaactcaatccattacacaaaccaaacaaaaaattgaggagtgagaagacgatgacctagatcattcttcaaaccaaacagcctagtagtgttaaatgttttgcataccatgggcaccgttttgataaagttgtcttacttctaattaggggcacaactaaatgtcatacctattttccgctgctcttgacgtttatttaatagggatgagacttcatgcacttaacaatgcacaccatttttttgaattttgaatttgtaggctacctattatgaactaacaaagaaatgtacacttcaagctcaaatgaatgaactgctaagttacatgcagttttagtaaagcctagaaggccagtagaaacaaatagcaactttcaagtgtttagggaactttcacatgataaattgtttctaaactaataagcattatttggagcaatacttctttgattagaaaccctgctcaggtatgggaacaattgttgtgcaagtagaccttaggtgtaagcgtgcaagcgagcctcctgaatctttagatcatggtccaaccgtagatgtaaccgtagtttgtcagtttttttttttgaaaaaagctgcataagctggtggtgaagaggtttaagtgttaaatgtgacctacacttggattaggatttaaatgatcagaaagctcgcttgcatcgcagtcttgcttgcacaacggtcgttcttctgaggtatataggaagcgcttcgtagagaagctgcacaaatggagtaaaacacagtcaaaataagtaggtttaacccatctactttttagcacaaatgggatggtgggactaagcgcaaccagaataagttgcagaaaagcattcagtttggccatgaacagcttataagctgtaccaaacaggccactggaaaaagctaatgtgataactacctgtttctatttgcagatgagtatgactcttgctgtagctgatggacaccttgttaatatggggaaaatgatagaagaaatggaggggaagctgagaaattcactggaccaagtacagttttgcattgataatgattacgccgaatattaagatatcccaaagttgctgacatcatttgcaacttgccaattccttagccgcatgcataatatcattctattggcaggtttattttgggaagaccagagaaatggtttgcactcttcggccaccaccagaagttcttaatatgagactacctgacagctgagccagtgcatagaagtgtcaacttaacaaagaaaaacgtattcttctccactctaggcgtggtctgttcttgcttcgtagttaatagtctgtgcatctgtatcgacatctgttgaggtatctatgataggagcttattatcttctgatcttttgtgattagctgtaatccgcgaagtgtttgacaggagccagtgtttgcagtggaactcagttaccaacagatgaatctccacaaaacgttgtgttggcgttctgtatcttctgaagaatctgatggtgttgtggctggacttgctatctgtcaaagtactaatgcggtgtttgttttgaggagtcgcctcatatcgg

SEQ ID NO: 13892 - DNA, 1682 bp, Zea mays
  Clone ID: LIB143-059-H6_FLI
caggaaggcactcacttctccaggagcccggagtcggcagcaagagagaatggccgccgacgccgccgccgccgccacccttcgtactgctctctcccaagcaacagggcaagagcagagagcttcactgctgtgcacaccgaagcaccgagttgctgccagcaggagaagcttgagattcaccactagggccagctcgaatgcgggcgccagtgtgagcatcccgaagcaatggtacaacctcatcgccgacctgccggtgaagccaccgccaccgctgcacccgcagacacaccagcctctgaatcccagcgacctctcccctctgttccccgacgagctgatcaggcaggaggtcaccgacgagcggttcgtcgacatacccgaggaggtcatcgacgtgtacaagctctggcgcccgacgcccctgatcagggccaggaggctggagaagctgctcggcacgccggcgaagatctactacaagtacgagggaaccagcccggcggggtcgcacaagcccaacaccgccgtgccgcaggcgtggtacaacgccgcggcgggggtgaagaacgtggtcaccgagaccggcgccggccagtggggcagcgcgctgtccttcgccagcagcctcttcggcctcaactgcgaggtatggcaggtgcgcgcgtcgttcgaccagaagccgtaccggaggctgatgatggagacgtggggcgccaaggtgcacccgtcgccgtcgacggcgacggaggccggcaagaggatcctggaggcggacccgtccagcccgggcagcctcgggatcgccatctccgaggcggtggaggtggcggccaccagcgccgacaccaagtactgcctgggcagcgtgctcaaccacgtcctgctccaccagaccgtcatcggggaggagtgcctggagcagctggcggcgctcggcgagacgcccgacgtcgtcatcggctgcaccggcggcgggtccaacttcggcgggctcgcgttcccgttcttgcgcgagaagctgcgcggcaggatgagccccgcgttcagggccgtggagcccgccgcgtgccccacgctcaccaagggcgtctacgcgtacgacttcggcgacacggccgggctcacgccgctgatgaagatgcacaccctcggccacggcttcgtccccgacccgatccatgcaggtgggcttcggtaccatggaatggcacctctgatctcgcacgtgtacgagctgggcttcatggatgccgttgctatacagcagactgaatgcttccaatctgccttgcaattcgccaggacggagggcatcatcccggcgccggagccgacgcacgcaatcgcggcggcgatcagggaggcgctggagtgcaagcggaccggggaggagaaggtcatcctgatggccatgtgcgggcacggacatttcgacctcgccgcgtacgagaagtacctgaggggagacatggtcgatctctcgcacccggcggagaagctggaggcctccctcgctgccgtgcccaaagtctgacggcgttggagccaacagcacatgcgactggaatgggacgaataatccattgatatcaggttcatgaatcttgtggtgatccatcgcccatcggcagtgggatacttgtgttccttatgaaatgaatgaataaaatttcaat

SEQ ID NO: 13893 - DNA, 1159 bp, Zea mays
  Clone ID: LIB143-060-A3_FLI
ctagcttcttctagctctagctaggctcgtctgctgcaagaaggtaacagcgcaggcatggaggggaaggaggaggacgtccgcctgggcgccaacaagttctcggagcgccagcccatcggcacggcggcgcagggcacggacgacaaggactacaaggagcccccgccggcgccgctcttcgagcccggggagctcaagtcctggtccttctaccgcgccggcatcgccgagttcgtcgccaccttcctcttcctctacatctccatcctcaccgtcatgggcgtctccaagtccacctccaagtgcgccaccgtcggcatccagggcatcgcctggtccttcggcggcatgatcttcgccctcgtctactgcaccgccggcatctccggcgggcacatcaacccggcggtgaccttcgggctgttcctggcgaggaagttgtccctcaccagggcggtgttttacatcatcatgcagtgcctgggcgccatctgcggcgcgggcgtcgtcaaggggttccagcaggggctgtacatgggcaacggcggcggcgccaacgtcgtcgcgcccggctacaccaagggcgacggcctcggcgccgagatcgtcggcaccttcatcctcgtctacaccgtcttctccgccaccgacgccaagaggaacgccagggactcccatgtgccgatcctcgcccctcttccaatcgggtttgccgtgttcctcgtccacctggccaccatccctatcaccggcaccggcatcaaccccgcgcggagccttggcgccgccgtaatttacaaccagcaccatgcgtgggctgaccactggatcttctgggtcggccccttcatcggcgctgcgctggctgccatctaccaccaggtgatcatcagggcgatcccgttcaagagtaggtcttaaaggagccgatgctgctgcttcgagatgctgccggtcttgaaaggatggattcgtggctgtttcaaatgatcccctactatgttacgtggagttccattcctctttcaaagttcggagctgcttttatccgaacccagacttgtaattcatctgtaccaattgtgtaatatgccgcgcctctgttatgtgcaattcaaaattatgagacagcgagtcaagctttaagagttcatcc

SEQ ID NO: 13894 - DNA, 1285 bp, Zea mays
  Clone ID: LIB143-060-C3_FLI
aaacttccttcacaagatgcgttgaacaccctgggaatcacccacgccacccatctcaccactgcaccactgcgcgcttcatactgctggccgggctgctccagcaccaggaacgctcgctcctgctcgtcgacgttagattttcccagacgcgcgagctccccagcaactccaacacgttgctcgcctcgctcagtcttcaagccatcgtgccgctggttctagccaaagtggggcgcgttctttccttcgccaggcagcgcctccagtcgtcgtttcttttccacggctgcacgctcaccgactcaagcgcttggccatggagctcggtttcgtgtgtgcctgtgctgggtcaccaggtcacgtgctcgtccgttttgatgtcgtgcacgctccggcttgtggaactcgccagcgttgtcagctactactagacctcacagtggtactatgatgccgccgtggagacgtctactatgccatctattctctgttgtctcgctacacctgattgtcatcctcgtccttgtctcgatctcgctacggcagcatcggcgctctcgatatcgtcctgagttcactccgcgtgctgcgacgtctcgctcacctcctcgccaagccgtcgtcgccctcgcggttatcgggtcgattcgatcagggtaagctgatctattattcccgctagttaaatctggtaaaactagaaaaatcgtgattgttgtgtttagtgagttatagatgtctagtgctttcgtaggattgtatcgatgtcttgccgctaaatatttgattctcttttttgtatcatccggttactttatgctcatacatgtgcattgtgcatcttatgatgtacgataattaatcaagtaagacgaaggaaaagagtcaagtcgataccaagcgcgggctaatccgcaggatgatgctgatgaacgaaccggaagatggatctgaacgagtgccaagccaatggatgctcgtcatgtggtcggctaacaaacactaacctagtgttactcaggttatagttttgtgctgttgatgatggtgttaagtgccggtgggctcggccttcttataagtctaagtaactcttctatacttcttattgaggatggtcacttaagctagcatatatttcaaaactacaaataatttataacagttcaaagttacttctttgaatcactttttgtaatcactccgatcatttacattgtaaaacttgatgtaacttgtaaaatttggtaataagatttccgctgcaaaatgttggtgtgtg

SEQ ID NO: 13895 - DNA, 1311 bp, Zea mays
  Clone ID: LIB143-060-D9_FLI
gtccccactcgtcgcccatctgccgtgacgtcaccccattcttcatcggttcccttcctcgcctcggttcgcgggtacgccgagtcgcagacgcacctcaatcgcaaccttttggactcaaaggggggcaatagacagcagggaacagaactgagcgaggagattcccaaggatctcgtcggacgctagaggaagggacgggggacgggcgatggcgggggacgccggcagcggggtggactgggagagcctggcggaggccacctccggggcaatcggctcgctcgtcagcaccaccgtgctctacccgctagacatctgcaagaccaagttccaggccgagcttcagacgcaccagggcgcgcagaagaaatataggaacctttcagatgtgttctgggaagcgatttgtaaaaggcaatttttgtccctatatcagggccttaacacgaagaacatccagtcttttgtttcctcgtttttttatttttatgggtatagctattttaaaagactctacctggagaagagtggagcaaagtctattggaacaacagccaatttgttagttgcagctgctgctggtgcttgcaatgcaatcgtgacacagccattagatacagcaacttctagaatgcagacgagtgcctttggaaagtctaaagggttgagggaaactcttgcagaaggtacttggatggaagcattcgatggcttaggcatttccattatattgacttgcaatccttctattcagtacactgcatttgatcagctcaagaaaaggataattcagaggcagcgacgcaaaaatgcagcaacggcagaggataattccatagtgtctctttctgctttctcagcttttctgcttggtgccgtctcgaaaagtattgctacagtattgacttatccattaatcaggtgcaaggtgatgattcaggctgcagaccctgataaggatgatgacgatgattctgaaaggccaagcaagtcaagaacaccaaaaacaatgctaggtgccttgcatgctatctggagcaaggaaggcattccaggcttcttcaaaggcctgaatgctcagatccttaaagcagttctgagctccgccttgctgctgatgataaaggagaagatctcgaagttcacttgggtctcgctgcttgccctgcggcggtatcttttcgtttctcagaagaggatcaagagtgtaactgtataaatactagctccaaacatagcgacatcgtgcttatggagatgttatgccaaggaattaatctgaggaataatgagcagaaatactgaagc

SEQ ID NO: 13896 - DNA, 394 bp, Zea mays
  Clone ID: LIB143-060-E7_FLI
cttctcctttttgtttgggaggtcgccaaattccatcccatctctcagcgtcgtggtctccccgatatggatgggggaagagacaagctcgaacaaggaggctacgggcattgctttatgtttgtgacgctaaaggatctctatccatcattgtttccatattatcatggtattattgccttcaatattattctctatatcaactacagctaccgtggaggagttgatagtgaaggttgtccagttatttgtcgttgtcggtgctcactttcttcttcgctgcttgattcttgagttatttggtctatatgtagcaaatgtgattgaatcttaactgtcagtggacataattagacattttcaataagaagaatatcaattttagttgattcct

SEQ ID NO: 13897 - DNA, 1405 bp, Zea mays
  Clone ID: LIB143-060-F4_FLI
gtgcatgcactactagctctagcttcgcactactagctctagcttcgccattgcattcgcttactggagtacgtctggtacttgcacaactggctatcatggcgccccacattgtcgtcaacaaaaccgtgatcacattcacagcggtggccctgacgattcttgctgtgacaaccatgatggccgaggcccgagacctgtcatccacctccaccggtggctatggcgaggaagccatgaaagtgaggcatcagcagtggatggcggagcatggccgcacctacagggacgaggctgagaaggcgcaccggttccaggtattcaaggcgaacgccgattttgttgacgcgtccaatgccgcaggtgacgacaagaagagctatcggctggagctcaacgagttcgccgacatgaccaacgacgagttcatggccatgtacactggcttgagaccagtcccggcaggggcaaagaagatggccggtttcaagtacgggaacgtgactctctcagacgccgacgacgaccagcagacggttgactggaggcagaaaggcgcggtcaccggtatcaagaaccagggccagtgtggttgttgctgggccttcgctgcggtggcggccgtggagggcatccaccagatcacgacgggcaacttggtgtcgctatcggagcagcaggtgctggactgcgacaccgacgggaacaacggctgcaacggcggctacatcgacaacgccttccaatacatcgtcggcaacggcggcctcggcaccgaggatgcctacccgtacaccgccgcgcaggccatgtgccagtccgtgcagccggtggccgccatcagcggctaccaggacgtgccgagcggcgacgaggcagcgctcgccgcggccgtcgccaaccagccggtgtcggttgccatcgacgcacataacttccagctctacggtggcggggtgatgaccgcggccagctgcagcacgccgccgaacctgaaccacgccgtcacggcggtaggctacggcacggcggaggatgggaccccgtactggctgctcaagaaccagtggggccagaactggggagagggaggatacctcaggctcgagagaggcgcaaacgcctgtggtgtcgcccagcaagcctcctacccggtcgcatgatgaataaagcatatattctacatatacacgaaggcatgcataaaaatggctagtaaggaataaagcatgcaaacacattgacagtacatacatacatagcttaaaattgaatcacaattgtcatgtacaacactccagatatcatttatttctatttggccttcttttcaaagatcgatattctatatatacatatatgtaagggaacaagtttttatagcataataagtccttcgcacctc

SEQ ID NO: 13898 - DNA, 709 bp, Zea mays
  Clone ID: LIB143-060-F8_FLI
aggatgttcgggctggagaccccccgggtggcggcgctgcatcacctgctggacgtgcccgacggcgacaaggcgggcggcggcgccacgcgcacctacgtccgcgacgcgcgcgccatggcggccaccccggccgacgtcaaggagctcgcgggagcgtacgcgttcgtggtggacatgccggggctgagcacgggcgacatcagggtgcaggtggaggacgagcgggtgctggtgatcagcggcgagcggcgccgggaggagcgcgaggacgccaagtacctgcgcatggagcggcggatgggcaagttcatgcgcaagttcgtgctgccggacaacgccgacgtggacaaggtcgccgccgtgtgcagggacggcgtgctcacggtgaccgtcgagaagctgcccccgccggagcccaagaagcccaagaccatcgagattaaggtcgcctgagtgtagaccgttgtcggagcagtgccagtgagctgggtggcaacctgcgggactctggtgaggaagagcaaatggtagaaagcagtagctgtgcttctgaacattgtgtgtgtttgtttcccttgttaccgccaatcatcctacctgatgtgtcgtctggggtttcgtttgaaccatgctgggtttggagctttgtgatgcaaagcagaatgtcctgatgctttctttctccatagaataaatctctcctgtt

SEQ ID NO: 13899 - DNA, 800 bp, Zea mays
  Clone ID: LIB143-060-G1_FLI
cactcgcatctctctcgccgcagcgctttctctcctcccgagatccctctcctcgtgctcgccgccacgcccgcgtgaacgccctcgctgccgcttcttgcactccccgcgcgccactcctcgctttcgcccaagccgcctcctctccctctccgtcgcccataatcaagcgagactgcgtgcaggggtgcatgctgcacgcggtggcgacgagctacggcacgaccgcgacgtcacgaatgactccgagttccgttcgtggggtgcaggctcaccggctccgcatgctgtaattgggcaaagcgtggggacgctacgctcgggtggtctacttcaatcttagcgcccagcgacatcgtcgtgcaccagggctggagcgactaggcgaccggtccagaacgaacaggtcagcctcatcgaacggtcttcaactactggcaaatgcaacgccgttagttgccgcatgtgactactcgcaaatcagatggtaaacacgagtaaattaaatagtaggattactttacggcatgtataaatagcacatagtgcatgacgaggtgcagcagtagcagcatgatgccaacaactgcactctggtttcttattttccagctggatcttgcacgcacatctaatttgtcttttttttggctggaatttccttcctgtctatacatgtagtatgtcgattatgttgtcttcctattttttatttactactaatagttgtatcacagaagtcccattcttctctactcctttatctaatttactgtttttttgtcttagttgatccaatt

SEQ ID NO: 13900 - DNA, 372 bp, Zea mays
  Clone ID: LIB143-060-H12_FLI
gcggtagtaacagtcacatcctggccgggacggatctcactgaggttgggaaatctttcacttgcatcgttcgctttgacactgaggtggagctggcgtacttcaaccatggaggcatcctcccttatgtcatccgcaacttggcagctgcgcataactgaggcaagatcacacaccgtttgacccacaatggcagtggcaggctccatgttcccagggctagcgacctggttctcaatgtagtgacatttgtgatggatctaggggtctctttgtcgattcagcccataaataaagtgtgaaataaaagccgcaggtggaggcaggaacctgctgattgagggaacagttttgcctgtgtttggttacatg

SEQ ID NO: 13901 - DNA, 1087 bp, Zea mays
  Clone ID: LIB143-061-A2_FLI
gttccccgccccaccaggtacccacgcgttcctcagatcagatcggcaaggccaatccgaaatctcgagcgctcgcgccggcgaccacagcaaagaggaggccgcagcacgacagcgccccagggttcctactctcgtcgcagcggcagcactggtagcggcagcagtgaggggaagatgtcgtcggtgttcagcggcgatgagaccgcccccttcttcggcttccttggcgccgccgccgcgctcgtcttctcatgcatgggggcggcgtacgggacggccaagagtggcgtcggcgtggcgtccatgggtgtcatgcgcccagagctcgtcatgaagtccatcgtgcccgtggtcatggctggtgtgctcggtatctacggcctcatcatcgccgtcatcatcagcactgggatcaaccccaaggccaagccatactacctctttgacggctatgcccacctgtcgtccggccttgcctgtggtcttgctgggcttgctgcaggcatggccattggcatcgttggtgatgctggtgtcagggcgaacgctcagcagccaaagctgtttgtgggcatgatcctcatcctcatcttcgccgaagcgctcgccctgtacggtctcatcgtcggcatcatcctttcatcccgcgccggccagtctcgtgcggactaggcacgttccacatgtctctgccacctggtcgtgttttgtatccgtgatgagccgacaagctggagcacttaatttttttttatgctgtctagttttttgaacttgcgttgagtcgagaaaacaaaatagaacttgtgtagccgaggggtgacctttttcccttgtgccattcttttccctgtcgtggtgggtggtgggcttgtgtagtcgatacttctttctgcacactttttttttgcttgggctgggggcgttggtgtaatctggtgaataagcgagtgcgtccagtgcaatgggagctcaggactcttttgttcaaaatccgccttgtttcgtcgttgtcttgttctgtgttctatatgaatattgttgtgtgggaaatacatgcgtggctcatgaactagtgcttgtt

SEQ ID NO: 13902 - DNA, 570 bp, Zea mays
  Clone ID: LIB143-061-D9_FLI
aaacttggcattcttgcctgttcttaattattgccaggacaggagaaacaaagatgaggcctcagctgatactcgtcggcactctggctgttctcgccatcctcgcagctctcggcgaaggctcgtcgtcctggccctgctgcaacaactgcggtgcttgcaacaagaagcagccgccggagtgccagtgcaatgacgtgtcggtcaacgggtgccatccggagtgcatgaactgcgtcaaggtcggtgcaggaattcgtcccggcatgggccatggccccgtcgtcacctaccgctgtgacgacgttctcacaaacttctgccagagcagctgcccggaggcgccggcgccataggcgggtggccggtgtcttcttctgacgtacggcatgggacgccaagtcgagtttgcttctctccagtttcgtcagagaaaagaaataaataaataaataaatgtcgccggccgctctgttcggtgcttgctcttgttcgtcgtccgtgtattagtactctcttttttctttttctttcttgaataaagagccatatgctgcatatgccatgctc

SEQ ID NO: 13903 - DNA, 1536 bp, Zea mays
  Clone ID: LIB143-061-G5_FLI
cccagacccagacagcaaggaaccttggagcctgccggcaagtctaacgacgacgatggccgaaggggacggtccaactccagcccgcggcgctcgcgtcgtgctgttcccactgccgtcccagggccacctcagcccgatgctgcacctcgccagcgcgctccacgcgcgggggctcgcagtcaccgtcctccacacggcgtacaacgcgccggaccccgcgcaccacccggggctagccttcgtcgccgtgcccgacgtcatcccggaggccgtggcggcgacgacgaatggcatcgcgaagatcctcgccctgaacgccgccatggaggcgtcggggcacgtccgcggcgcgctcgcgtcgctcctcgcggaggaggcgggcggacagcggctggcgtgcctcatcttcgactccaccctcttcgccgcgcagaaggccgcggctggcctcgggctgcccacgctcgtgctgcacaccggcagcgccgccggcttccgtctgttcaggtccgacacctacgacatgctccacgacaggggctatctgccagccacagagtccaacctacacatgccggtaaaggagctgccgcctctgcaagtgagggacctgttcgacccaagcaagctccccaacaaggaaatcgtgcagaagatcttgggtcgcgccacggagagcacgacgaactcgtccggcgcaatcctcaacacgtttgaggatctcgagtcccgcgagctcgagatgatccgggacgaacttgccgacagaggtatcccacccttcgccgtcggcccgcttcacaagctcaccgccgtctccaacgatggcgccgacgagactagtcttctcagccaggaccgcgtctgcatggagtggctagacgcacgggcccctggatccgtgctgtacgtgagcttcggcagtgttgttcatgtcaccccagacgagttggtggagatcgcgtggggcttggcgaacagcggcgtgccgttcctgttggtggtccggcgtggccttgtggtcggagtggacaagcaggagctcccggacgggttcatggcggccgtggagggcaggggcaaggtgatcgagtgggcgccgcagcaggaggtgctagctcacccggcagtcggaggcttctggactcacaacggatggaactccacgctggagagtatctatgagggggtgcctatgctgtcgaggcccatctttggagaccagttgccaacggcaaggtacgtgtgcgacgtgtggaggattggagttttgctggagggtgtgctggagcggcgggaggtggagaaggccatcaagaagctgatggaagaagacgagggagttggtatcaggggaagagccaaggatttcaaggagaaagtgcggatgtgccttgagagcaatgggtcttctcaacttgccgtcgataagttggtggatcacatactttctctttgagttttttttttatcacacaacactgttatgtctgttcatggtttgaactcaattaataactgctggtttatgat

SEQ ID NO: 13904 - DNA, 1813 bp, Zea mays
  Clone ID: LIB143-061-G7_FLI
cccggacagttttgcgcacaagccccccattcccattctaccaccgacccgtcccgtcccactgcctgccagcgtctcccccgctccctctcctcgagagatctcgcgctccggcgatcgggcgcggcgggcggagggtcgcgaagtgccctgcccacccccgatgctcttcccgaagcgcatcaactacgtggccccgatgctcgcctccgccgccatcctgctcctcctcctctcgggctacttcgagctcccctccatctccaccccggcgccgctcctcgcgggcgcagcgcgcttccccaccgcgctcgactccgtcggatcgcgcgaccgcgaccccttcacctcgctcctcgaggccttcgcgtcctgggacgccgccgtcggctgcccccgcgtccgcgccaagctcgccgccgcggggctggggctgggcccgggcctgccgctgccgagtgcgagcgccagcgccagcgctaacggcaccgcggaggaccctgcggcggcgtccgtcagcggcggcgccgcgtggcgcggagccgcgaggtgcgaggacctggcagcgcgccacgtcggggtgctcgtcaagggctggacctggatccctgacgcgctcgacggcgtctacacctgccgctgcggggttagctgcgtctggagcaagtctgccgccgccgtcgaccgtcccgacgcgctgctctttgagggcgccacgcctccgccgcagagaatgaaaggtttgcctcttcgtgtttacctggatctggaggccagtaggaagccaactggttttgaggacatttttgtcggttaccatgccagtgatgatgtgcaagtaacatatgctggaaaatcatttcacaccagccgaagttaccatatatcaactgaaaagagaaacgatgcacttatctactggtcatcttcaaggtgtcttcctcatagagataagctcgcaaaagacttcctctcgctggttcctcaccattccttcggaagatgtttgaacaatgtcggcggtcctgacatggcgctatccatgtatccagtctgctccaccaacgataacggcacgccacactggtgggatcacctacactgtgcgatgtcacattacaagttcgttcttgcaatcgagaacaccaagaccgaaagctacgtgaccgagaagctgttctacgctttggaggctgggtcggtgccgatatactttggggcgcccaatgtctgggatttcgtccctcctaattctatcatagacgcctccaaattcagttcactcagaaagctggcatcgtatgtgaagacgctggcaaatgaccccgtagcctacgctgaataccacgcgtggaggcgttgtggtgcgttgggtaacttcggcagggcacgcgagatgagccttgacacgctgccttgccgactctgcgaggtggttagcaagagaggtggtaagggtgcagatgcattgtgagatggatcggtgttttgtatggcttgtataccttgatccggacatgtgaaatagatgtaaatggtacgtcgaacgaagtgctcatgctattccgttcaggaaaaaagtgtctagtgtgttattcatgtcaagatcaagcacacattgtcgaaagaaatagtgcagctattcttttttttacaccatctctcttttatctgttgaatttggagggttgtacagttgttggagcagagagagttcgtgtttttaggtagagaagtatacagatgggatttcttgctgttgctatgatatgaaccatataaccatgtgtgagctccgcacttaaatttgtgt

SEQ ID NO: 13905 - DNA, 675 bp, Zea mays
  Clone ID: LIB143-061-H10_FLI
ctgtgcaaggtcatcaaggaggttctgggtgacaaagttgagaaggtggtggtgtctgatcgcgttgtggactcaccgtgctgccttgtgactggcgagtatggctggaccgccaacatggagaggatcatgaaggcacaagccctgagggactcgagcatggcgggctacatgtcgagcaaaaagacaatggagatcaacccagagaaccctatcatggatgagctccgcaagcgtgccgaggctgacaagaatgacaagtcagtcaaggatctcgtgatgctgctgttcgagactgctctcctgacctccggcttcagcctggatgaccccaacaccttcggcaaccggatccaccgcatgctcaaactcggtctgagcatcgatgaggacgagcctgttgaggcagaggccgagatgcctcagcttgaggacgacgctggtgaaagcaagatggaggaggtcgactaagtgtcgcatcgcatgcttgccgtttatcttatccctagctaagctacctgtgatagcttaattttcactattgttcgaggtttttggcacgttatcggttgtcctgctggccaggctataagtctggtttatctgttatgtttactctttttaacatcttgtcgttattattcgtaatggtaaaaatgtagtacatgttgtgcc

SEQ ID NO: 13906 - DNA, 695 bp, Zea mays
  Clone ID: LIB143-061-H11_FLI
aatcgtctcgctcgtggctgccctgctcatactgcttgccctcgccgtatcgtccacccgcaacgcacaggaggattccatggccgacaacaccgggacgttggcgggcggcatcaaggacgtgccggggaacgagaacgaccttcacctccaggaactcgcccgcttcgccgtcgatgagcacaacaagaaggccaatgctcttctggggttcgagaagcttgtgaaggccaagacacaagtggttgctggcacgatgtactatctcactattgaagtgaaggatggcgaagtgaagaagctctacgaagctaaggtctgggagaagccatgggagaacttcaaggagctgcaggaattcaagcctgttgaagagggtgctagcgcctaaggatctctccttctccatgtgcgagcctgaagctcaaagcaaagttgcagaataaggagccacctcccaacatgctagaccatgctcccttgtgtaatttcataagactacaacccttttagggcttgttcgtttgtgtctgtgtctaagggaattgaaggtgattaaatttccttctatacaaatagaggggctttaatccactccaatacttttcaatccacgcctaaccgaacaagcccttaatatgatatcttagattgccgtacctgtgtaatatcatgaataaaatttgctattatgg

SEQ ID NO: 13907 - DNA, 2413 bp, Zea mays
  Clone ID: LIB143-061-H5_FLI
caccgtctgtggagaagcgagaggaggaaggagacaaggaaaggaagggaggggaatcttcgtagagcactaggcagcgacggagtcagcgcagcttcgtctccttccttccttcccctttcgctggccgctggccgtcggcaccatcacctacggccacgggcgcagcgcggggccgctccgtaccgggtccgcgggcctctcgccagggggacccgataagcctccgctgctctgctcggctgctcttaccgtctctcccgtccacggtccacttagctagaaacacacaacaaacaaggagaaatcgcaaggaggagcagcgcctgccgccgcgccgtatccagcgaggcagcccccccgccccgatctgccggcccgacacgctgggatcttcctttccttagccgaccggtcaacgccgcagatattctccttccctgcggctctggaggtttccgtaaacccgtcaccccccctccttctattccttgcaggtgaatccaccgtcgcccctttcctcgttcctcctcctcctcctcctccccttcgtctccaccccccggatctcgccttcgctcgtcgcttcccgattcgcggccggaggggcggactccggctgtgtgggtggacgcaaggtagtcggcaaaaggtgcgattttgatcttgtattcttgtttccgaggccagctgcgttgcgtgatggctggtccgtcgaaccttcgctgctcatggttttccgtgatatacgattgagtagttcgattcaatagacactagaatcgatttgggtgccgccgacctgattcttccgtcccgaatgctgttgggttggatgggggactacggggatggtattttggtgcgcggtgctgccggggcccaaagctttgcgtccaaagtcccaaattgcaggaagaggaaactttgttgtcaatttcagatttcttttctctgtggacgtgtgtgtctgtccaacaacgccttctctggagttacctgattttgctgcctgccattgataggtatcgacgatcagacggagcagttgcttcaatctcgacttcgacctccatctgcgttgaacccatttgggattttggagagggggggtgcttgcttggattgcacagcatctgcatcagttcacattctttgggcatttgctatcttgtcaagcttgctgactatacagttctggttcaaggaacgcctttctgaggtctcttggattatgggagctttctgttcatgtctgcaacctgattattcggaccaccatggaaaccaagcttcttcggcgtttaggaactgcatgtgcctcagatgctttacccagcagctgatcaatgcgtatactgttttgttccgagctggagcagtgcattctgtttcccccgctattgaagccactcctgttgattcaactgaaagctccttcgatacatatcgttcgccgccaagacctctgccctatgatgatccacgattttcccctcctgctcgtgactggttaaggagtgagaacccaagccattccccagaggaatcggaaccacttagagcaaatgaggatgatgaagaaatggaaacaccaagtataatacagaaggcaagtaaaacaaactacaacacaaaaatgaaaatctgcagctctacttatggtgataaggtgccaccaagggaacatggaaattacttcagctatttttccccatctgctgaagatgaagatgtttgtccaacttgtcttgaagattatgattctgagaatcctaggatagtaatgcagtgctcacaccatttccaccttggctgtatttatgagtggatggaaagaagtgaggcatgccctgtctgtggaaagaagatggagtttgacgagacaacataatcctctggctggactctacaccatggcccatggattaacaacaaaccttctcatatgacattctgaaaatacagatggtctagcccagcaagttctctgtaaatacgccctgtaaatattggactggtagtgtgggtccctcttggccatacgagtgctctccaaatgctggaacggtgcacataaacattcttttccgatttgttacaaatagtcggcaggggaaggttgccccccctctgcctgtctgcgcctctgcctctgccttgtcgaggcttagaggtgcattggttgtccggtgatagattcatcggaagcctgtaaattaaagacctaggctcatataataatcatatggagtcccgtggttctgaaagttcttgcaatgataactatttggcttcagagactgaaattctgtcatagtagtggtgtttatcatgccaacatttgtttccgtggtgttgctaattgtgactcatggacacatatgaagagttatttattacacttattgtc

SEQ ID NO: 13908 - DNA, 1924 bp, Zea mays
  Clone ID: LIB143-062-A10_FLI
ctttcttgtcacctggagctggacctgacgatggcataccatctcatctcttcaccactgttccttctcgcacaattgctcgccgtcgccgtccctctccttctgctcctgcttcaccaacgctcatcaattcgccgccgtcgtcgcagcagcagcagcagatcggccaagcagggaggacagctcctgccgccttcgcccccggcgctgcccatcatcggccaccttcacctcgtcagcgacctcccgcacgtctccctccgtgacctcgccgccaagcatggtggggacgacggcctgatgctgctccgtctcggcgctgttcccaccctcgtcgtgtcatcgccgcgggccgcggaggcgatcacgcgcacgcacgaccacgtgttcgcgtcgcggcccacgtccactctcagcgacgagatcctgtacgggtcctccgacatcgccttctccccctacggcgagcactggcggcaggccagaaagctggtcaccgcgcacctcttcaccgtcaagagagtgcactcgtaccgccgcgcccgcaaggaggaggtgcgcctggtggtagccaaggtgcgggaggcggcggtggcgggcacggccacggacatgagccttgccatgaacacgttcgccaacgatatcatcagccgcgccgtgtccggcaagttcttccgggcggagggccggaacaagctcttccgggagctggtggaggccaactctgctctgttcggagggttcaacctggaagactacttcccggggctggcgagggcgttaggtttccttagcagaaggctgttgtttctgcgcaacaggcggcgggtccaggagacgcacaggagatgggacgagctgctcgaaaccatactgagcgaccacgagggaagaaggggttctgtctctgtggacggtggtggtgacttcaccgacgtgttgctctcggttcagacagagtacggaatgaccagagatcatctcaaggccatcttggtggacatgttcggtgcgggcactgacacgtcatccttggtcctagagctcgccatggccgagctgatgcgcaacccacagcagatggccaagctacaagctcaagttcggaggcacacaccggaggggcaggaaacggtggaggaagagaacctatccgacatgccctacctgagagccgtggtgaaggagacgctgaggctgcacccacctgccccgctcctcgtccctcacctgtccctggcggactgcgtcgtcgatggctaccacgtcccctccggcacccgggtcatcgtcaacgcctgggctcttggcagagacccgggctcgtgggagaagccagaggagttcctgccggagaggttcatggacggcggcagcgctgctggcgtcgacatcaaggggaaccacttccacttcttgccgtttggagctggacgaaggatttgccctggcctcaactttgggatggctacggtcgagatcatgctagcaaacctcgtgtactgcttcgactggcagctgcccatgggcatggaggagaaggacgttgacatgacggaggtgtttggactcacggtgcatccaaaggagaagctcatgcttgttcccaagcttcctgctactgctgcacctactgcaactgctcgtcaactccatcctccaagctgctgacgatcgaaggaaaactgcatgcagcgggtgtagaggacgagcacgtacgtacgtacaatgcacatgccaatggtgaagtgaactacactctacagagatatagatggtttggagtttggattccatgtatatatatatctattattatactaggaaaagatgtccgagtgttgctatcgtacgggtcatgtaaactatgttaatcttatgtgtgtgtttacttatatagtaataaaaaaagctattttgt

SEQ ID NO: 13909 - DNA, 610 bp, Zea mays
  Clone ID: LIB143-062-A9_FLI
gcagagtcgcagtcgcagcacacactgaattctctttagctagctaagagagggtagccacaccaagacaggatgcagacagcgaaggtgaaggcgaaggacatggtgagctcggcgaaggagaaggtgaaggaggggtcggcaaagatgcagggcaagacgggcgaggcgacggcggccacgcacggcgagaaggagatggccaaggaggcggcccgcgccaagaaggaccaggccaacgccgacaagcaccaggagaaggccgaccaccgagcggacgccgccactggccaccacggcacgcgcgtgcccctcaccggcccgcacggccaccacggcgctggcgcggccgtcgaccccgcgtacccgtcctccggcaacacgtacccggcgtcgggcaagtacatctaggtgactgcgtcggatgagcgaggccagggtcgtggtcgcacttgcgtttttgtgtacgtagcgaccgagaagatcgatcctggctgtacgcctgcagtaccggtaccgactggttagttgtagagggtatgcggtgcgcacgtgcacgtgcgcgcaagtcgtctggaataaaaatgctctagttgctgttaggttgctt

SEQ ID NO: 13910 - DNA, 1589 bp, Zea mays
  Clone ID: LIB143-062-D3_FLI
cgcatgccccaaaagcgaagccaaccagcacaaaaaggagcacaaagctctctccctcccccctctctctctctctctcctgttccccgcgagagtcgctcaaggccgcggcgaggagaagcggcagcgcgtcacctctccaatggcatccccgtccctcctccgtgcaacctgtgcgcttctcgagtgctgaggctccctgtccctaagacaagcttgcgcgcgcgatggagggtttttcgagggacttgctgtgcgggattggcaagggggacgcgccgccaccggagaagaggccggggcagctgcgggaggagatggaggaggtggagcttagcctcgggctgtcgcttggcggccgattcgggctcgacaggaaggggagcaagctcccccggtcgtcgtccgtggcggccatgctgacaacgccggtggaggtgccggcgccgcccgccctctcgcgggcgagctcgctgccggtccaggcggaggcgtcggaagttgagaggaagcaggggctggatggatggggttcttgccgtgagggcggcggtctcggcgtgcaacacgcggcgaggctgccggcgagcgggaacccttcctctgcctcttcggtaggcgaaggacagattttgcaaggcaccctcatgaggactagttcactccctgctgtcattgaggcttctggcaatgatgactggaagaaacgaaaggaagcacagagcctgaagaggctcgaggttaagaagaagaggattgagaggaggaactctctcacctgcaacacttcaaaagaagctgctgggcagagtccagaagagatgaatgcaaacactgacaaattagtaagttctgatgaaactattgccagcgctaacgaaagtcatagcagtggcaagcatctggtgaaggggcttccaccaaagtaccaggctacaattacatcacaagacagttcgtcagcaatgcgaaagaagccaaactcggccttcaaaggaacagccatcactgaggagcagaactcatcatcgtctgttccttcctccggtgaagctataagtagcgtgacggcaccaagtctgcctctgttgtctttggtccccataacagcaacccttggttccagggaagaccaaagcattttaggcagggctggtgcaagggcaaacggcatgggggacgtggaaaggaggatgatgcaggagatgccgggggtgttcaccaagggcctgtccaacggcagcagggtcgaaggcttcctgtacaaatacagcaaaggagaagtgaggatcgtatgcatctgccatggaagcttccttactccttcggagtttgtggagcacgccggcgccggcaaggtagataacccgctgcgacacattgtcgtcagcgctaccccgaacctgtgactgtgaggccaggcagacccgtgcacaagctatagtgttctgtagactcaggacctgagcctagcgtcagagcaatgtcaccgttagactgtgtggtgcggtgcggtgcttatgcccgattaaattggtgggcattgtggtaacataacctgttgataatgttttgacaatgttttgatc

SEQ ID NO: 13911 - DNA, 1469 bp, Zea mays
  Clone ID: LIB143-062-E4_FLI
cctcggtcgatttctaattctcctcgcgagcccaaaccctaaacctaaacctttcacccgccgccgccgccaccaccagcactgccactccgccaccaccgtcccgaagccccctcccagcgccatcgacttcatctcggattgaagcaatgtcgtcggacgatgaggtcagggaggagaaggagctcgacctctcctccaacgacgttgtcaccaagtacaaggctgccgccgaaatcctcaacaacgctctgaagattgttgtgtctcagtgcaagccaaaagtcaagattgttgacctttgcgagaagggcgactctttcataagagagcaaactgggaatgtttacaagaacgcaaagaggaagattgaaaggggtattgctttcccaacctgtgtatccgtcaatgacacagtttgccacttctcaccgcttgcaaccgatgatgccgttctggaagaaaatgacatggttaaaattgatatgggctgtcatattgatggctttattgctgtggtggcacatacacatgtaattacaaatgggcctgtcacaggaagggctggtgatgtgcttgctgctgccaacacagcagcagaagtcgcaatgcggcttgtgagacctgggaagaaaaataaggatgttactgaagcaattcagaaagttgctgctgcttatgattgcaaaattgtggaaggtgttcttagccatcaactgaaacaatttgtgattgatggtaacaaagttgtgctcagtgtctccaatgctgatacaaaggttgatgatgctgaatttgaagaaaatgaagtatatgcaatcgatattgtcaccagcactggggaggggaagcccaagttattggatgagaaacagaccaccatctacaaaagggccgtagacaagaattatcacttgaagatgaaagcgtcaaggtttattttcagtgagatcagccagaagttcccaatcatgccttttactgctagggcattagaagagaagcgtgcgcgtttaggcttggtggaatgcatgaaccatgaactattgcagccgtaccctgtacttcatgagaagccaggcgatcttgttgcacacataaagttcactgtgctgctgatgcccaatggatcagataagataacatcacatcctctacaggagttaaagcccaccaaatccattgaagacaatgcagagataaaggcatggcttgctttggggacgaaatcaaagaagaagggtggtgggaagaagaagaaaggcaagaaaggagatgcagcagaagcagatcccatggaggaggcgacaaacggtgctacaagccaagaataattctgatttttggaattactgccaccagcttttttcttgtttcttcgctgcatctgatggtgttatattacattcagttgtggaaaaattgagtactatttctagcttctaagaaatgaagcatcctattatcgc

SEQ ID NO: 13912 - DNA, 956 bp, Zea mays
  Clone ID: LIB143-062-F2_FLI
gtttgttaagtgatggtgttcttttatcgaactgggtagtacaagagggcagcagcgaagttctaggacttgtgcgtgagaggctcctatcattgtatacttgtgctggttgtggcttggaagctgagcaccaactttgggaaatgaagcttcttggccgagaacctgatacacagctctatgatgttgtattggcaatttgtgcttctcaaggggaagctgctgctgttcgacgcttgcttgcaggagtcgagtcaaccagcgccggaagaaggaagaagtctatgtcatggctactgcgaggctatgtcaaaggtggcttcattctagacgcctcagaaacactcatacagatgctggacatgggcttgcttcctgattacctggatagagctgctgtactgactgcactgcggaggaacatacaggaatccggcagcctagagtcctacttgaagctttgcaagcgactatctgagacagatctgattggaccatgtattgtgtatctatatgtccgcaaattcaaattgtggatggcacacatgctttagagttctgatgaaccctttcgtcatatatccactcatggcaggtacaaaatggagatctctaaaaaatgtgtgtggctcaaacgcttgtccctgatgaacaacaagacatagaagcttcaatttcggtgaaccggttggtacataataatggttccttgtatatttttgaccgaagtagaggtatcaactggttgtttgttgtaaacagggctgttgtagtactttgaacagagtccatatcgtacatgtaaattctctgtgttactgttttcatatgcagtcgctgttgaaatctgtgcgttactgcagcctgtaggggataggcaagatggaaacttttgttgatataatgtacagctctgtcgggactgaacttctaaagttgtaccgagattacacgat

SEQ ID NO: 13913 - DNA, 1242 bp, Zea mays
  Clone ID: LIB143-062-H10_FLI
ctactgcctgcctgcctgcctgcgtctctcctccaggctccaggaatccaccccccacctcctcggattctttccccctctccagctcccccgtcctgcagccgcctgcactgtgctgccgccccgttcgcctcccggcctccagcctcctcggttcccgcgggagggccatgaagttaaggacaaaacgacctgaatggaagtcccttgtgcctctacaactgagcagattgagcaggaaatctgccatgcgtttctttttgttccccaaggttcagtcggctggtcaatcgccagatgataccccagtttatcttaatgtgtatgatttgacgccaatgaacggttatatatattgggcaggcctgggcatatttcactcaggaattgaagttcatggtgttgaatatgcattcggagcacatgactttcccaccagtggggtctttgaggtagaacctcgccaatgccctggtttcagattcagaaaatcaatatttcttggtacaacatgcttggatccaatccaagttaggcagttcatggagctgcagtcagtaaactacaacggcgatacttaccatcttatcacgaagaactgtaaccacttctgcaaggatatgtgctacaagttgaccggtaacaaaattcccaaatgggtgaatcggctcgccagaataggcgccatttgcaactgccttctcccggagtcgcttaagatctctccggttggccatgacccaaacagtcaatccgaagactcggagaagaggcgtctgaggaacccattcagctgcttctcttcgatctcgagccaccggcagctgccgtcgtcatctcctttcccaccatctcctgtgaaagggggcctcccccgttgctcgtcgaggaaaagcagcacggcgtctccgaaaaataggtagcctgccctggggcgcgcccctgcgtaacttccgagtcgtcgtgctaattcctgcggtgtcaacatctggatccgcacggcgagtgctgtgctgtgctgtgctgcggctgtagctttctgtcaggtacttgttttttggtcggtaaaagtcagatgcctgatgttgtatcatgtaaaaaacccctagcgacgtgtgctgctgatctgcctcgcaagatctgttgggagggtgaaccgccactcggttctacccgccgcctatgtactctactcagggatttgtatattaatccattattctttcagctgttggaaaaagc

SEQ ID NO: 13914 - DNA, 517 bp, Zea mays
  Clone ID: LIB143-063-B3_FLI
cattacccgtctgccgtcggcataacataatcgtcgtcgcgtgcagtccccattcccttttccagtggtctgttgctcgcgcttcgtccagcttccccggaagaggtagcacggcaagggcagaggatgagtgaccccaagtacgcctacccctaccccgcgcaaggttactaccaggggccgtaccagggcccgccggtgatggcgccgccacagtacgccgcgccgccgcccagaagggagccgagcttcctggaaggctgcctggccgcgctgtgctgctgctgcttgatcgacgagtgctgctgcgacccgtccatcatcttcgtcagctagactagacgatgaagcgaggaagaacctattggtatatataatatgtatgtatccagttgtactcttagctttattcctgcaaccttcaagctcgagatgatctgtatctcggtcgagttggtgtgtatcaactatcatctgtcatggtattgcttctaatttgctgctgaatcgagaacat

SEQ ID NO: 13915 - DNA, 1788 bp, Zea mays
  Clone ID: LIB143-063-B6_FLI
ctcaagcaagcgagcaagcttaagccccacctcctagcaacatggagacggcctacgttgtcgttctgtcgttcttcttcatcgttgctatccaccgccttctcaaccgcggcgaaagcaagaatatgagcaagcagccgctgccaccgggccctcgcgccatcccggttctcggccacttacacctcctcgagaagccgtaccacctggcgtttatgcgcctcgccgcgcgctacgggcctgtgttctccctccagctgggctcgcgcgccgccgtggtcgtgtccaccgcggactgcgccagggagtgcctcgcagagcacgacgcgacgttcgcgaaccggccgacctaccccacgctgcacctgatgacctacggcggcgccacgatcggccacagcgcctacggcgcgcactggcgccacgtccgccgcgtcgtatcgttgcacctcctgtccccgcaacgcgtgctgtcctccatggtccccaccatcaccgcggaggtgcgcgccatggcgcggaggatgtaccgcgccgccgcgggcggtgccgcgaggatcgagctcaaggggaggctgctcgagctctccctcagcaccctgatggagaccatcgcgcagaccaagacgtaccgtcccgcggacgacgcggacacggacatgtcgccggagacccaggagttcaagcagctgttggacgctatcatctcgcttctcgggctgaccaacgtgttggaattcctgccggtgctacagacgttcgacgttttgggactgaagaagaagatcgcggcggcggcgggcagaagggacgcgttcttccagcggctcattgacgcggagcggcgcaggctggacgacggcgtggagggccagaagaagagcatgctggccgtcctgctcgctctgcagaagtcggaaccggagaattacacggacgagaagatcatggctctatgcttctccatgttcattgccggaacggactccacggcgacggcgatggaatgggccatgtcgctgctgctgaaccaccccgaggtcttgaagaaagcgcgggaggaaatcgacgcgcacgtgggcagctcccggctgctgggagcggacgacgtgccgagcctcggctacctccactgcgtcctcaacgagacgctccggctgtacccggtggggccgacgctgatcccgcacgagtccacggcggactgcacggtcggcggctaccgcgtgccgagcggcacgatgctgctcgtcaacgtgtacgccatccacagggacccggcgacgtggccggaccctgacgtcttccggcccgagcggttcgaggacggcggcggcagcgccgaagggaggctcctgataccgttcgggatggggcggcgcaagtgccccggagagaccatggcgctgcagatcatggggctggccctggggaccatgatccagtgcttcgactggggcgcggtcggaggcggaggcgctcccaaagttgacatgacccaaggcggcgggctcactctcccgcgggccgttccgctggaggccatgtgcaaaccgcgccaagtcatgcttgatgtcctccagaagctgtgacacaatctacgtacgtactctgagcgcactactgaagaaagttgatgagtatcatcatcaaaagttgttgccttgctatcgttattaattcgtagggctatatgtatttgtgctccttccgtcgcttctagaaacaccgtacctgaatatcacagctagtaataatcaaataagataccttttccagttatataag

SEQ ID NO: 13916 - DNA, 1810 bp, Zea mays
  Clone ID: LIB143-063-D2_FLI
gattgaacgaagcagcccaaccaaattcccctcgccgcctcgtcccttcgcgacatttctagtcccgtcgtcgcctcaatctcgaagcctctccggcgcagccgcctcatcatcgatccgaaggcctccaaccaaacatcctctagggtttccgcatcgtccgtcgcgatgggcttcacgaagcggtcgccccagcatcccgcctccccagccggcggcgaggtcggcgcccagacggcagggaaggtcacaccagtgccggcggcgccggagtcggcgcccgtggcggtggtgccgaggcctccagacgtggcgcccttcctgaccaaggtctacgacatggtctccgacccggccaccgacgcggtcatctcctggagcgccggcggcggcagtttcgtgatctgggactcgcacgctttcgagcgcgacctgctgccgcggcacttcaagcacaatcacttcaccagcttcatacgccagctcaacacctacggatttcataaagttgatccagatagatgggaatgggccaatgaaggctttgttaagggccaaaaacatcttttgaagaccatcaagagaaagaagaaatcctctcaggatgtacctagtgatctgcagtcggtgcctgtcaaaactgcacctggcactgagaatatcgagataggaaaatatggaggccttgaaaaggaggttgagacacttaagagggacaaggcccttctaatgcagcagcttgtagatctacggcagtaccagcaatcatctagcgctgaagtgcagaatttaattcaacgcctccgtgtgatggagcagaaccagcagcagatgatggcacttttggcaattgttgtccagaatccagacttcctgaaccagctcgtgcagcagcagcgcaggagtaactggtggaatgatgatggtaacaggaaaagaaggttccaagctctagaacatggtcctgtagatgaccaagagacttctggtggaggcgcacaaattattcaatatcgtcctcctgttcctgaaacttccaatcagccaataccagcaaatgaagctttctattcaacccctgcacaaccagcttcaagccctgcacttgagatgcccatggatgtagagatgacttcaaacaatgttgatacctttgattcaactggcaatgattttactgacacctctgctctatgtgaatgggatgacatggatatatttggtgacgaacttgagcacattcttcaacagccagagcaggactttcaagtggaccctcctttaacagttgaggattatggttatgatcatccacggttagagcaggactgtcagatggaagcacaacagaattgcaaaaatcctcaatatgttgcctgtgtcttgaagcaaagggaaagccatgcatctgatgtccattagtactgatcagtttgagctgatgtcataactgaagcatgagccgtggtcccccagaatgttgtccagtaacattagtggatagagatttgtgatgaacagaatcttgagactggcaggttagccaccattgggaacctgaagaccgtcgggattgctcagaattcagtatactaatactaaaaaaaaaatatacagtaacacatgttgactatacatgatttcgttttccttactcgctcgaccaaaggcagccgtacaatatttttacttttgtccaggtgggagcatctaggtctttaaatggtttcggtgattaatggtgatcctagattattatgatttgcagagactataacttaggttatgatagcagtgattgattatgcgt

SEQ ID NO: 13917 - DNA, 2675 bp, Zea mays
  Clone ID: LIB143-063-E4_FLI
cttagtcgcacaacgcgcctccctgctccagttttccattccttgcgcccccttcagatccgatctgatccacgccggcgagacaccggaggaccgccatgacgctcagcctccgtcgcaagcagctcgatgttatcgtgcggatgctgcacctgaaccagcagcagttgccgaacggcggcgagggacagggagaggacgatgcgtacaagatcctggttatggatccgccctgtatctccatcctctcgcctgtgctcaagctcggcgacctccgccaccaaggtgtcaccctcaccctcgccatcgatcgtccgcggcaggcggtgcccgatgcgccggccgtctacttcgtccggcccacccccgggaacgtggaccgagtagcggccgacgccgccgcggggctctacgggtctttccacgtcaacttctccacctccgtcccgcgacccctgctggagcgcctcgcaaccgcctgcgccgccgctccgcccgcgtgtgcgggccgcgtggcgcgcgttgctgaccagtacatcgacttcgtctgcatcgaggatgacctcttttcgctagcgcagccccgggcctacgtcgcactcaacgaccccgccgctgccgacgccgacatcactgccctcgtcgacgccgtcgcgctgggcctcttctgcgtagtcgccacgctcggtgttgtgcctgtcatcagttgtgcgcgcggcgggccagcggagatggtggccggcgccctcgacgcccggctccgcgatcacctactcgccaagcccaacctcttcacggaggctgcatctgccgctgtcacgtcattccagcgccctgtgctgtgcctcttcgacaggaatttcgagctgtctgtaggggtgcagcacgactggagctaccgcccattggtgcacgacgtgcttggcttgaagcagaacaagctgaagttgccggcagagaagtacgaattggatgactctgataaattctgggtggcaaacagctggtctccattccccaaagttgctgaggaaatcgaagcgcagcttgccaagtacaagcaggatgtggatgaggtgaaccagcatactggtggtggcaaggttggggttgagtttgatggtactgatctaattggcaacactaagcatctcatgaatgcggtgaactcactgccagaactgacagagcggaagaatatgattgataagcacaccaatattgcaacatctttgcttgggcatatcaaggagaggtctctggatggatactgcagctgtgaaaatgatatgcttgtgagtggcactgtcgaccggaatacactgctgagtctcatcagagggaagggtaccaaggaagataagcttcggctagctgtgacctacctgctgtcctttgcgacaccaccatcatctgagctggagcaggttgaggccgctctgcgggaatcggaagttgacatgtctgcatttcagtatgtgaagaggataaaggcattattgaatacccaatttgcagctgcctcaggcacagcaactaagagcaacatcgtcgattgggcagagaagctgtatgggcagtccattggcgctgtgaagaatctcttgtcagatagtaggcagctggccttgacaagaacagttgaagctcttatggaagggaaaccaaacccagaggtggatgactaccttttgtttgatccacgggctcctaggtcaggaactagtgggcagtttaaaggacccttcagagaagccgttgttttcatgatcggtggtggaaattacattgagtacaagagcttgatagagctaaaccaacgctcacagccttccaaacatgttatatatggtgcaacagaaattcttagtggggccgagtttattcaccaactggcagaattggggcagaaagcagggttgggtggtggcagcagcaacataccaccaggttcagcacaataggtaggatgctcttacaagaccttttaatgttaaggagtgattcgagcttcagggactacggtaaatacgctcataccccacattttattttaaggagcgttccaggctgcatagattagtgatatcaaatttcatgaaaagtttatgccccttcgattgattagttgtcaatacatagctttgttgtttcaatttgggttttgatattgcccatgtatgactatttttacttttctgtactctatttccttgcccccctccctttattttactaagaaatttttcttggaattctgtttgcacactcaaagaaatcagttcatgaatatttgtaacagaaacctagttctgatgtttggataatttgattttggttgaaatcttcatagttccaggctgttacatcttttacttgtagtgcatggccatatgtgggttcttgaaaccccatatatatgactaaccatctcaataatatgtatgcagggtggcgtaatatataaattcattttgtgtgttggggatataagtttattacttgttttatctacaatagttggatacttggattgggaaaatgcattgtagcaatggcaagctgaaggtttgtgccactggttctcaaaagttgatttattcatgcgaatggaatctaaacatcttttgtactgaagcgctgcgattaaataaaggctatcaatagttaatagc

SEQ ID NO: 13918 - DNA, 991 bp, Zea mays
  Clone ID: LIB143-063-E5_FLI
ctgcacctgcattctgcaagcctcgtctggagctcttcccgttgcattggcggcggagatggcggcgaatctggaggacgtgccgtcgctggatctgatgcacgagttgctccgccgcatgaagtgcagctccaagcccgacaagcgcctcatcgtcatcggcccacctggctctggaaagggaacccagtctcccattattaaggatgaatattgcttgtgccatttagccactggtgatatgctgagggctgctgtggcggccaagacacctctaggtatcaaggcaaaagaagctatggataagggagagcttgtttcagatgacatggttgtggggattattgatgaagctatgaagaaaccttcatgccagaaaggtttcattcttgatggctttcctagaactgtcactcaagcacagaagctcgatgaaatgttggcaaagcaaggtgctaatgttgacaaggtcctgaacttcgcaattgatgatgctatattggaagaacggattactggtcgttggatccattcggccagtggtaggacttaccattcaaaatttgcacctccaaagtctccgggagttgatgatgtaactggagagccattgattcaacgaagagatgacacagctgagatcttgaagtcaaggcttgaagccttccacagacaaactgaacctgtgattgagtattactccaagagaggcttagtggtgaacctgcccgcagagaaaccaccaaaggaagtgactgctgaggttttgaaagccctctcttgatgaagtgtccactcttcagtttcagcatgacatcgaccaaaaatcccattgccccagtttcttcaaaatttatacttaggccaacaacatggggtttttattttcggtatgctttttgtgtgaattcaccattttatcacagctttgacagagctcgggaactgtctggataatctatgttttgaatgagagaagtttttcagtaac

SEQ ID NO: 13919 - DNA, 1519 bp, Zea mays
  Clone ID: LIB143-063-E8_FLI
cgggctctcctcccccccaatccccaattccccattgtcttcgtccgtccagcaccagctttcctccgcaccccgatccggacagcctcgccggaaccctaaccctagcgcgccatggcgggatacgcccagcccgcatccagggccgtcgtgctccgcctggacgacctggcgctgcccccgcggcacctcaccgtccccccccacctccccgtctccgacctcctccgctccatcccgctcccctcgccctcctgctactacctcaccgccgacgggcgcccgctgccggcctcctccccggtggcggcgctcccgccgtcggcctccgtccagctccgcctccgcgcgctccggggcggcggcggcgacggcggcgccacgggcgccgagtcccgcgactgctacctctccatgtacctcgccaagaagcccgacaaggcggaccccaacgaggcgcgcctctcgcgcttcacctgctgcgcgctctccggggagcccctcgccgcgcccgccgtcgccgaccgcctcgggaacctctacaacaaggagccgctcgttgaggcgctgctccacaagcgcctgcccagggcgctgtcccacatccggggcctgcgcgacatggtccccatccacctgcaccccaggccgggcgccgacgccgccggggacgaggtccggttccagtgccccgtcaccggcctcgagttcaacggcaagtaccagttcctcgcgctccgtgggtgcggccacgtgctcagcgtcaaggcgctcaaggaggtcaagacgtccgcgtgcttggtctgccacgaggagttcggcgaggccgacaagatgcccatcaacgggactgaggaggaggtggccgagctcaggaagaggatggaggaggagagggggaaggcgaaggagaggaaggacaagaaggttctcagtgggaataagcatgctgctactgtcgtggcgccggtggtggcggcggccggagctgagaatgggaagaagggcgaggctgcttcagcaaagcgcttcaaggctgcggaccatgcgccagcccatgccaataaggaagtgtatgcgtccatattcacatcgtccaggaagtcggatttcaaggagacatactcgtgccgctcgcttccgctgggaagaaattgatctcatgccaagagcgattgcattgcatggaggtggtgatcctattgtgctgatttgcctcgctcgtgtcaccaacttcaatgttggttcctttatctggtggtgttatttatgtttgattggtgaccctgagcgtattttggctgttagagcagcgttaaattcaacgtagcaacgatgggtggaatctgcgatagtttggtcttgtgtagagtttgaattaaaagttgttacttggctgattgttccaaaaaataattgacaaacgccatggtcttcattgttgttgttgccacagtacagttaatccaagtccatggaattcaacggtgaggatgtatggacagttgcggttttgtgg

SEQ ID NO: 13920 - DNA, 996 bp, Zea mays
  Clone ID: LIB143-063-G1_FLI
cttgaaacctgaaaatgaggatgaggaacttgatgagaagaggatttacaggactacttatatgttcagtgccaccatgcctcctgctgtggagcgtcttgctaggaagtacctccgaaacccagttgttgtgacaattggtacagctggcaaggccactgatctgatcacccagaatgtgatcatggtgaaggagtctgagaagatgccacggctccagaagatactcacagatctcggagacaaaacagccattgtgttctgcaatactaagaagacagcggacatgcgtgctaaggatctggacaagtcaggcttccgcgtcacaacccttcatggtgggaagtcacaagaccagagagagatcagccttgatggatttagaaatcgtcggttcaatgttcttgtggctactgatgttgcagggcgtggtattgatattcctgatgttgcacacgtgattaactatgagatgcctagttcagttgacacatacacacatcgcattggaagaacaggtcgtgctggaaagaagggggtggcaacttcatttttaactttagagaacactgatattttctttgatctgaaacagatgcttatacagagcaacagtcctgtgccacctgaacttgcaaggcatgaggcatcaaaatttaagccaggctcgattcctgatcgacctccaaggcgaaatgatacagtctttgcaaatcattgaagcaatctacctcagaagggactgaagatcttttggactattatgagctcaacttctaccatagagggaggaatctagattagtatttatgaggtataaaacttcgatggttagaaatatgtacttatgaggttgtaaaactatgacgattatctttggttttatttctgtttggaaactggcctcattgtcataactttaatatgttttggtggtgatttagctgtggacatgtgtagcttatcataattttgttctattctgcaagatttgac

SEQ ID NO: 13921 - DNA, 760 bp, Zea mays
  Clone ID: LIB143-063-G12_FLI
agcggcgccggcctacaaccgttttcgtgctcacacacccaaaccttagtcgcgatcaggccccaaggactcgagatgaagtcgagggcacggtccaccgccggcgactccaggctctcggtgaggaagaccaaggctgagaaggacccaaacaagcccaagaggcctccgagcgcgttcttcgtcttcatggaggagttcaggaaggactacaaggagaagcaccccaatgtgaagcaagtctccctgattggcaaggctggtggtgacaagtggaagtccctgtctgatgccgagaaggctccctacgtgtctaaggcagagaagctcaaggctgagtacaccaagaagatcgacgcttacaacaacaagcagtctggagaccccacggcgtctggtgattccgacaagtccaagtccgaggtgaacgacgaggacgaggagggtgacgagtgatgtatgacggatgaaactctgtccaagtgtttgcagtcagggaaaaaatctcgtcgttgtcggcctaaccgggttttctcgaaggactttctagatgcagtagattagtgccgtcttctgagtagtttccttgcaagtgtcgtcccgtccctggagtgaggcagtttagtttgtagtttcttcgcttcatcggcactcgaccgttgttggattgggatgtttagcctgcagtctgtacttaccccaagcatctatggtgcctgttttaaatctcagatcacaatagacgtttgttttaaatctc

SEQ ID NO: 13922 - DNA, 821 bp, Zea mays
  Clone ID: LIB143-063-G2_FLI
ggttctgatttattgatgcagctggagaggggtcaattgctgatggtagctccatatttggttaaacgaaagaagcagcattttcatcatcttgaaaagtacaatgtcgacttgattcttggttgcaatggattcatctgggctggtgagcatgttgtggtgggtgaaaaaccaaaaacgacaggaggtcagcaggggttcagcactgaagctgagaatttcaccccattagagacaaggaagcatatttgccggcttgccaattctgtacgtgtgctctcagccctaggattcactctgaccgtcgaactgataatcgaaaccatggaagcaagtgcgtcatcaaatgtagagataaatgacatgctcggggctgagttttacgtccagacagcagagagggaggctaagcgccgggctgatctgttgagaaagaagaatgacgcaaggtgagtaggtagcgccctcgtcattgctgattggggctgcctgatttgcggagaacagagcctgacacgttgcgttgctccatccgcatgagatctgtagcagtgccataatacttatctgatggtatctaaggcaaaattagttaacatgttctatgtacacctttacgggtagcaattagcaaagatgtaaggggttctctctgctctgatgctgtacatgcatttgatcatggtgtctggtgccggcagtgttgtgcctggcaggtccgcaggtctttgatccgttcgttgctgaagtcgatgcacttctgagttgaaaaactggacgttcttcctattgaatattccagtaacatgaattatgttgcc

SEQ ID NO: 13923 - DNA, 1198 bp, Zea mays
  Clone ID: LIB143-064-D11_FLI
cacatcggaggtgtaggagttggtgaacacccatgatctgtagatgtcgcagttggaagggtccaggaagatttatgcacagggagatgattatcacgagtacttcaagcgctcatttgaggaagacatcgctgcgcaagtgcctcaaggagtggaatggggtacaactattgattgggggaaatcaggcagaggagggcatgttgacggaccaagtggcgaggcaaaattttctaatgattttgaagttcattatattggcagtagctgatgatcccttctgtgatggaccgagtaaaccaagcaattcgggatattcaactccactttgatgactgccataattactgaaatcaatgaaaagattggtgctgctggtgtagtcagccaggagtgcaagactgttgtttctcaatatggacagcagatcctagatcttttgctagctgagacacaaccagcgaagatctgttctcaggttggtctgtgcacttttgatggcactcatggtgtcagtgctggaattcggagcgtagtggatgatgaagctgggaaatcaaatggtggtctcaagagtgatccaatgtgcaatgcctgtgagatggctgtggtatggatgcagaaccaacttgcccagaacaagacgcaggagctcatcctgaactacattaatcagctttgcgagcgtcttccgagtccgatgggagaatcagccgtggactgtggcagtcttgcgtccatgcctgacattgcgttcaccattggaggcaagaagttcaagctgaaaccagagcagtacattctgaaggttggtgaaggacaggctgcccagtgcatcagcggattcacagctatggatatcccaccaccccgtggccctctctggatcttgggtgatgttttcatgggagtctaccataccgtcttcgattatggcaagctgagggttggcttcgcagagtcggcctagggatatggtctggcagctacccgtccagaggcaaacgcgtaatttgtgtgtttatgcggccggcgatgtgtgtatatatgctactacatgtttagtgatgcattccgagacctgagacaacgcccgtctgttttaacgtggcgcaagaataattctggttctgcatgtattctccgtacacaaaggcgtgtctgatgcaatggtgaccatcttgcggttgcgtgtttg

SEQ ID NO: 13924 - DNA, 675 bp, Zea mays
  Clone ID: LIB143-064-D4_FLI
accccccaagtccagatcatttattgcagacatcagaaaccacacctttgtcatagaaaggactatggtacgatgtttaagattccagtgacttcaactagatacagcatcgatgctctcaagcttccaacaataactccatggcatgcttggtacgacgatgacggtgaggtcggtggatggacccaagggtacaggggactcaattttgtgaccgtgaggggagcaggtcacgaagtccctcttcatcgacccaaacaggccctcacgctaatcaaatcgttcttgactgggagcccaatgcctgtgcaatccagcacacacagcaacatgtaatccgtgttgttgcaactgattcacgagatgaatgaacatcccgaagcacccaagtcagccagttgtccaacccggcttgttctgcaacttgctgtagttgtttatgtatcagagctaccggtgccggttaccgcagcagccgtgcttttgtcggccctgttggtgcttgttgcagtaccagttatcccctaaggcaggggacagaaactgcggaatagtttttgtttgcattgacgtgacagcactgtaatcttaaacatcgtaccatagtcctttctatgacaaaggtgtggtttctgatgtctgcaataaatgatctggacttggggggtaaaaatg

SEQ ID NO: 13925 - DNA, 1567 bp, Zea mays
  Clone ID: LIB143-064-E11_FLI
cgaggaccatcctcgctaccctgcaggccggcactgcactgcactgcagtctacagaactcgtcagtcacagatcggtgcaggcggtctgcacctgcatcacctaaccaattcctcgattagtctgctgttgcgatttgcgaggcaggtcagctgcaatctttttgcagcagccactaaacctgtaccaagtcttcttgcctgagggcagaggcaggctccgtcagtcacgccggcggcgtacagatcatggaggactttggcggctggaatatgcagtatgcagcagagctatgcctgccaagccgccgggacgacgacgacgacggcctcctcggtgatttcctaggcggcggcggtttggacatccgttctgaccatggcggcctcaacctgccctcgtcgcaccctgctgtccagaaccttgtgccctgccacggcggcgtgagtctttccgtttccgacgccttcatgggcctggacacggcggatatgctcgctagcgtcaccggcgcactggactgcagcctcctcgacacgtttgcttgcggttcggacgccgtcgtcgtcgccgaggagcccgccgcgcagcccaccgcgtcgagcaacgccttctccggatacagcagcaccacgggcggcaattacggcaacatctcctccggcgagtccaacacgtacggcggcagcggcggaggccatgacacggaggttgcgtcgccgacctgcgcctcgaagcggaagctggccggcaagtaccctgcaatagccgcgtcggcctcggccacagccacgacgacaacggcggaggggcaggttgcagccccgcggcgtggcacgaagcgcgactccgcgacgtcgtcttcgtcgaccagcaccacggtcgccgggcatggcggcggcaaccatgcggccggaggaggcgggtcgtcatcggtcggcgacgggaacgggtacgagccggactcggaggcaatagcgcaggtgaaggagatgatctaccgcgcggcggcgatgcggccggtgcaccagctcgtgtgcggggccgccggcggcgagccgccgtcttcgtcccagaacaagccgcggcgcaggaacgtgcggatctcgagcgacccgcagacggtggcggcgcggctgcggcgggagagggtgagcgagcgcctgcgcgtgctgcagcggctcgtgccgggcggtagccggatggacactgcgtccatgctcgacgaggcggccggctatctcaagttcctcaagtcgcaggtcaaggcactggagagggcaaaccctagtagtaatggtggctacaacgacagcagcttcctgccgcagaattacacggggtgcctctgtgtcgacggtggcaccagtgttgcctttggaagcgatggcgccattgggggctacgtaaaaccaggtaggaacatgcaccggtagcgatgcaataatgtaaccattgatgcgagtgagcgatatatgagagaagtactgcagtactgctactggattttgagtttaataaggctttactgtatttctgagtaataataatcaaaacgatttgattt

SEQ ID NO: 13926 - DNA, 1939 bp, Zea mays
  Clone ID: LIB143-064-E5_FLI
ggccactgcagatactggggtacggctgggctgggttgctgaggaggtacctggtcgaccctgccgagatgtggtggccttctaaccttgcccaggtctcactcttcagggcgctgcacgagaaagaagaggagggcggcaagtcccgtggcccgtcgcggatgcgcttcttcctcatcgtcttcttcgcgagcttcgcgtactacgcgctgccggggtacctgctgccgatcctgaccttcttctcgtgggcgtgctgggcgtggccgcacagcatcacggcgcagcaggtcgggtccgggtaccacggcctcggcgtcggcgcattcacgctcgactgggcgggcatctcggcgtaccacggcagcccgctggtggcgccgtgggcgtccatcgccaacacggccgtgggattcgtcatgttcatctacgtcatcgtgccgctctgctactggcagttcaacacgttcgacgcccgcaggttccccatcttctccaaccagctcttcacggcgtcgggccagaagtacgacaccaccaaggtgctcaccaaggacttcgacctcaacgtcgccgcctacgacagctacgggaagctctacctcagcccgctcttcgccatctccatcggctccggcttcctgcggttcacggccaccatcgtccacgtcctgctcttccatggcagcgacatgtggaagcagagcaagtcggccatgaacgcggtgaagctggacgtgcacgccaagctgatgcagaggtacaggcaggtgccgcagtggtggttcctcatgctgctgctgggcagcgtggtggtgtccctgctcatgtccttcgtctggaaggaggagatgcagctgccgtggtgggggatgctcttcgccttcgcgctcgccttcgtcgtcaccctccccatcggcgtcatccaggccaccactaaccagcaaccggggtacgacatcatcgcgcagttcatgatcggctacgcgctgcccggcaagcccatcgccaacctgctcttcaagatctacggccggatcagcaccgtgcacgcgctgtcgttcctcgcagacctcaagctcggccactacatgaagatccccccaaggtgcatgtacacggcccagctggtcgggacggtggtcgccggcgtggtgaacctggcggtggcgtggtggatgctagacaacatcgagaacatctgcgacgtggaggcgctgcacccggacagcccgtggacgtgccccaagtaccgcgtcacgttcgacgcgtcggtgatctggggcctgatcgggccggggcggctcttcggccggcacgggctgtaccgcaacctggtgtggctgttcctggtcggcgcggtgctccccgtgccggtgtggctgctgagcagggcgttcccggagaagaagtggatcgcgctcatcaacgtgcccgtcatctcgtacgggttcgccgggatgccgccggccacgccaaccaacatcgccacctggctggtgacgggcaccatcttcaactacttcgtcttcaggtaccgcaaggggtggtggcagaagtacaactacgtgctctcggccgcgctcgacgccggcaccgccttcatgggggtgctcatcttcttcgccctccagaacgcgcaccacgagctcaagtggtggggcacggaggtggatcattgcccgctcgcctcctgccccaccgcgccgggcatcgccgtcaagggctgcccggtgttctgaatcttccgagacctgagcgtagtaagcagtgtgtgtaacagtgtaaggaaatgtttgctacgggagccatggattcaaccaagcatcgattaaccgatgcagtgctttgtcactcgtgaatgtaacaccatagcgccagtggtggattcagatttcagagggagaaaaaaacacaggcccagtgtctttggaacgcc

SEQ ID NO: 13927 - DNA, 2988 bp, Zea mays
  Clone ID: LIB143-064-F2_FLI
ctatccccgcgtggccgcgtgtagtcctagtctctcgccagcaccatcatcatcaatcacggcggcgaccccgccccgcctcgatcgcccacgctgcccgactggaaccggacgctgctgctgctgctgctaggctgacagcgacgacgagggggccatggctcagatcttgctccacggcacgctccacgccaccatcttcgaggccgagtcgctctccaacccgcaccgcgccaccggcggcgcccccaagttcatccgcaagccggactactgttctagcatgctcaagagaacgctcctgcactgcactagttccctttgatcactctaccctaggctcgtctccaacttgtggaagggattgaggataccgtgggtatcggcaagggcaccaccaagatatacgccaccgttgatctggagaaggcccgcgtggggcgcacccggatggtctccaacgagcccgtgaaccctcgctggtacgagtccttccacatctactgcgcgcacatggccgccgacgtagtattcaccgtcaagatcgacaaccccatcggggcctcgctcatcgggagggcttacctgcctgtcgaggacatcctgggcggagacgagatcgacaagtggcttgagatatgcgatgagaagcgcgagcctattggggacagcaagatccacgtgaagcttcagtacttcgacgtcggcaaggaccgcaactgggcgaggggtgtccggagcaccaagtaccctggtgttccttacaccttcttctcgcagaggcaggggtgtaaggttactctgtaccaggacgcgcatgtcccggacaacttcgttcccaggatcccgctcgctgatggcaagaactacgagccacacaggtgctgggaggatatctttgatgccataagcaaggcccagcatctgatttacatcactggctggtccgtgtacaccgagatcaccttggttcgggacaccagcaggccgaaacctggaggcgatgttactcttggggagttgctcaagaggaaggccagcgaaggtgtccgtgtccttatgctagtgtgggatgataggacttcggtcggcttgcttaagaaggatggcttgatggctacccatgatgaggagactgcaaattacttccatggcacggacgtcaactgtgtcctgtgccctcgcaaccctgatgattctggcagctttgtccaggacctgcagatatcaactatgttcacgcaccatcagaagatagtagtggtagaccatgagttgccaaacgagggctcccagcagaggaggatcgtcagcttcgttggcggaattgacctttgtgatggaaggtatgatacccagtatcactccttgtttaggacacttgacactgtccatcatgatgacttccaccagccaaactttgagggtgggtcaatcaagaaaggtggtccgagagagccatggcatgatatccactcacggctggaagggccaattgcttgggatgttctttacaactttgagcagaggtggaggaagcagggtggtaaggacctccttgtacgtctcagggatctttctgacattattattcccccttctcctgtgatgttcccggaggacagagatacctggaatgttcagctctttagatccattgacggcggtgctgcttttggcttccccgagactcctgatgaagctgcaagagctgggcttgtgagtggaaaggatcaaatcatcgaccggagtatccaggatgcatacataaatgccatacggagggcgaagaacttcatctacattgagaatcagtacttccttggaagctcatatgactggaagccggaaggcatcaagccagaagatatcgattgtcttcacttgattccgaaggagctctcattgaagattgtcagcaagattgaggctggggagcggttcactgtttatgttgtggtgccaatgtggcctgagggtgttccagaaagtgcttccgttcaggcaatccttgactggcaaaggagaacaatggatatgatgtacactgacatcacacaagctctcgaagccaatggaatccaaacaaaccccaaggactatctcactttcttctgcttaggtaaccgtgaggtgaagcaggagggagaatatcaacctgaggaacacccagaacctggcactgattacatccgggctcaagaggctaggaggtttatgatctatgttcatgccaaaatgatgatagtggacgatgaatacatcatcattgggtccgccaacatcaaccagaggtccatggacggtgccagggactctgagatcgccatgggcgcgtaccagccgtaccacctggcgactaggcagcctgcccgtggccagatccatggcttccggatgtctctttggtacgaacacctggggatgctggacgacgtcttccagcgccccgagagcgtagagtgcgtgcagaaggtgaacaagatcgccgagaagtactgggacctgtactcgagtgatgacctggagcaggacctcccgggccacctcctcagctacccgatcggtgtcactgccgacggcaccgttactgagctgcccgggatggagaacttccctgacacccgtgcccgcgtcctcggcaacaagtcggactacctcccgcccatcctcaccacataggctgcaggctgcaggcagcgccatggcttctctcctgtctggcctcagcttggtgcccctctgtttgtgtttgagatactgaaagttcagatagcagtgtttttattatagttattgagtgataataagtgcattgtgcatggtgggacgataggagttagagttgttcataactacaccagatgacgagattgtgttgccccttgtctggtgtagcttgtgtagctttctgcgttgcagtgctgtttgtaaaggcgacttcagagttcagaattaaaacatggttgctttttcaagtgtgctgct

SEQ ID NO: 13928 - DNA, 439 bp, Zea mays
  Clone ID: LIB143-064-H12_FLI
ggcgcagcgtcttccacccggggagcaacctggccaccaagggcatgggcccaacctcttcgaccggccgcagcccaactcccccaccgtctacgactggctctacagcgacgagaccaggagcaaccaccgctagatcgggcgagatggatggacagtgaagaggccatgtttgctggtccttgtggttatctaaaacgcacgcatgctctattatagctagtcatcactatatatatacttgtgtttgtgtattgttgttcttgttctgctggtgtctccgccgtttaatttgacctatgttatggagtgagtgatatatgtgccgtcactcctagtatatagtagtgagtgactagttggtatgtgtagtactgtactatcttttctccatatgcatgttttgccagcgcgtaatgaatgtaatgtcagtactgct

SEQ ID NO: 13929 - DNA, 912 bp, Zea mays; identical to SEQ ID NO: 13512
  Clone ID: LIB143-064-H9_FLI

SEQ ID NO: 13930 - DNA, 385 bp, Zea mays
  Clone ID: LIB143-065-E4_FLI
gcgtggagcgcagcagcggccagttcgtgcggcgcttccgcctccccgagaacgccaagaccgaggaggtgagggccgcgctggagaacggcgtgctcacggtcaccgtgcccaaggccgaggtcaagaagcctgaggttaagagcatccagatctccggctgaagaagacatggacgcgaggtgaatggtcgcgtcgcgttcgcgtcgcggcgtcgggtcttgggtttcagcgacgcgactcgtgtgtgtggtactgtggttgctctgctttggtatgtctggtgtgtacgtgtgctgttcagtgtttcgtggtcatcgtctgtacattgtgctgttcggtgagctccccgactcagtgtgttgtgttctgcgagtgaataaat

SEQ ID NO: 13931 - DNA, 1519 bp, Zea mays
  Clone ID: LIB143-065-F4_FLI
tgtgccccagttcgctgcccgttccccagccgccgatccctcgatctccgctagcttcgttccttcgtacaggaacggtcgagcagaaactagcagccactcccgagtcccgactcccgatcgcgattacttgccgcggcaccagtactccagcggccaccatgagcagcgggaagcgatccttcttcgcgcccaagaagaaggccaccaacccgttcgattccgactccgacgacgacaaaccgcagcagcggccagcgcgggcgtcctccgtgcctcccccggacgagcagcggggctcctcctctctcttcggcgccggcgacagaggcgggctcttctcttccgcggccaaccatcactaccggaacgacttccgcgacgctggcggccttgagggccagtccgtgcaggagctggagggctacgcggcgtacaaggccgaggagaccacgcgccggacgcgggggtgcgtcaggatcgccgaggagatgagggacaccgcatccaagacgctcgtcaccgtccaccagcaggggcagcagatccaccgcacgcacatgatggccgtcgacatcgaccaggatctctccaggagtgagaagctattgggcgatcttgggggtctattttccaaaaagtggaagccaaagaagaatggcgccatcaggggtcctatgctaactagagatgattccttcataaggaaggggagtcatttggagcaaaggcagaaactagggctggcagatcatccacctccatcaaatgcgcgccaattccgttctgaaccctcatcagcacttgagaaagttgagatagagaaggcaaagcaggatgatgatctgtctgatctaagcaacatactgacggagctgaaagggatggccgttgacatgggctctgagatcgagaggtactgttacatttcgctatcttgtagactgatctgtgtggtcagtaattcatttattttcttcctgttgtatagtcaattctcaagaaagtatccgaaacttccaaaaagaaaatactatctgtcagtttgaatgctgatagcaatctcgttagttattaaattattaatttggagtattgttgctgtgagtatgacatgtcctctgtgtttgttggattcaggcaaacaaaagcaatgggggatgcagagaaggattatgacgagctgaacttcagggtcaagggagcaaacactcgagctcgccgtctcctcgggagataaaaaaatgcatatattcttgtctcttggatggtccataacacattaactatatgggggcatcaaattctgatgattttgtgcatcagattttgattagcattgttaccgtggacatgtcggcgtgtatggtagttgagacatattttatatgtttgcttcttttttctatttttttagcattgcacgagcttaggatttcagtggattttacatggaaaaccttgtctgattagaaacttcttttcgggtaaataatgctgatacatagtgatttgtcgc

SEQ ID NO: 13932 - DNA, 698 bp, Zea mays
  Clone ID: LIB143-065-F9_FLI
gcctcggctcgtttgatccccgcggggagctctagttccgccaagcgtgcgtaccggcgtccggatccgggaccgaagatgacggagtccctggtgcggaacaagccggggatggccagcatcaaggagatgccggtggtgcaggacgggccgccgccgggcggtttcgcgcccgtgcgcttcgcccgccggatccccacctcggggcccagcgccaccgccatcttcctcaccaccttcggtgctttcgcatatggcatgtaccaggtcggtcaggggaacaaggtccgccgctcaccagtcttagctacatgggggtggaatcatgcatgcagggcgctcaaagaagagaaaattgctgctcgcagtgctatactgccgatgctccaagcagaagaggatgaaagatttgtcaaagagtggaagaagtatcttgaggaggaggcgaggatcatgaaagatgttccagggtggaaggtcggcgagagcgtgtacaactccgggaaatggatgcccccggctactggtgagctccgccctgaggtttggtaagggcctgttgcaggcactgaatgccatcatgtcacgggggcacggataaggcttcatttttcattaaggatcagctgtttaaagacctgtatttgttgtacttgaaatctggctggttaataattggacatgtaaagacgacgttt

SEQ ID NO: 13933 - DNA, 3093 bp, Zea mays
  Clone ID: LIB143-065-H4_FLI
tcacaacgaacagaagctctcgatctcaccgacaccgaggaagaagagatcaatggcgtccgagcagggagtcgtgatcgcgtgccacagcaaggctgagttcgacgcccacatgaccaaggcccaggaagccggcaagctggtacgcgtccccgtgcctcgtcttcctcgatccccattcccgtgattttgtttggaaagctgtttaggggattccgcggttcaaatcgattcgtctttggtttccttattatgcggtcgcccccctgttcaaatttgctctgaatcgcatctgggatgcttgtgttcgggggtgattagggtgcggcgcgtgtagtgggcaggattttagggattttagcgggtccgtacagtccgtctccgtccagggattatgttgattgatgtagcctgagacgatttgatgtccacggttgtgcacacagatttattatgggtggagtattgatatgtgcatgcaacgaatttattgcacatgcttttcgtggttacttagtaattataggtgtgatttaaattagtttgccctactgctgatctctatgctgaaccggaaacccgtatgagctttgcggcaacatttgtgtgagtaatttgagctggcagttgctctatttggagatctgtatttccactaaatctacgaagtagtagatgcatagataaacttaagctgtcatagaaagtcatttaaaacatgggaagagtttgacgtttagacctctgttaagtgctcatgatgtcatattgaaatttcgtacactctaaggggagtaatttggaattggggaaagaattcaacagctgcagttgagatttgctaggaagtcaagttgaaattgggaaggattcaagggctacagaccacctccgtaccttctcctgtaccttctcctgtgtactgtagagtaactgattttaggtctttttgtttgaggactaatctttagttgtcgtttaggggtagctttggaactttattttttcaaaggatttctatttttttaaaggaaaatgaactaattttcttttgaataattttcttttgaaaaatgagaacctttggaaaaatgggttcacaaactaacctttaacctttttttttgctaaatagaagaactaaagtagatattagtggggtgtttagtttgaagaatgagctagtccatcatcttcacactccacacattttttttggtttgtataatggaataagttgatccatcactatcttaatcctcatatttagttagtactaatataagaaatgatgtcatctcaccaaatttgaagaatgaactcatgatgaactaccttattttggagggaatgatccctcaaaccaaacactctctaattgattttagtgttaagtcgtttaaaggatagctaaaagagattgaagcagatttattcatatctctacccttcatttagtactctctcttcttgatatcctaagcataaagggtatttcagtctttctacagtgttctgaacatgtttattagtccttagaaccaaatagatagggactaaaatttaatctagaactaattttcagtctagaactaataggaagcaaacagagcctaggactgcactccgtatgctctgattcaaccacgagttcttgtccttgtcgttgtcttccgagggcgcacagttgatcggcgttgcattcggacggtcggacctaggactgcactccagtataataccgtcgttttctttccggcagagtagcaactctaccgcctctaacatggagctctgtcaaacttgcgcaacctttcaggtggtcatcgacttcactgccgcctggtgcggtccatgccgcgccatcgccccactgttcgtcgaacacgccaagaagttcactcaggtcgtcttcctgaaggtggacgtggacgaagtgaaggaagtcaccgcggcctacgaggtcgaggcgatgccgaccttccacttcgtcaagaacggcaagacggtcgcgaccatcgtgggtgccaggaaggacgagctcctggcccagatcgagaagcatgccgcgcctgcgcctgcgtctgcgtctgcctaaaggagatcagtcgtcgccgtcaataagggccagcacgtatggctgtaaatgttgtcgttatcagttctggctttgtcgtttgtgggcgattgtgaactagtagtatgtttgtttctatccgagccggaggcgatacttaaccatggatacttgttgtgagttcgtttctgttcgcgtgtgactcttgaattgaatcaaccagctcaccactgcaccaggccgtggtgagtggtgacagtgatttcctgttatcatgaatgatcctatggatggatatagaataatagataaatcacgttgcgctgcaatgggcaagcatatctatcatctacagtgcaaaacaatggcccaattaaagatgaaaacggtttcagaatttttcggtattccgtttatcgattttgaaatttttcgatcggattcaccggtaacagtattcttcaaaaccggaatcggttttcagaattttctatcggaatcagtgtgatgttttaccgaccgtttccttcggttatcggtttttgtcggaaattaccggatttgtgtctcggaattttccagcatttgatttttcgtatcgtctatacgtctctgaataaggattacttatttttgtattttttggacgccattttttgggataaatagtgttggaaggcagttgagattaacaatttggtctctcgatcaaattcacccttttctatgcacatgttatatattagtaacatataatgatagagagccgacagtctgtctttttcacacactaaattttagggttttctgtgaggctgtgaaaaaactctttatgtgaggaaaaaatatttcatgagtaaacatgccatgtcagctaaatcgagtggatattgtgaattgtgaactttgtgtctggaaacttgttatactgtaaaacttgttattttgtgaacgtgtgatctttgtaaactttttatattataaatttgtgatccttgtgaacttattatatcatg

SEQ ID NO: 13934 - DNA, 695 bp, Zea mays
  Clone ID: LIB143-066-A1_FLI
gcgccaaaaaagacaacatatataataacagagtgtatagagataaatgtcacaataacatcagagtatttattacatagcggaagtcttaatacaaaataaaagataaatataacaggatctaaaatccatccttggcgccaatgtcaactgggagacgacgacctagacactctcacgaacacagcgcaacatccaccatgcgcctcatccagtggtacctgttcttgacctgacacttgagattccagttaccagggtgattcttcagatcctcgaaacctcactgggacttgagattcaggtaccaggatgatcttcaggtgactcgtaacctcgcgcgtcgattaaggttgcggcagtgctggccacatgtaggttgacccagcggcgaggaaaacgctctagcgagaaaccccggcagcgccagcctccagtcttcctggcgaggccataaccacgatccaggtgtttcttcttccttgtgcacaccggcagcaactaatttgattcttcccagcgccatggtcggccacatgcgccgcatgcacggcaacaggtgctacgcgcggccagcgactatacaccacggcgaccacgacggctagcgaccatactccacggcctctccgtcacgctgctcacggcgtccgggctcgaccagcactcaggctccctgtatgacagttcctata

SEQ ID NO: 13935 - DNA, 487 bp, Zea mays
  Clone ID: LIB143-066-A4_FLI
gcgatcccccaatcgccgtaaccctagactcgccaccgccggcgcgatgctccgctcgccgggcaattcgccccgccgcctctcaccgtcgcccacacccgcgcactccacccctcgcccggcctccccgcccccctccaccgccccctcctcgaagcgccgccggtcggaagtgctcgacgaggacacctacgtcgccgccatcgagcgcatcatcgagcgcgactacttccccgacctgccccgcctccgggaccgcctcgactggctgcaggccgtgcggtcccacgacccgctcatcctacgcgacgcgcagctcaagatcctagaccgccgccgccgcgcccagcgccacgcggcggggcccgtccccacgccgacgccggccacctccaccgcgctccgctccccgtcctttctcaccacccccgccggatccgtcgccggcggcgtgggaggtcccgacgccgaccacgacgacgacgtc

SEQ ID NO: 13936 - DNA, 1042 bp, Zea mays
  Clone ID: LIB143-066-C5_FLI
ctcccttctctcctcttcgatcccgacgaacgccgagggccgcggcgatggaatactcaggcggcggtgcgacgctgtcggagatgtaccagagcgcgcggcggctgctactctcggcgcgggatggcgtgggccgcgtcgagcgccttgcctcggcacccacttcgtcctcctactcctcggcgccgctcgtcggtggtgcgtcgggggaccccgcggttgctgaggaggtgcggcgagaggtggcgcagatccaggggctgtgcgcgcagatggaccgactctggcgatccatccccgccaaaggccaacgggacctctggaagagaaaagtggagcagctctctgaagaggtagattcattgaaggaaacccttgacaggcattctctgcgacagaaaaaacggattctggaagcaaaagaaagggctgagctatttgaaagagctaacggtgaatcttcacacgtcctccgaatattcgacgacgaagcccaagcaaagcaatcagcccgtaactcctcacgaatgctcgaagaagcttatgagacaggagtgggtatccttcacaagtacgctgaccagagggatcggctgaagagtgctcaaaggaaagctttggatgtcctgaacactgtcggtctgtcaaactccgttctgaagcttatcgagaggcggcaccgcgtggacaggtggatcgcgtatgctggtatggtcatcaccgtggtggtgatgattgcgttttggcggttaacgcattagtgctgggctgtgtttgttacatatttctatccaagatatcaatgtgcaaacgagggagacggggcagattcagatggtacagtttttttccgctggtcgtggagcagttcaagtttgcctcgccggtccgtcgcccgcatagttgatgccggacccccaaagtgggttaaatgttcaaattccattgtatgcaatgctgctgtgtagtctattgttacgacttccgtgtaagtacacaagcttttgcgtgacacagaagagaaaatgcgctgtattatttc

SEQ ID NO: 13937 - DNA, 853 bp, Zea mays
  Clone ID: LIB143-066-C8_FLI
ctcctatctggtataggacggagctgagcttctagcaacgtacagtgtatccgccatgagtcctttcggggcggtgatcacgccagaaaccctcaagtacatgtccaagtaccagggacgtgagatcacgcaggtggactgcgcacgggaggcgatgaggctgatccacgcggaagacaagaacctcaaggccgaggactcagcgtgggagctgaagaagaagttcggcaacggcgtgagcaccatggtcctcgtctacaacgccaccggggccagcctgagcctggtggacgacgggaaagactggatgggctccgtctacagctcgccgatcccggacaccttccacaacgggcagtggatcgccttcctccacgtcaagcccggctcgctggcgcagggcagccaggccgccagggtgttccgcggcagggacgtcgatggccggactcgggacttcgtcgtcgcctggtacatcccgtgggacaacataccgacacgagcttacactgaaattggcagtgaaaactacttcaagactcggtggagtagtgtcaaaacgagtctaggacattcaaggagagtgacccgtgccaaggacgagaactgtgcgtcaactgtcagcatcggtggctacactacagccttctgcatcgcagtcctacaacaccagttccagccgctgccggaagagcgcgaataatcaatcaatcgatcgatcgagtttgcgatcgtgttacctcctaaataaaagttgtacacgcgaagtactactccagtatttacatgtatgtttctagcaggtgtacgtacgctactcctgaataaattgtggtgcacgcaataaataaat

SEQ ID NO: 13938 - DNA, 535 bp, Zea mays
  Clone ID: LIB143-066-D10_FLI
caacaaggcaccacacctcttcttcttcttcctcctcctcctagcacagctagcgcctgctccccttcgcctgtgatcatgtcttgcagcagcggcaagtgcgactgtggctccagctgctcctgcggcagctcatgcaactgcatgtcccctaacgtggagaccgccgccgccagcagcatcaagaccacggtcctcgccgcgccgaccaccaaggccagcgccggcggcttcgaggcggccaccgagggcggcggctgcgactgcaacacctgcaactgcggcaccagctgcggctgctcctgctgcagctgcaactgagccggtcaggcgatggcgcacgagagtcgagaggacgacgacgagtcgtataaatataatagcggcgtctaaataagatcctgtcaactgcacccgccattatcgatccatggtcgctcctggggttcatgttcatctgtaacgtgctcgcggtcatgtccgtctcgtgccggatttaatatttatatgcatgtatttgtgttttttctgcgtt

SEQ ID NO: 13939 - DNA, 1915 bp, Zea mays
  Clone ID: LIB143-067-F7_FLI
tttcatatctattttccctaataaactagcagttcatagtttttatctaatcaaagtaggattttggtaacagtttctctttcataatgaattaaccttagtttgtctagtgttagccaattgtagtggtcaagttgcagtatgtctcaaaatacttataagtaggtaaacctttttgctgaatgagctggttacctaacgggtatttcgaggccaactgatcccactcatctctttgatctataaaagtattagaaatgtattttaatgattgaatcaagttatttgctgcttgtttgtctttagcaaatcattattttgtatttttattttttgcatattgccaatatcctaggataatttttcccaagtggagattaggtctactatgtgagtgttcagttagatattcctttgaatgtttctacaaccagttctaaagttgagataatgtgaggtaccatacaaaacaacatattgttagagaggcataatgtcaacaaacatttattccaggggtcatcttggtggtcatataagaaacactaggcgaaaatgacataaattagtattacactgtcatgtttttgtatataaagtaggccatacagcttcactagaagtctagtctagagacaacagtgggctatcagtgaatgctatgttgttttaaagaccaacccataatgctgtgattgttatagtaccagcccaaatggcatacttcttcaggatgacagatgatatttatatatgctagaatataagctctgtttgcggtattttcctccagttgctcctgctgtgtttgctgcacttaacaggtatccaagatggatgagtcaatcgatgagatccaacaggatttccaggaatctatgaaggagctggctgctcttcgtggaacactgaaaacggtgattgaagacagggacctgtcgtggcaggaggtgaagtagctgagacgaaacatcagcatcatgctagaacgaggttgtgtcgctgaagaagaagatcgaagccttggacaaagacatacttgtcaaggagggagagatcacgatattgcaggacagcatcgacaagccgttcaacatcatctgcagcccaagtttgatgcaggagttcggcatggcgtgaagacggctgctgttttgtaagtgagtcggtggatgaaaattcaagttattgtagaagacaacacatttctttgcttattacatcctgctatgatgttctgaactatgatgggttcagcgggtgccattttttctcttagagctattgttgacatggaagaaatggtggcagcaccagcttaggatggacaacaattgaaatatactacagaagttgtttctaatgtgctactgagctccattgtgtttcggcctacgcaatctaggtctccagtctgcctccaagaaaagctccataaccccatagtttctgcagaggttcaacaacttcaggatcaattataggctgagaagcaaaaaaaatggacttcgtgaagaagcagaaaccattgatagtatgaagaggttgatggaagaaaatagcaaccttcttcgtcaactattaagcttcaattgaagacaagtgcctccatcttaagtctggttgactactataggacctgcaaccttgtggtagctatagtagatatttatagaagctctagatttgaagttataggattattttttaattatgtttaatgtttaatactttgagttgaagttataagatttgctttgaattttaagttaaaggatttgcagatatatggtttggagttatatgattatttggtggatgaaatatttgtgttcaacaaattcatatgatattttggctatgatgtgtaatattctatgacaatatcaattcatatgatgtgttccttttgatg

SEQ ID NO: 13940 - DNA, 742 bp, Zea mays
  Clone ID: LIB143-067-G11_FLI
catcaaggaggagttccccaccctctcctatgccgatttctaccagcttgccggagttgtggccgtcgaggtcaccggtgggcctgagatccccttccaccccggcagggaggacaagcctcagccgccacctgagggccgtcttcctgatgccaccaagggttctgaccacctgaggcaagtctttggcaagcagatgggtttgagtgatcaggacattgttgccctctctggtggccacaccttgggaaggtgccacaaagagcggtctggttttgagggggcctggactacgaaccctttggtctttgacaactcttacttcaaggaacttctgagtggcgacaaggagggtcttcttcagctcccaagtgacaaagccctgctgagcgaccctgtcttccgccctcttgtggagaaatatgctgcagatgagaaggcattctttgatgactacaaagaggcccacctcaagctctccgaactggggtatgctgatgcttaaatgtccatatcctggagcgggacacaaactgctgcctgtatggactcgtgcgattcagggtgaaccatcagattgtctagtgtcttctttgtaataaatttatctgttcttggtactttgtctatggttgaatcggaacccattttccgtttgcctagattcttaatttctggtgctgtatccagctgaaactagtagatctatgatcttgtggctgcagcatgttcttgtcacttt

SEQ ID NO: 13941 - DNA, 1309 bp, Zea mays
  Clone ID: LIB143-068-A4_FLI
gtgactgtggaaaccgaacctgcccaaaaactcagcagaagctccagaacctttcgttgaccccaaactacgtgcttagaagcttaatactgcagtggtgcgaggaaaaggggatggaaccacctagcaggtctaaaagcgacggttctcctcttgaggttgctggcaacagattagcaattgaagcgttagtccgcaacctctcgagcagttcattagatgatcggaaatctgctgcggctgaaataagatccttggccaagaaaagcacagacaaccgtatacttctagcggaatctagcgctataccggctctggtgaaactcctgtcgtccaaggacccgaaaacccaagagcacgcagtgacagctctcctgaacctctccatatacgatcagaacaaggagctggtagtggttgccggtgccatcgtcccaatcacacaggtgctgaggacgggtagcatggaagcaagagagaacgcagccgcggctatcttcagcctgtcactgatggacgacaacaagatcatgatagggagcaccccaggggcaatcgaggcgctggtggagctgctgcagagcggtagctcgaggggcaagaaggacgcggcgacagcgctgttcaacctgtgcatataccaggcgaacaaggtgagggccgtccgagcggggattctggtgccgctgatccggatgctgcaggactcgtccaggagcggagccgtcgacgaggcgctgacgatcctgtcggtcctcgcgagccaccacgagtgcaagaccgccatatccaaggcccacgccatacctttcctgatcgacttgctgcggtcaggccaggcccgcaacagggagaacgctgccgccatcatactcgcgctgtgcaagagagacgccgagaacctcgcctgcgtagggaggctgggcgcccagatcccgctcgccgagctggcgaagaccggcacggaccgagccaagcgcaaggcaacctcgctcctggagcacctcagcaagctgcaggtgctctagtagtcccacccaccactgtccatccacagccacaccactctgtgcgcgcgcgtgcgttttcgacttttccacgccacggtgtatgcgtacaaatgcgagtagtgtagcatcatcatcatcatctgtcgtcgagtgtgatttcggtggggttggtgataagttcgtttcagtcagaggagcaagaccaaacgcttgttcgttctgtcagctcatgtctgcgtgtagtttgattcgagctttttcaaaagctcgcggtgtgggaattacctcggtcgccatcg

SEQ ID NO: 13942 - DNA, 1624 bp, Zea mays
  Clone ID: LIB143-068-B3_FLI
aagagcaacccaagtcgccgagagtgactcccacacgacccacctaccccgccgccgccgccgccgcatccccctcgattccgtctggcgatcgggggctcccagacacatcacagatacaccacgccaagccaaatcgagcaacgcctatcaccatattataatttcccctcattcatctcacagtcccaggcctcccctccctcctcccccgtcgccaactaacctccaacccccagccgatcgcgtcggagatgctgggcgtcgcgcggaggcggctcggatccggatgcgtgctcgcccagctggcgcaggccctccgccccgccgccgctcccgccaggacctactccgccgcggccaaggagataactgtacgggaagcattgaatactgcattagatgaagaaatgtcagcagacccttctgttttcttgatgggagaagaggttggcgagtaccaaggtgcatacaagatatccaagggtttgcttgacaagtatggcccggatagggttctcgatactccgatcactgaggcgggcttcactggcattggtgttggtgccgcttaccatggtcttcgacctattgtagagttcatgacatttaacttttcgatgcaggcaattgatcacataattaattcagctgccaagtcgaactacatgtctgctgggcagatatctgttcctattgtctttaggggtccaaatggtgctgctgctggagttggtgcccaacactcacagtgctatgcagcttggtatgcacatgttcccggattgaaagttctagctccatattctgcagaagatgctcgaggtttgctgaaagcagcaatcagggatccagatcctgttgtgttccttgaaaatgaacttctttatggtgaatcatttcctgtatctgctgaggtacttgattctagcttctgccttccgattggaaaggctaagatagagcgacaagggaaagatgtcactatcactgcattctccaaaatggtgggatatgcccttcaggccgctgatatactggccaaggaaggtatcagtgccgaggtaatcaatcttcgctcaattagaccgctggatagagctactattaatgcatctgtgaggaaaaccaatagattggtaaccgtagaagaaggcttccctcaacatgggattggtgcggaaatatgcatgtctgttgtagaggacagctttgagtatcttgatgcaccagtcgagaggattgctggagctgatgtgcccatgccgtacgctgccaaccttgagaggatggctgttccacaggtcgatgacatcgtccgggcagccaagcgtgcttgctacagggcagcagtaccgatggcagcaaccgcctagtccagcagaaccctgcatgttgcatttctttgtctaattttaatgtccgtgctccagaaagacgtgtcgcataatggtgtgacgagtacccactgccgctgcaactcaactatagcatgagctgagtttttgtagagccaccgagaggtgttcagtactccagttccagttccgcttatcttcgccgccgcagccggaaggctgcgcgtgactctgcgtctgttttatggttcacgaatgattgcagc

SEQ ID NO: 13943 - DNA, 1605 bp, Zea mays
  Clone ID: LIB143-068-D11_FLI
agatcccgaggcccctctccctcgatcgccgcctcccggtagcggatccggcgccggctcgcgccccccgacaggttttgttttatgcttgttcatttgtctatggacaatggactagttgctgcactgcttttgtgagtcaccatgggaagcagtggagcagatacatcgtctaagccaaacaaggcatccgccccacaggagcagcaacaacctgctacctcaggtgctgcaacaccggctgtttatccagactggtccagcttccaggcatatcctccaatcccaccacatgggttcttcccctcacctgtggcatcaagtccacagggtcatccttacatgtggggagctcagcctatgattccaccatatggagcaccgccatatgtcatgtaccctcctggagtgtatgcacacccatctatggcctcgggtgcacatccatttactccttatgccattacttctccaaatggcaatgctgatgctactgaaactactgctgtagcttgtgatactgatggcaagccctctgaaggcaaagataaaagtccaactaagagacccaaaggaactttgggcagcttgaacatgcttactggaaagaaccccagtgaacatggtaagacctcaggtgcatcagctaatggagccacttctcaaagtggtgaaagtggcagtgacagttcaagcgaagggagtgaaggaaattctcataatgattcatacaagcatagtggacaggaacaagatggagacgtacgaagttcccagaatggtgcatcacgttctccatctgagggaaaatttaaccaagctatggcaatcatgcccatgccatcaagtggcccagtaactggtccaactacaaacctgaatattgggatggactattgggccaacacagcaagctctgctcctgtaattcatggcaaagtgaccccaacaacagttccaggggctgtggtcccagcagagcaatggatacaggatgaacgtgaactcaaaaggcaaaaaagaaaacagtctaatagggagtctgcacgcagatctaggttgcgcaaacaggctgaatgtgaggagttggctcaacgtgctgatgttttaaagcaggaaaatgcttcacttagagatgaagtaaaccgtatcagaaaagagtatgaggaacttctatcaaagaataattcactaaaggaaaaacttgaaggcaaacaacacaaaactgatgaggcaggacttaacaacaagctgcaacattctggcaatgacatccagaaaaaaggaaactaatcgagctatcatgcaatgcttgcatagcatggccctaactagattgttgggaggcgcaattgtagtatgcgtattaactccttactttattgcagttaattgttaccaggttatgataatgttgatgccaaccttgtgtgtgggtgtttcctgtttcagatctatcttggcttatcttttagaagtcaagatgtgactgaagatgtaggctgtgacccagttcactgtatctgaaatagtggataaactcaaatttacaatttgtattgctgactaatattgttatgtatacctggcaaaaggttttctttg

SEQ ID NO: 13944 - DNA, 707 bp, Zea mays
  Clone ID: LIB143-068-D2_FLI
agcttatcatctgaggacgttggtcaagttcttgcagtcactggtgccagtcttcttgtttatcaactctttctataccctagaatcaataaggttctcgggccgatcaaatcttctcgaattgcagctatcctgtgcatacctatcctctttgcctacccctacatgacatacatctcagaaccaggactgtcaatcattttgaacattgcgtcagcgataaagaataatcttgctgttacgatcattacaggcactttcatccttcaaaacaatgcagtgcctcaggatcaacgaggagctgcgaacggactgtccatgacagggatgtccttcttcaaggcacttgctccggcaggagcgggcattgtgttctcgtgggcgcagaaacgccagcatgcctttttcttcccaggtgatcagatggtgttcttcctgctgaacgtcgttgagctggtcgggctcatcctcacattcaaaccctttctggcagtgccagagcgatgcgatagtagatagctgttctttggaggatgaactatagaagttttggaatgattcaaaatttcatcgtgtatggcagcaataccagtgagacccaggaagaagcaagagctgtgtactggtaaccgtaagcggtgtatgcagtatcgctgcattagcatttgtgcttacgaaatgcacatgtatgtaggtgataaatgact

SEQ ID NO: 13945 - DNA, 487 bp, Zea mays
  Clone ID: LIB143-068-E11_FLI
ggcagcagcacgcctcctcctctttcagcaaacacagctagctagcagcacctgctcccttcgcctgtaatcatggcgtattgctgcgacgacggctgcaactgcccccctgactgcgggtgcccatgcgactgctgcaatttgtaccctgaagtggagaccgccgccgccagcggcatcctcgctgcgccgaccaccaaggccagcgccggcggctgcaacacctgcaagtgcggcggcaccagctgcaactgcaactgcagctgagccggcccaatggtggcgcacgagaggacgacgacgacgaggcgtagtatatatgtatgtagcagcgtctaaataagatcctgtcaagagtcaactgcacccgccattgtatggtcgcctgcctcgccttcgtctcctggtcctggggttcgttcatctgaacgttctcgcggtcctgtcagcctcgtgccggattcaatatttatatatacacatacac

SEQ ID NO: 13946 - DNA, 1132 bp, Zea mays
  Clone ID: LIB143-068-F9_FLI
ggcacacccaagctcgcgcccaccttccacgtcgaggtccgagtcctgctttgatggcgaccgacgtggctgagactcccgcgccgttggtggatgcggccccagaggcgcccgccgacgccccggcggcgcctgctgccgacgcgaagccggccaaggccaagaaggccaccgcgccgaagaagcgcgccagcccgacccacccgccgtacgccgaggtaattggtgccctccctttgatccttctgccgtgccgtgctgtgcgtgcctctccgccgcgtctggatcttactgaatagtggatggtcggtgcgcagatggtctcggaggcgatcacgtcgctcaaggagaggacggggtccagcagctatgcgattgccaagttcgtggaggacaagcacaaggacaagctcccgcccaacttccgcaagcttctgaacgttcagctcaagaagctcgtcgccggcggcaagctgaccaaggtgaagaactcgtacaagctgtcgtccgccgccaccaagccgaatcccaagcccaaggccgccccgaagaagcccaagactggcgctaagaagcccaaggccgctgccaagcccaaagctaagacccccgccaaggcgaagcccgccacaaagcccaagcccgccgcgaagccgaaagccgtagtgaaaccgaagacacccgccaagcccaaggccaagccagctgccaaggcgaagcccaagaccgccggcgctaagccaaagccacttgctaagaaagccggccgccccgccaaggcggcgaagacgtcggccaaggacacgccagggaagaaggcgccggtggccaagaagtccgctgccgccgcgaagaaggcccctgccaagaaggccgctccctcgaagaaggcggcggccctggtgcggaaagcgccgtcccgtaaggccaagaagtagagcggccaagatggggggcgcgatgttgtaaatttgatatcggagaggctcggggtacactggtcattcagtatccgagaccgatagctgaggctagcggcgatggaggactgtgttattactactataaactggaggttgtgtttctgtaactggtgaatgatcaagttggaagcttttagtctatcttaaat

SEQ ID NO: 13947 - DNA, 1548 bp, Zea mays
  Clone ID: LIB143-068-H4_FLI
tcccgtcgcatcccatcccactaccacccatctcgtcgtccgccgattcgatccggttcttccaacccaggggctgtgatggcgacgaagaggagcgtgggcaccctcggcgaggcggatctgaaggggaagaaggtgttcgtgcgcgccgacctcaacgtccctctcgacgacgcccagaagatcaccgacgacacccgcatccgcgcctccgtccccaccatcaagttcctcctcgagaagggcgccaaggtcatcctcgccagccacctgggtcgtccaaaaggtgtcaccccaaagtacagcttgaagcctcttgttccacgcttgtctgagctccttggagttgaagtcgtgatggccaatgattgcattggtgaggaagttgagaagttggctgccgctttgccagaaggtggagttctgctcctagagaatgttagattctacaaggaggaagagaagaacgaacctgagtttgctaagaagctagcatctgttgctgacctttatgtcaatgatgcttttggcacggcacacagagctcatgcttcaaccgaaggagttaccaagtatttgaagcctgctgttgctggcttcctcatgcagaaggaacttgactaccttgttggagctgttgccaacccaaagaagccatttgccgctattgttggtggatccaaggtctcaagtaagattggtgtcattgagtcgttgctggcgaaggtcgatatcctcatccttggtggtggtatgatctacacattttacaaggcacaaggatattctgttggaaaatctctcgtggaagaggataaacttgagctcgcaacttctcttattgagaaggcgaaggcaaagggggtttctcttttgcttcccactgatattgtagtagcggacaagtttgcagccgatgctgagagcaagattgtccctgccactgctatccctgatgactggatgggtcttgatgttggccctgatgccacgaaaaccttcaacgaagcattggacaccaccaagactgttatttggaacggccccatgggagtgtttgagttcgagaagtttgcagctggaactgaggcgattgccaagaagctagctgagcttacaaccacgaagggtgtcactaccatcatcggcggcggcgactctgtcgctgctgtcgagaaggctgggctggcggacaagatgagccacatttcgaccggcggcggtgcgagcttggaactcttggaaggcaagactctacctggtgtccttgccctcgatgacgcctagatccgctgctgctgctgctgctgctactcaggttctgccagctttgcgtgtcatcttgtttcggaccttggtgtaacgctgcaaggttaaggtttactcctccacacatggacttttggggataggcttgccatcgtgttttgctagatgagtcgtgaaataagcttttacttcctcgctgctgtgggtgaagtaactggaattcggaaatttggaactaacaaaaccccccgtggatttgtatgatatgttttgttcgac

SEQ ID NO: 13948 - DNA, 1088 bp, Zea mays
  Clone ID: LIB143-069-E6_FLI
cacaccccccgagctcagcttagctccactccagctccaatcacagtcgtgaccagagcgcgagagctagctagagggccgtgaaaatgccgatcaataggatcgccctggggagccaccaggaggtgtaccacccgggcgccctcaaggcggcgttcgctgagttcatctccaccctcatcttcgtcttcgccggccagggctccggcatggccttcagcaagctgaccggcggcggcccgacgaccccggcgggcctgatcgcggcggcggtggcgcacgcgttcgcgctgttcgtggcggtgtctgtgggcgcgaacatctccggcgggcacgtgaaccctgccgtgaccttcggcgccttcgtgggcggcaacatcaccctgttccgggggctcctgtactgggtggcgcagctgctggggtccaccgtggcgtgcttcctgctccgcttctcgacgggcgggcaggccacgggcaccttcgggctgacgggcgtgtcggtgtgggaggcgctggtgctggagatcgtgatgaccttcgggctggtgtacacggtgtacgccacggcggtggacccgaagaagggcagcctgggcaccatcgcccccattgccatcggcttcatcgtgggggccaacatcctggtgggcggcgccttcgacggcgcgtccatgaaccccgccgtgtccttcggccccgccctcgtcagctgggagtggggctaccagtgggtgtactgggtcgggcccctcatcggcggcggcctcgccggcgtcatctacgagctgctcttcatctcccacacccacgagcagctcccctccaccgactactaaaagccgaagccgaccgacctaggggtgcgcagcgcagctagcgcatccagctctctctccccgctcgccgccgtttagtttctctcgtgcacgtgcatgcatcgtcgactgtctcaggccgccgctgcgccggcgccgctcgcatcgtttgcttccttggaccagcagtcgtcgccgtcaggctgaactgcttgtaaccgtgaattccggacccgtttgcttctgtaagatttgtgcatttgcctgagt

SEQ ID NO: 13949 - DNA, 1674 bp, Zea mays
  Clone ID: LIB143-069-G11_FLI
ggcacacagagtctcagacacaggcacagcagacagcagagcgccccccaacaaaaacccaactcgttttcagctcgcgcaacgggcggcctcgtagcggagtcccagtcctctcgctttctccctgcgattcgcctcagcttccatccgatccgattcgggagtcgggactcgggagatagaggcagacggagagagaagaaaggcaaggcaatcgccgcgcgcgtgcttcctgccttctcggtcggctccagctcgccgttcattcccgcaatcccgctccgctcgcggtatcgggccgtggtagtgatgccgctggctgagccgccccagtggcgccgcaaagccacggatttcttctccacatctagtgtcaagctgaagcaggcagggcaatcggccggggataatatagctgatgttgctgggaaggttgggtccgcggtgaagagtcggtgggtcgtcttccaggaggctaggcagcagcagcagcaacggccaccgcatgagacagtgcaagagcgtatcatcaccgctgctgccaccactggtttgcttttcaggaaaggcatttcagagacaaaggagaaggttgcagtgggaaaggttaaagttgaagaggttgctaaaaaaactgcagataaaagcaagaatatcttgaacaatattgaacgctggcagaagggagtcgcaagcactgatgtgtttggtgttcctattgaagccactgtacaacgagagcaatctggtaaagctgtgcccttggtgctagtgagatgtgcagactacctggttatatcaggtttgaataatgagtacttattcaaatctgaaggtgacaaaaaagttcttcagcagttagtttctctttacaatgaagactctggcgcatctttacctgaaggtgtgaatcctattgatgtaggtgcactggtgaagtgctaccttgccagtatccctgagccgcttactacattttcgctttatgatgagcttcgagctgcgagggttagcattcctgatcttagggatatattgaagaagcttccaaatgtgaactacatgacaatagagtttgttacagcattgcttcttcgagtcagccataaatcatcacttaacaagatggactcccgcagccttgctgtggaatttgcgcctttgatcatgtggcggcaaggtgatgctggcacagatttgcgtaaccacctcaagttaaccctgaaaccgcctccaaaaattgtggatacaacatcaaatactgccacgtgggacctgtttgatgaggatggcgaggatgcttcatcccagatccccttggacgatgcttcacccccagactacaactccattgaggtcatccagtgtctgatcgagcatcataatgccatcttcactgatgcaaatgaaaccgtgtggagatgatcaaggtctcctctagatctctctggtgttagctcgtgctacgtattagttccaggtaggaaggtggattaccgtccgttattgttagggataagcattttggccggaacatttttggagtaggtttgtatatatgcgctagtgttaattctccccgggactaggatctggtcatgttatagcaatataagtcttgggtggatgtaaaccagatggacacgattgtgctgcatttgctgaattcggctt

SEQ ID NO: 13950 - DNA, 762 bp, Zea mays
  Clone ID: LIB143-070-A1_FLI
ggcgcagagaatccccaagcaaacaaacagggtagaggtagagggagaggagaggagaggagaggagaggagaggttgggtctgggacaccatggctccgatgaagctgtacggggcggtgatgtcgtggaacgtgacgaggtgcgcaacggcgctggaggaggctggctccgactacgagatcgtgcccatcaacttcgccaccgccgagcacaagagccccgagcacctcgtccgcaacccgtttggtcaggttccagctctgcaggatggtgacttgtacctcttcgaatcacgcgcaatctgcaagtacgctgctcgcaaaaacaagccagaaagttgtggatgagaaccttgagaagctgaagaaggtgctagaggtgtacgaggcacgcctgaccaagtgcaagtaccttgctggagacttcctcagcctcgccgacctgaaccatgtgtctgtcactctctgcctgtttgctacgccctacgcatctgtgctcgacgcctacccgcatgtgaaggcctggtggtctggtctgatggagaggccgtctgtccagaaggtcgctgccctgatgaagccatctgcttgaaacggttgccctgtcaatcggtgaatggaataagccaagtctgttctgggttgtttgcttgttcagtgatgtgtcttctatgacgaaagttgagtgcctatgtgtgagcatgcttgcttgtaacgagaccttgaattgttcggaaatgagcattcctgtgctcttcttt

SEQ ID NO: 13951 - DNA, 2284 bp, Zea mays
  Clone ID: LIB143-070-B4_FLI
ttttaacacctagtagttgttgttgacgatatgcttctctgtgcttccggttctgcatgatccaggcagcagccaggaacaacaagctaggccccctcacgcagaccgcacgaccgagcgcgcggcattgaccgacccatcgccgccgccgccgcctcgatcgaccatgacgcttgcgagcacggacaaggtggtgctgggatgcatcgcgttcagcatcttctgggtgctggccgtcttcccctcggtgccgttcatgccggtgggccgcaccgcgggctcgctcctgggcgccatgctcatggtgctcttccgcgtgatgaccccggaggaggcctacaaggccatcgacctcccgatcctgggcctgctcttcggcaccatggtggtcagcatcttcctggagcgcgccgacatgttcaagtacctcggcagcgcgctggcgtggcggagccggggcagcaaggacctgctgttccgcgtctgcctcgtgtccgccgtggccagcgcgctcttcaccaacgacacctgctgcgtggtgctcaccgagttcatcctcaagctggcgcggcagaacaacctgcccccgcagccgttcctgctggccctcgcctccagctccaacatcggctcctccgccacgcccatcggcaacccgcagaacctcgtcatcgccgtgcagagcggcatcaccttcggccagttcctcgtcggcgtcttcccggccatgatcgtcggcgtcgccgccaacacctgcatcctgctctgctacttctggaggtgcctctccgcgccggagaaggaccaggagggcggcgccgccgccgcggggcccgacgtcgccgtcgtggccgacgaggaggtcacctcgcacaggttcacgccggcgcggatgtcgcgcgcctcgtccgtcaacgggggcggcgccgacgccgactgcgtcggcgagctcatccgccggagcgatagcctcagccgggccgacactacgctaggcatgagcatgaggagccggagctacaactcggagggcggcgacatccaggtcgccatcaggtccatgcgcgcgtccagcatgtcgcaggagatggtggaggtgtccaccgtctgcgacaggcgcgacgacggcggtgccgggcccagaaaggtcaccaggaccaccagccaccagcgcagcgtcatcatcgaggacgcgcccgaggctgacgccgccgacgacgacgacgatggccacaagggcaaggacggtgacagcgtcaccaacaaggagaagaggtggaaggtgctcgtgtggaagactgccgtgtatctcaccacccttgggatgctggccgcgctcctcatggggctcaacatgtcctggtccgccatcactgctgctcttgtccttctcgcgcttgatttcactgacgcacaggcgtgcctggagaaggtgtcatactctttgctgatcttcttctgcggcatgttcataacggtcgacggcttcaacaggaccggcatacccaatgcgctctgggagctggtcgaaccgcactcgagaatcgacagcgccaaaggcacggcgcttctcgcagtcgtgatcctagtcctttcaaatgtggcctcaaacgttccaactgttcttctgctgggcacaagggtggcagcgtcagcaggcacaatctccccagagtcagagaagaaagcctggctcatactagcatgggtgagcacggtggccggcaacctgaccctcttgggctcggcggcgaacctgatcgtctgcgagcaggcgcggcgggcacagttcttcgggtacaacctcaccttctggagccacctccgcttcggcttgccgtcgacgatcatcatcacggcgatcggcctgctcatcgtcgccagttactgaaccccacacaagctagggtctcggcctcgcacaaacggcggggtgtgtagccagatggcaggcagaacgctgcagaaaacagcatgcagcactgcctgacatcgaaggagatgttgtactgattggcctttgtttgtacgttgtaacagtttttatgtcgttcgtgtaagtctgtacgtttcgcgcaaccgatgccgcaaggcgccgggttgcccatctgctaaggcaaataatgcgcaagactagtagatggcatggagtatagaaggccggcaccactgttctaggaaggcaaaaacttgctctagctagttcaggtaggagagccggcgaaaatgtatggtgtgcttctcgatttggtaatgtcaagggacttgtccttatgtttggagc

SEQ ID NO: 13952 - DNA, 582 bp, Zea mays
  Clone ID: LIB143-070-B6_FLI
ccgactagccgtccgcgcaaaaccctccctgctcagactcgtctgctgcagctcctcctccgccgccgtatcaaacgcactctcctccgccgccgcccgaggcaagatggttctccagaacgacatcgaccttctgaacccgccggcagagctcgagaaactcaagcacaagaagaagcgcctcgtccaatcccccaactccttcttcatggatgtcaagtgccagggatgcttcagcataaccacggttttcagccactcccagactgttgttgtgtgcccaggctgccaaactgttctctgccagcccacgggaggaaaggcgaggctcacggagggatgctctttccgccggaagggagactagagtggagtctgttattagtactggatcggttgtcaatctccagtatgtggattcaaattttgctctgtgcccagacgttaaggtcatgaactaccttagctaaggctttccgcatgttgttctggtgctgctatgtatcgcacgttggttattgctgaacttatagcttgtttggttcggattatgataaaccaaatggatatttgaattatatt

SEQ ID NO: 13953 - DNA, 1323 bp, Zea mays
  Clone ID: LIB143-070-D6_FLI
gttctttaaagaacacccctccagtcaggccgtcccgcgccgacgtcaacggagacgtgtcaacggcggcggtgagaagacccataaccttctagatttttttccgctgcctcaatggatctctgggagagggcccgggccttcgccggcgaggcggcgaagcggtcgcaggaactctccgcggaggcggccaagcgctcgtcggcgctggtctcggagacggcgaagaagtccaaggagatcttctccgaaaccgcctccaagtcgcgggagatcgccgctgaggccaccaagcaggccgacctcctcgccggccagatcaagcacctcgcctccgacctccctgtgccttcgatcccgcccatccccgcgatcccgcctatccccgccgctgcctcgtcggtgcccgacgcggccgagcttgagtgctacggcatcaccgacgacctccgcgagttcgtcaagggcatgaccataaacaccttccgcgacttcccactgcaagatgagcctgaggtgtctgatgtgccaactgtgtcgaatgtgcgtcaggatctgaacgagtggcaggccagacacggcacacttgtcctctcggcagtcaaggaaatatcaaagttcagatatgagctatgcccaagatacatgaaagagcgcaaattctggcgggtatattttttgctagtaaacagctatatagctccgtttgagaagaaatacttcgaggagctgaaagtgaaagcagaggaagagaaaaaggattcccagaaggaagcatcccaagcatctacaactgcagaaccgaaagacacaaaagtgccaagcaagacctcttcgacaaatcctgaacatgacctggatgtatttctgctgggggatctgggtagcgatgatgaggcttctgttggtggtgatgatgggctagatgatgactttgataagattgatgcgacctcgggattggagagtgatgacgatgacaaaaaggcagcaacagggaaggcagaaggtgtgtagtagtagactatggtttcacgattcgagagatgacgccaatgatatcgaacttcaggattccatgatgatattgtatattagttgatcgcatgccatatgttcatttgttatctcccaatgaaggaatgctaagcacttgttattacaattttcgatttttttactaaactgacacctatctatggatggtgttactcttttcttattagaagtgttctgtgaactgtctctacgaaattgaactccgactgctcgagactgtaattcacatgatgcacccgtgtgtgaagataatagatttggtat

SEQ ID NO: 13954 - DNA, 1171 bp, Zea mays
  Clone ID: LIB143-070-E3_FLI
cactagaaaccccaccaaacggaatttcacatccagcgagcaataccgcaccgcaggtaagatcaaagaggaggcgatggctggcggcgggcaggcggcgatttcgttcatgacgcggatggcgaaggtggcggcggggttgggcgtggcggcgtccgcagcctccacgtccttctacacggtggacggcggagagcgcgccgtcatcttcgatcgcgtccgcggcgtgctcccgcgtacgatgtcagagggcacccatttgctggtccccatccttcagaagcccttcattttcgacatccgcactcgccctcacagcttctcctccacctccggcaccaaggacctccagatggtcagcctcacgctccgcgtcctgtcgcgacccgacgtcgaacacctcccggacatcttcacctccctcgggctcgagtacgacgagaaggtcctcccatccatcggcaacgaggtgctcaaggccgtcgtcgcgcagttcaacgccgaccagctcctcaccgagcgtccccacgtctccgcgctcgtccgcgaatcgctcaccaagcgcgcccgcgagttcaacatcgtcctcgacgacgtcgccatcacccacctagcctacgggcaggagttcgcgcaggccgtcgagaagaagcaggtcgcgcaacaggaggccgagcgctccagattcctcgtcgcgcgcgctgagcaggagaggcgcgccgccatcgtccgcgcagagggggagagcgaggccgcgcgccttatctccgaggccacgaccactgcgggcaacggcctgatcgagctcaggaggatcgaggcggccaaggagatcgcaagcgttctgtcgcgcacgcccaacgtctcctacatccccgccggcgacaatggccagatgctgctcgggcttaacgccgcccggtgaatggatcgtctttttcccgcataattagttagtagtgccctattgaagtacttcagtaatttcagatgcatctacttagttatggttttgtggaacgattctatgctgggtaaagatggtgatatgcattgctcataaagttcggcagatggggaatttgccagaatactctatcgtaatcacttattgtgatatctcttgtttcatgctggttgcctgatctatatagtgttgctagcattctac

SEQ ID NO: 13955 - DNA, 2091 bp, Zea mays
  Clone ID: LIB143-070-E8_FLI
atagttcgtcatctccaagtgcgtgcgccggccgccccctatcccgccggccctgtgtgtgttccccgctaccagccatggcgtcgccgttctccgtgccttcgctgatcatggaggaggaagggcggttcgaggcggaggtggcggaggtggagtcgtggtggggcacggagcggttccggctcaccaagcgcccctacaccgcccgcgacgtggtcctcctccggggcacgctccggcagagctacgcgtcgggggagatggccaagaagctgtggcgcacgctcaaggcgcaccaggccggcggcaccgcctcccgcaccttcggcgcgctcgaccccgtccaggtcaccatgatggccaagcacctggacaccatctacgtctccgggtggcagtgctcgtccacgcacacctccaccaacgagcccggcccggacctcgccgactacccctacgacaccgtgcccaacaaggtggagcacctcttcttcgcgcagatctaccacgaccgcaagcagcgggaggcgcgcatgtcgctgccccgcgccgagcgcgcgcgggcgccgtacgtcgacttcctcaagcccatcatcgccgacggcgacacgggcttcggcggcgccacggccaccgtcaagctctgcaagctcttcgtggagcgcggggcggccggggtccacctcgaggaccagtcctccgtcaccaagaagtgcggccacatggcgggcaaggtgctcgtcgccgtctccgagcacgtgaaccgcctcgtcgccgcgcggctccagttcgacgtcatgggcgtcgagaccgtcctcgtcgcgcgcaccgacgccgtcgccgccacgctcatccagaccaacgtcgacgcgcgcgaccaccagttcatagtcggcgccaccaacccgggcctcaggggccagagcctcgcggccgtgctgtcggccggcatgtcggcgggcaagagcggcagggagctccaggccatcgaggacgagtggctggccgcggcgcggctcaagaccttctccgagtgcgtcagggacgccatcgcgggcctcggcgtcgcgggccaggagaagcagcgcaggctccaggagtgggaccgcgccaccggcggctacgacaggtgcgtgtccaacgaccaggcgcgcgacatcgccgccagcctcggcgtcacgtccgtgttctgggactgggacctgccgcggaccagggaagggttctaccgcttcagggggtccgtggcggcggccgtggtccggggccgcgccttcgcgccgcacgccgacgtgctgtggatggagacgtccagccccaacgtggccgagtgcaccgccttcgccgagggcgtcaaggcggcgtgccccgaggcgatgctcgcctacaacctctcgccgtccttcaactgggacgcgtctgggatgacggacgccgagatggccgccttcatcccgagcgtcgcgcgcctcggctacgtctggcagttcatcacgctcgccgggttccacgccgacgcgctcgtcaccgacacgttcgcgcgggacttcgcacgccgcggcatgctggcctacgtggagaggatccagagggaggagaggatcaacggcgtggagacgctggagcatcagaagtggtcgggcgccaatttctacgacagggtgctcaaggctgtgcagggtggcatctcctcgactgcagccatgggcaaaggagttactgaagagcagttcaaggatccacggcccgcaactgggagcagtggcctgcaagttatggccaaatccaggatttgatgaagactcagaagaagaagaatgatttggagaaggctctaaataaattcgaaaaaaaaataagctgggttcagttcatcagcaatggggaagctgctttccaagttctaaactgaacataatcagcataaatgaatcaacgaatcgtctagctagctacgtacggatggagttctgagttgtgactccaaatgaaaacccaggttgggttgaaagtattggtgtcaatctgtgagattatttatcacttcagattgaatatatgatttggttttggtactctgttctcagggtt

SEQ ID NO: 13956 - DNA, 1792 bp, Zea mays
  Clone ID: LIB143-070-H5_FLI
cagcagtagccaccttgccatggcgatgcaggctgctttcctcgcggggttctcgcagctcgccgcgcagccgagccgcgactgcgccgtggcagtggcgccgacgcgggtggccgttgctgcggtgggtagcgccaaggtgggcgcgcgggtaggcttgaaggcggggatcgccgcgcccgcgcccgcgcccgcggcgggccgcggggtgcggtgccgcgcaagcctgatcgagcccgacggcgggcagctggtggacctggtggcgcccgaggagggcgggcggcgcgcggcgcttcggcgggaggcggcggagctgccgcaccggctgcgcctcggccgcgtcgacaaggaatgggtccacgtcctcagcgaagggtgggcgagtccgctgcaagggttcatgcgcgagcatgagttcctccaaacacttcattttaatgccatccgcggccaggatggcaggatggtcaacatgtccgtccccatcgtgctctccgtaggggacgcacagcgaagggccatccaggccgacggcgccacgcgcgtcgcgctcgtcgacgaacgcgaccgccccatcgccgtcctcagcgacattgagatctataagcataataaggaagaaagaatagcacggacatgggggacaactgcacctggattaccttatgttgaggaggcaattaccaatgctggtgactggttgattggtggggacttggaggttatagaaccaatcaagtacaatgatggtctagatcagtatcgcctgtctccagcacagctgcgtgaagagtttgccaggcgcaatgctgatgcagtatttgcctttcagcttcgcaatccagtacacaatgggcatgctctacttatgaccgacacacgcaaacgcctccttgagatgggttataaaaaccctgttcttctgctccatccactaggaggattcacaaaagcagatgatgtgcctcttagttggagaatgaagcaacatgagaaggttcttgaggaaggtgtcctcaacccagaatcaactgttgttgcgatcttcccctctcctatgcattatgctgggccaactgaggttcaatggcatgctaaggctcgtattaatgctggtgcaaatttctatatcgttggaagggatcctgctggtatgagccaccccacagagaaaagggacctctatgatgctgatcacggaaagaaggttttgagcatggctcctggccttgagaggctcaacatccttcctttcaaggtggctgcgtatgacacaaagcaaaagaaaatggatttctttgatccatcaaggaaagatgatttcctcttcatctctggcacaaagatgcgcactcttgccaagaaccgagagagtcccccagatggttttatgtgcccgggtggctggaaggtactcgttgaatactatgacagcttggtgccatctgagggcagcagcaagctgcgtgaaccaattgcagcctaaaatctggaaaatccttcatataaggaatgctactatatcttagcaagcggttctttgcgacatagaaccgatgctatatgattgtatactggctgtaagactgtaaaacactaggcttgattcggatgttaatgtgtgctttgtacccggtgtaccttctctgctggcagtgttgcacatgcactggagcacatcaaacgtttggtgttaataaggacaggctatgtatcctctgccagattgtacatatatacattgtggtgatatataattataaagctgtcctctgccgttcgggctcgt

SEQ ID NO: 13957 - DNA, 1368 bp, Arabidopsis thaliana
  Clone ID: LIB146-005-A7_FLI
cgaacaaaccctagaccgttaaaacccttatcaatttggctgaaacggcaaatggaagaagtgtcgtcggagatggaagtggaggttcaaaatcgtcagctttcggattcttctccggctcaaaacgtgaagaaatttgggctcaagaactctattcagaccaacttcggctctgactacgtcttccagattgtcccaaaaatcgattggacagcaatcgcggtttccttatcaaccaacaccgtcaagctttactcgccggtgactggtcagtactacggcgaatgtaaaggccactccgataccgtcaatcagattgcgttttcctccgactcggcggcgtctcctcacgttttgcactcttgctcctccgatggtaccattagatcttgggacactcgaagtttccaacaggtttcgcgtattgatactgggaatgatcaggagattttcagcttctcctatggaggtgctgcagataatcttctggctggtggatgcaaagagcaggttcttctgtgggactggagaaactcaaagcaagttgcttgtttagaggaatcccacatggacgacgtcactcaggtacactttgttcctaacaagcccaacaagcttctttccgcttccgtggatggattgatatgtctttttaacactgaaggtgatatcaatgacgatgatcatctggaatctgtcatcaacgtgggaacttcaattggcaaaataggtttcctcggagatggctataaaaagctctggtgtctcactcatatagaaactctaagtatttggaattgggaagacggaagctgtgaagtcaacctagagaaagctcgggaactcgcatcagatagttggactcaagataatgttgattattttgttgattgtcattgtccaggaggtgaagatttatgggtgatcggtggaacgtgcgcaggaaccgttggttattttccggtgaactacaaacagcctggatcaatcggtaccgctgaagctattcttggtggaggtcacatagatgtagtaaggagcgttctgcagatgccatgcgagtatggaggagctgcagggttatttggatggactggtggtgaagatgggcgactatgttgctggaagtcggatgaggatgctaccgagattaaccggtcttggacttcaagtgagttggttgttaagccgccaaggaaccgcaagaaaaacagacactctccttactagtaaacagatactactttttgggtcttgtgtcttttataaaagttgagactgaagaggacagtttcctttatgtctcttgttcttgttattattaaaaggcaaagttgtttaaatgaaatattgaagaaagattacatc

SEQ ID NO: 13958 - DNA, 740 bp, Arabidopsis thaliana
  Clone ID: LIB146-005-F10_FLI
cagcataagaaagtgtgccatgtagcagcagaagctttaaactccgatgtctgggcatggcgaaagtacggacagaaacccatcaaaggttcaccatatccaagaggatactacagatgtagtacatcaaaaggttgtttagcccgtaaacaagtggagcgaaatagatccgacccgaagatgtttatcgtcacttacacggcggagcataatcatccagctcctacacaccgtaattctctcgccggaagcactcgtcagaaaccatccgatcaacagacgagtaaatctccgacgaccactattgctacttattcatcgtctccggtgacttcagccgacgaatttgttttgcctgttgaggatcatctagcggtgggagatcttgacggagaagaagatctgttatctttgtcggatacggtggttagcgatgatttcttcgatgggttagaggaattcgcagccggagatagcttttccgggaactcggctccggcgagttttgatctctcttgggttgtgaacagtgccgccactaccaccggaggaatatgattagattacgacggcttagaatactcttattaggacagatttataggattaaggaattattctcggagcatatgtaaaaataggataaaagaaaatgttctttgttactttttttcgggttttcttcctattgtttctaaacatcttagaaaaaatttaattgtatattccttaagctcgat

SEQ ID NO: 13959 - DNA, 1239 bp, Arabidopsis thaliana
  Clone ID: LIB146-006-A10_FLI
gatgaacatggtggtcagcgtgatatagtaggagtagttgatgaacactttacatttctagggtttttttaatgtcttctttttcgtggttgtacatacattgaccttatcgtgatttacagttttaaattatttgtgtgattgtaggagagacagttacatcacccacagggcattctgtgatgcactcatacaggagtcagcaagaaaccccaccgtgagcttcacggcaatggcagctggtggtggtggtggcgccagacatggcttttacggcggagcttcttccgctctctctcacaaccatttcggtaacaatccaaattccggtttcacccctctagctgctgcaggctacaatctgaaccgttcatcttccgacaagttcgaagactttgttcctcaggccaccaaccctaatcccggtccgaccaacttcctcatgcaatgctctccgaaccaaggactgttagcccagaacaatcagagtctcatgaaccatcatggtctgatcagcctcggtgataacaacaacaacaaccacaactttttcaacctcgcatactttcaagacaccaagaattctgatcagacaggtgttccttctctgttcaccaatggtgctgataacaacggcccatctgctttgcttagagggctaacttcttcatcttcgtcaagtgtggtcgttaatgactttggagattgtgatcatggaaaccttcaaggactcatgaactctctagctgcgacaacagatcaacaaggccggtcccctagccttttcgaccttcatttcgcaaacaatcttagcatgggtggctcggataggttgactttggactttcttggtgttaatggaggaattgtgagcaccgtcaatggccgtggtggtcgtagtggtggacctcctctggatgctgagatgaagttttcacacccaaatcatccatatggcaaagcttgagatgatcgttatctatctacaaatcatccaaatcatcatcatctagatatgctattaagttccttggagattttattctagataaagctagatatccaaatttaagctttctttcttttgctgttttcgactattaagggtaaggattgagctttgggatttttcattataaatttcttaagctcttatttttttcttaatgtcatggtgggaggctctagagtttttccttaataatatattgtaatcttgaatcataaatatatttcatg

SEQ ID NO: 13960 - DNA, 1011 bp, Arabidopsis thaliana
  Clone ID: LIB146-006-B7_FLI
ggacaatggtctcttggtccggtgttgtgttggagtggtgaagtcacgcacagaaggaccgaggtgttacaatatcccggtgccggtttctggcttgggtcagcagtttggaaagcttttggaaagtgggaaaggagctgacgttactttcgaagttgatggagaaacatttcctgctcacaaattggttcttgcagcacgttctgcagttttcagggcacagctttttggcccgttgagaagtgaaaataccaattgtataatcatagaagacgtacaagcccctattttcaagatgttgcttcattttatctactgggatgaaatgcctgatatgcaagacttaatcggcacagacttgaaatgggcatcaactcttgtggctcagcatctgcttgcagctgcagaccgttatgctcttgagcggcttagaacaatatgcgagtcaaaactctgtgaaggaatcagcataaatacggtagcaaccaccttggctcttgcagagcagcatcattgtttccagctgaaagccgcctgcctcaaatttatagctttgccagaaaacctgaaagctgtgatggaaacggatgggtttgattatctgaaggaaagctgcccgtccctactaagtgagctattggagtatgtggctaggctgagtgagcactctttaacatcatcagggcatcgaaaggagttatttgctgatggttgtgacttaaatgggagacgtgtgaagcaacggttacattagcaactaattgagagagagagagagagagaggtcacttcgagagcctgagaagatgatggtgaagtaaacagaattttagaagagtaaagatttgtgtatttgtcattgtaaaaggattagtggttgatctgtgttgttcagctagctaatagagtgaaatgttgggtttttttcttttcttttctcttttgttttcccaggattttatgaccagaaccggttctctcaaggaaaaagtttcatgtgacttcattgat

SEQ ID NO: 13961 - DNA, 2264 bp, Arabidopsis thaliana
  Clone ID: LIB146-006-D8_FLI
ggaaatcgccggagttgtctggtcgatgggttcaaaacgttgatccaacctggtgctgggatacacaccaaaccctcacatgtcagcgagggtcgtgtggcgtcaatatcgcagtgtaaatagaccatctggatctcttcctcaccttcgaatcccaactcagtccggtctccaacagccagaattttctccttcttctcaacgttcaaacgcctctccgcgaaactcttcgattccaggattgatctccattgttttgagacggttttgaatctgaggattgattttaaaggcaatccaaggaaaatttcttcaagtagatcgggaactacgtaaatcatcatcgggattagggtctttttcttcttttctctacagaactaaaaactcatcgggattagggtcttttttatacacaattttttttttttctagttttaacggaaacccccacaaatatttcattattactatttagcccagtcaatttccaaaagattaatttaggtcacctctctctctctctttccctatctcttggcctcgtgctcgtgcagctgaagatccctgctctgattcgtcaaatccagtaagctaaatttcctcttaattttctggtctttaattactttatactccatatgaataatttcttcaatcgaatttttcatctttgggtcttaatttttttctcaactgattcagctaacattagtgattagctatttgctggatttcttcgattgcttgtcgtctctatgtttcaattgtattatgattacgacacattcttgttttgatcattgtcgatgaaaagggtaaactttgaacaatcttctattacataaaattgaaactttttccaacatttctgagattttccaaatcaaattctcggagttgaattgaactctcaagtagcttacataatattcaaacttttgattatctaatcaaatctgtaattcttccttatctatgtggcagtggaagatgaggatgatccaaccacaaagaacagcaacaacacagatgattttgctatagagcctcgtgaagggattatatttgaatccgaggatgcagctaagatgttctatgatgattactctagacgattagggtttgtaatgcgtgtaatgtcttgccgaagatccgagaaagacggaagaattcttgcccggagattcggttgtaacaaagaaggtcattgtgttagtattcgtggtaagtttggatcagttaggaaacctagaccgagtacaagagaaggttgcaaagctatgattcatgttaagtatgaccggtctggcaaatgggtcattaccaaattcgtcaaagaacataaccatccactcgttgtttcacctcgcgaggctcgccataccctggtgagtacttaacttacttaacttatgtccctgtgcagtgtaacattacgtattttgagcaacaaatgtatgaaaccattttggtaaattatatgttgttataggacgagaaggataagagaattcaagaactgacgatagagctgcgaaacaagaagcggttatgtgcagcgtacaaggaacagttagatgcttttgcaaagattgttgaagagcatagtaatcagatagcaaagaaagttgagaatgtagtgaacaatttgaaggagttcgaacatctagagcatgcgctattgcgaagtaaacaagatgccatctaagccaactattgatgtgtgcggctgtatattctttgaattggtgaagctttcccgatcgtaaatggtttaagtgtaatctagatgtggtttgaatcttattttatggaatgtaatgtgaggaactttgtaaccatagagtagaagaggacatggatttaactcttgcctttagattgatacgaatgtggttggttctgcaatatactatattgataggaaacagttaacaatctacttaagaacacttaacaatcagaatagatgagaaggtgaatcttacataagctcagagataccctaaaaaacaaagattacacaccttcctcgattacacgatgttttgatttgtcatcagaaaatttatttacagaggaaaaacaagaaaaacaaaccaatcaatcgaataaacacacttctcttctgtcaaatcaaaccctagttaaagatcaattactgctgctaaagccaccacctttcatcatctgaagaaactctttgtaattgactctaccatcaccatctgcatcaacttgcataatcatcttctcacaac

SEQ ID NO: 13962 - DNA, 1056 bp, Arabidopsis thaliana
  Clone ID: LIB146-008-B9_FLI
gaaatctctgtagttttttttgttcctttcttaaatttcgaaagaaagacatttattaaaccaaaataactctttagatcattgcaaggaaaaatgttgaaaagtgcaagtccaatggcattctacgatatcggagagcagcaatactctactttcgggtacattttaagcaaacctgggaacgcaggagcttacgagattgacccttcgatcccaaacatcgacgatgcgatctacggctcagatgagttccgtatgtacgcttacaaaatcaaacggtgtcctcgtactcgtagccacgactggacggagtgtccctacgctcaccgtggcgagaaagccacacgccgtgatcctcgccgttacacttactgtgcagtcgcatgcccggctttccgaaatggcgcatgccaccgtggcgactcatgcgaattcgcacatggcgtattcgagtactggctccacccggcgcgttaccgaacacgcgcatgtaacgccgggaacttgtgtcagaggaaagtgtgtttctttgcccacgcgccggagcagctaaggcagtctgaaggaaagcacaggtgcaggtacgcatataggccggtgagggctagaggtggtggaaacggcgatggagtgacgatgagaatggacgacgagggttacgacacgtcacggtctccggtgagaagcgggaaagatgatttagatagtaacgaggagaaggtgttgttgaagtgttggagtcggatgagcattgtggatgatcattatgagccgtccgatttggatttggatttgtcacactttgattggatctcagagttggtcgattaaatttgggaaatcaaagcagagaacaaaagaaacccgataaataaagtggattttgttaaaatccacaagatcaagattcaagatgagagatcttgtcatgtatatggtaaatttaattgtaatgatttattgcaatgtcgcaaaagaagttacttctctttgcatgtaaacagattcttgatcttctataagtctttgtattatctatcgtataaacaatgttat

SEQ ID NO: 13963 - DNA, 301 bp, Arabidopsis thaliana
  Clone ID: LIB146-008-D6_FLI
gtcgacccacgctccggaagaaatgggtgagctccatttttgctgggaggagaaaagcttaatcgttgcttcagcttggaggtaagataagtgacaagagcatatagtctttatgtttcataaaacataattatgtttttactgtaatcttgggttattgtgtaactggttaaatcatctccatgtattattaccagaggttaggggtgatcacaggtactaaaagctaatctaacacttatggaagaatttttctttcttttttttccctattatataaaaataattagagttttggttc

SEQ ID NO: 13964 - DNA, 1761 bp, Arabidopsis thaliana
  Clone ID: LIB146-009-A1_FLI
cttaaaatggctgctcgtgtcgaggcggcagcaacacacttgtcgtctctccctgtagcttctctggagttttcgcagtcacgaatcttgttttgaagaaattaatttgaacaagggttttagggcttggatgctttgttttcattgaagaagaagtagaaggagtgtatacaaggattatgggaactcacatcaatttcaacaacttaggaggtggtggtcatcctggaggggaagggagtagtaaccagatgaagccaacgggtagtgtcatgcccttggctaggcagtcctcggtctactcccttacctttgatgagttacagaacacactaggtggaccgggaaaagatttcgggtcgatgaacatggatgaactcctgaagagcatatggactgctgaggaagctcaggccatggccatgacttctgcgccagctgctacagcggtagcgcaacctggtgctggtatcccacccccaggtgggaatctccagaggcaaggttcgttgacgttgcctagaacaattagtcagaagactgttgaggaggtgtggaaatgtttgatcaccaaggatggtaatatgggaggtagcagcggaggcggtggtgagtcgaatgtgcctcctggaaggcaacagactttaggggaaatgacacttgaagaatttctgttccgtgctggggttgtaagagaagataactgtgttcaacagatgggtcaggtcaacggaaacaataacaatgggttttatggtaacagcactgctgctggcggcttaggttttggatttggtcagccaaatcaaaacagcatatcattcaatggtactaatgattctatgatcttgaatcagccacctggtttagggctcaaaatgggtggaacaatgcagcagcaacaacaacaacagcagttgcttcagcagcaacaacagcagatgcagcagctgaatcagcctcatccacagcagcggctgcctcaaaccatttttcctaaacaagcaaacgtagcattttctgcgcctgtgaatataaccaacaagggttttgctggggctgcaaataattctatcaacaataataatggattagctagttacggaggaaccggggtcactgttgcagcaacttctccaggaacaagcagcgcagaaaataattctttatcaccagttccgtatgtgcttaatcgaggacgaagaagcaatacaggtctagagaaggttatcgagaggaggcaaaggagaatgatcaagaatcgggaatcagctgctagatcaagagctcgaaagcaggcttatacattggaactggaagccgaaattgaaaagctcaagaaaacgaatcaagaactgcagaaaaaacaggctgaaatggtggaaatgcagaagaatgagcagctgaaagaaacgtcgaagcgaccgtggggcagcaaaaggcaatgcttgagaaggacattaaccggaccatggtgaaggatgaagcaacaagaacggatgaaccagactcctagcttgggattaatgtaataggatagtgctacctgtacaggagattaagagaaattgagtgaaagatctaggttacagagtaggagagagttttcattataaataaatgacattttgtgccctgacttttgttagtttaggtttagattatcctctgttattgacttattgtgctttctggttgttagggtttctaaaagacatagttgtatatatatatgtctgactttgtattccggatttggtt

SEQ ID NO: 13965 - DNA, 1237 bp, Arabidopsis thaliana
  Clone ID: LIB146-010-F7_FLI
cccttccccacttccaaccaaaattaatttaaaatgtcaaatattttttcattttcctcttttcgaaattaaagaaaaccctaaacgccgttgtctgatattgagagagagagagagagattaaaaacttcttctggttccttttatcaacattttttctctctcttaaaacttcgaagcgatttttgatttacagactatggaaatggaatcattcatggacgaccttttgaacttctctgtaccggaagaggaagaagacgacgacgaacatacgcaaccaccgaggaatattactcgccggaaaactggattacggccaacagactccttcggtctctttaataccgacgaccttggagtggttgaagaagaggatttggaatggatttcaaacaaaaatgcttttccggtgattgaaacattcgtcggtgtattaccgtcggagcattttcctataacgtctcttctggaaagagaagcgactgaggtaaaacagctgagtccggtttcagtacttgagacgagtagccatagctccacaacgactacctcaaacagtagcggcggaagtaacggaagcacggccgtggctacgaccaccaccactccaacaataatgagctgttgcgttggttttaaagcgccggctaaagcgagaagcaagcgtcgtcgtacaggacgccgtgatttacgagttttgtggacaggaaacgagcaaggaggaatacagaagaagaagacgatgactgtggcggcggctgcgttgattatgggaaggaagtgtcaacactgtggagcggagaagactccgcaatggagggcaggaccagcggggcctaagactctgtgtaacgcttgtggcgtgaggtataagtccgggaggctagttccggagtatcgtccagcgaacagtccaactttcacggcggagttacattcgaattctcaccggaagattgtagagatgaggaagcagtatcagtccggtgacggtgacggtgatcggaaagattgtggataaaaagtgattaggattaattttttttttttcggagaaacttttttttttttttttttcgtttaatttctctttatttgtttttaaagtctgttttagggttttgcagttggaatttaggtttttaattttttgcttatcttttttatttgtgaaattagtggtaattacttatttagggaatattatggtcatggaatggaagataactttctc

SEQ ID NO: 13966 - DNA, 3439 bp, Arabidopsis thaliana
  Clone ID: LIB146-011-F11_FLI
ggccaacctgattgtatgcgtgaattgctggtagctggagccgatccaaatgcagtggatgatgaaggtgaaactgtgcttcatcgagctgttgccaagaaatacacagattgtgccattgttatattggaaaatgggggatctagatcaatgactgtttcaaatgcgaagtgcctgacaccgttacatatgtgtgtagcaacatggaatgttgctgttatcaagagatgggtggaagtttccagtccagaagaaatttctcaggcaattaatatcccaagcccagttggcactgctctgtgtatggctgcttctataaggaaagatcatgaaaaggaaggtagagagctggttcagatattgcttgcagctggggcagatccgactgcgcaagatgctcagcacgggcgaacagcgttgcatactgctgctatggctaacaatgtggaacttgtgagagtcattctagatgctggtgtgaatgcgaacatccgcaatgttcacaatacaattcctcttcatatggctttggccagaggcgcaaactcctgtgttagcctacttctggagtctggttcagactgcaatatacaggatgatgaaggagataacgcatttcatatagcagcagatgcagcgaagatgatacgtgaaaaccttgattggttaattgtcatgcttagaagtcctgatgctgctgtggacgtcagaaaccacagtggcaagacagtacgtgacttcttagaagcccttccaagagaatggatatcagaggatctgatggaggcactattaaaaaggggagttcatctatcacctacaatctatgaggtaggggattgggtgaaattcaagagaggcataacaacacccttacatggatggcaaggtgctaagcctaagagtgttgggtttgtgcaaaccattctcgagaaggaggacatgattatcgcattttgttctggtgaagctcgtgtgttggcaaatgaagttgttaagttgattccattagacaggggccagcatgtaagactcagagcagatgtgaaagagccaaggtttggttggcgtggtcaatcacgtgatagtgtcggtactgttttatgtgttgatgaggatgggatcttacgagttgggtttcctggagcatctcgaggctggaaagctgatcctgctgaaatggaacgtgtggaagaattcaaagtcggggattgggtccgtatccgtcagaatctgacttcagccaaacatggttttggatctgttgtccccggcagtatggggattgtttattgtgtacggccagatagcagtctccttgtggagttaagttatcttccaaatccctggcattgtgaacccgaggaagttgaacctgttgctccctttaggattggtgatcgggtgtgtgtaaagcggtcagttgccgaacctcgatatgcttggggtggggagacccatcacagtgttggaaaaattagtgaaatagagaatgatggtcttcttattattgaaataccaaaccgacctataccgtggcaggcagatccttcagacatggaaaagattgatgatttcaaggttggtgactgggtcagagtgaaggcgtcagtgtcttccccgaaatatggatgggaagacattactcgaaatagtattggcgttatgcacagcttagatgaagatggtgatgtgggtatagctttctgtttcaggagtaaacctttttcatgttctgtgacagatgttgaaaaggttacgccctttcatgtgggacaagagattcatatgacaccatcaatcacccaaccacgacttggatggtcaaatgagactccagcaactattggtaaagtaatgagaatcgacatggacgggactctgagtgcacaggtgactggtagacagacgttgtggagggtctcacctggagatgcagagctgctttcaggttttgaagttggtgattgggtgcgctcaaaaccgagcctgggaaacagaccaagctatgattggtctaatgtaggaagggagagtattgctgtcgttcatagcatacaggaaacaggttacttagaattggcttgttgtttccggaaaggaagatggagtactcattacacagatttagagaagattccagctctcaaagtgggccagtttgtgcatttccagaagggaataacagaaccaagatggggctggagagcagccaagcccgattcacgaggcatcataaccacagttcatgctgatggagaggtaagggttgctttctttggattgcctgggttgtggagaggagatccagcagacttggaagtggagcctatgtttgaggttggagaatgggtaagacttagagaaggtgtttcttgttggaaatctgttggaccaggaagtgttggtgtagtgcatggagtaggatatgagggagacgagtgggatggaaccacttccgtttcattttgtggcgagcaagaaagatgggcggggcccacttcacacctagagaaagcaaagaagcttgtggttggacaaaaaactcgggtcaaactggcagtgaaacagcctaggtttgggtggtcaggtcatagccatggaagtgtaggaacaatatcagccattgatgcggatggtaagctacggatatacacaccagccggctctaaaacgtggatgcttgacccatcagaagttgaaaccatagaagaagaagagctcaagattggggactgggttagggtaaaggcgagcatcacaacacccacttaccagtggggagaggtcaatccttcaagcacaggggtggttcacagaatggaggatggagatttatgtgtatctttctgtttcctagacaggctatggctatgtaaagccggggaactggaacgcataagaccatttagaattggagaccgggttaagataaaggatggactggttacacctcggtggggttggggaatgaggacatgttgtgggagtggatgcaaatgggaaattgagaataaaattcctgtggagggaagggcggccctggattggtgatcctgcggatatagttctagatgaaacttctggctgaatctcccaatgtatgattatgttttgaatctggaagattggtcattaggctatgcatgaggctgctctgtccattgtaagacataaagctcacagagcccttgtgccaacagctcaggtaatctatatctatctctcatgatgatttattaatatttttgttaataaagttaaaactatagagtggtaggagatatttaggatgtatcatctattatgtctagacaccactttcatatctcagatctctttttgtttatatgtttttcttcttctttgtataaaataatgaatcgcatgtacggacagatttccttagtattaacaaatctttttgaagaggcttagc

SEQ ID NO: 13967 - DNA, 1652 bp, Arabidopsis thaliana
  Clone ID: LIB146-012-C11_FLI
ctctctttcccagcatcaccatctcttgtaccagtttctgattagattcaacaatgaacggcgcattaggtaactcctccgcctccgttagtggcggagaaggagccggaggaccagcgcctttcttggtgaaaacctacgagatggtcgacgattcatcaacggaccagatcgtatcgtggagcgctaacaacaacagcttcatcgtttggaatcatgccgaattttcacgcctccttcttccaacctacttcaaacacaataacttctcttccttcattcgtcagctcaatacctatgggtttaggaagattgatccagagaggtgggagtttttgaatgatgattttattaaggatcagaagcatcttctcaagaatatacatagaaggaaaccaatacacagccatagtcatccacctgcttcgtcgactgatcaagaaagagcagtgttgcaagagcagatggacaagctttcacgtgagaaagctgcaattgaaactaagcttttaaagttcaaacaacagaaggttgtagcaaagcatcagtttgaagaaatgactgagcatgttgatgatatggagaataggcagaagaagctgctgaatttcttggaaactgcaattcggaatcctacttttgttaagaattttggtcgtaaagtcgagcagttggatatttcagcttacaacaaaaagcgaaggctccctgaagttgagcaatcaaagccaccttcagaagattctcatctggataatagtagtggtagctcgagacgcgagtctggaaacatttttcatcaaaatttctctaataaattgcgactagagctttctccagctgtttcagatatgaacatggtttcacacagtatacaaagttccaatgaagaaggtgcgagtcccaaagggatactgtcaggaggtgatccaaatactacactaacaagaagagaaggcctagcatttgcacctgaagctctagagcttgcggataccggaacatgcccgaggagattactgttaaatgacaatacaagggtggagaccttgcagcagaggctaacttcttcagaggagactgatggtagtttttcatgtcatttaaatctaaccctggcttctgctccgttaccggacaaaacagcttcacagatagctaagacgactcttaaaagtcaggagttaaactttaactcaatagagacaagtgcaagtgagaaaaatcggggtagacaagaggtggcagttggaggtagccaagcaaatgcagctcctccagcaagagtgaatgatgtattctgggaacagttcctaacagaaaggccagggtcttcagataatgaggaggcaagttcgacttatagaggtaacccatacgaagagcaagaggagaaaagaaacgggaatatgatgtcacgtaatacaaagaatatcgagcagctgaccttataaactatttggacggttacatcaacgagagtacgaactgtggttttggtaagaagtatgggtgagtaagtaatgaaacattggactgaaaaagcgtaagtagctttgttgtaaacacttgcgtctctgtctacacaagtaatttgactgtaaatgtaagtgtacaggatttaaattgaataagcatttttttcgtgtcgt

SEQ ID NO: 13968 - DNA, 1524 bp, Euglena gracilis
  Clone ID: LIB147-009-E3_FLI
attttttttcgtcacaaacaatgtcaaggtggtcatcgtgccaggagtttttgaagcatgttgagtctcgcaatcctggacaacctgagtttatgcaagctgtgacggaggtgatcgagagcttgtggccgttcattgagaagaatcccaagtacgctgatgctagcttgttggagcgtattgttgagcctgaacgcgttgtcatgttccgagtatgctggatggatgacaagggcgttgtgcaggtcaacaagggctaccgcatccaacacagcatggcgattgggccttacaagggtggccttcgttttcatccctccgtgaacctgtccatcctcaagtttttggcctttgagcaaaccttcaagaatgccctcaccactctcccaatgggcggaggcaagggtggctctgatttcgaccccaagggaaagagtaagaacgaggtgatgagattctgtcaggcatttgccagcgagctgttccgccacgttggggcagacactgatgtgccagcaggtgacatcggcgttggcggacgggaggttgctttcattgctgggcagtacaagaagctgaccaactgcgctgactgcgtgttcacaggcaaagggctcacttttggtggttctttgattcgtccagagtccactggctatggttgtgtgtattttgcccaggagatgttggccaccaaaggcctctcattccagggcttgcgagtgagcatttctggatccggcaacgtagcacaatacgccactgagaagtgcatggagctgggcgcaaaggtggtcactgtttctgactccagtggcaccattgtggatgaagatgggttcacaccggagaagttggccatcctcatgcgcgtgaaaaacgagcagtatggccgtgttacggactacgtgcagcaggctgggggcaacatcaagttcctgcctggggcacgtccatggggagtcaaggcggacgttgccctcccctgtgcctgcgagaatgagctggatgagaacgacgcgaagaccctcattgcaaacggggtcaagtgcgtcgctgagggcgcaaacatgccctccaccatcgccgccgccaaggctttcgaggctgcgggagtcctgtatgctcccgggaaagcaagcaatgctggtggtgtggcaacttcagggcttgagatgagccagaatgctatgcgcctcacatggacacgcgcggaggtggaccagaagctccatggcatcatgaagagcatccacgccgcatgtgtccaacatgggaagcgtgcagatggcaccgtgagttatattgatggtgcgaacatcgcgggatttgtgaaggtggctgaggccatgctggcacagggtgtgttgtaaactgcaatcccactattccatttgggttccatcgcgttgggggccccaaagcctcccaaggcttatagcctttgcaaaagctcgggagagccttcgaacaccgcttcgcagccgatcgaacgtcacatgatcatcttattcaagaaaccac

SEQ ID NO: 13969 - DNA, 560 bp, Zea mays
  Clone ID: LIB148-001-C1_FLI
gttggagcgttggcaatatattacttgatctcacaggaggggtgctgaatttttgtcagatgggtgtgcagtctatagatcaacatactttggtgaatttctatggaaacattgggaaaacccttctttcattggagacggttttctttgatgtcctgttcattatccaacactacgtgttgtaccctgtcaagaaggacgagaatggtaaggcaatcatttctgaaagggtagccccccttatcaggccttcggacaagcctgaagaagataacgtatgatctagctgtagttatattgcgcacattgcattcacgcgctgtttgcacacaggccacacacgcatgcgaattatttgttcaaaaggaattgctagcgcgtcttgattatattgctacttataacttttactacttggtgcactggcgagagatgtctcatataccaggttgcgggtttcaagtggccccgtttttattatcgtgatttgtgaaggttattagatatcatctcggccaacatttacgatcaatgctcatgtaaatatttggttgcattac

SEQ ID NO: 13970 - DNA, 1324 bp, Zea mays
  Clone ID: LIB148-001-C11_FLI
gcttccttccgccgtgccacccaccctcctctcgcggtcgcgggggtagggccgggtgagcacgagcgctgcccgctcgctgaaccatggcgggctccgcggtggccgtcgtcctcctgtcggccgtcgcgctgctctgcctgtaccacctccttttcctctccctgtccgtcccggacccggcagcagcagcagccgtcccccgccgcgccggtggccaccatggcagcaacgttccgtccgggtcaggaaccgccaacgtcgtcctccgcttcggcctgtccgggcagccgctccgcctccacgaccccgcctccgccgccggcctcccggacatcgacaccttccgcggcaagctcgagcggctgcttcctcccgacgaccacgaccccggctggtcccgccgcttcgacgccgagctcggccccgtgcaccggtacttcggcccggacgcgccgctggacgtgcggcagcggatcgcgtacctgttcgcgatcctcgaccggtcgcccaggggcgtcggcgtcggcgtcggcgtcggcgagctggaggcctggctgcgctggcaggccgccgcccggctggacgccgtcacgcggagggagatggctccgcacgacacggaccgcgacggtgccgtcacgctgcgcgagttcttcgcagggtggtggatgcacaagtttgcgagcgcggacagagacggggatggctcgctcaacgccgtcgaattcaacgacttcctgcatcctgaagacagcagccaagagagcgtgatgctgtggctactcaaggacaagctaagcgagatggaccatgacggagacggcaggctaagccaggaggagttcgtcgctcaatctcacatcatcatctccggcgcgcgtcacgccgacgacggtggccatgcccatgaccttgagcgtgccgaagctgcgaagaagttcacagaactggacgccgacaaggacaactacttgacggtggaagaagcgcgctgcgtactgcagagcctcgtcacgggggagttctcctatgctacctcacatgccaagttcttgatgaaggctgatgtgaaccatgacggcaaactgtcgctggaggagatgctagacgactacatatccttctacagcaccgtgtatatggatgatcattacgccagcgaaggtgaagtcgatagtgattcccgcgacgagctatgagcagttaaggcaggacaggacagcaagtcggaggttctttactttcaaatacactaggattttgcagccaaaggaaatgggaaatgtacaatcagctgcaaacatcaattttgttcatcgag

SEQ ID NO: 13971 - DNA, 925 bp, Zea mays
  Clone ID: LIB148-001-E3_FLI
ctcttcgccgcggcggcggatggccctgccgctctacggctgcaggtcctgcgctgtgcatgatgccatcatcttctgccactgctgtgacgccaggctgtgcctgcactgcgacgccgccgtgcacggggctaccgaggcgggggcgctccacccgcgcgcccggctctgcgacgcgtgcggcgccgcgccggccgcgctgcgctgcgacggcaccgtgacgctgtgcgccgtgtgcgtcggccgcggtgctcccggcgtgacccgcacccgcgtggccacgtacaccggctgtccgggccctgctgagatggtgcgcctcatttccgtagacccaccgcagctggagcaggactttgaggcctggctcgcagacaagctcccgcgtttggtcgtggaggaggatgttgggctcccgccagactgggatgtcgccgtggaaactgcaaggcttgagaagatgctggcagaatgctgtgagcctgagactgaggaagctgaccagcagcgactgcagatgcagatgctgctgcaagatgcaagcgctatggccaagaagcgagaggggagagagagggccaaacaaagatatatcgagaagaggaagaatagaaggttctgcaagcagatcatgtatgcttctcgtaaggccagagcagacacgagatggcgagtgaaaggccgctttgccaagcaggcttccgctagcttctagtgatctccctgatctgctttcacagtcatttttgtgttgtcatctcgctcgcactttgctcaatccctcttcggcttcaacaacaaatttctcttgggtaatttattttccataattacatatattttccctgcttgtcagatgtaatatttttctttccttttattcaagaactaaatgcaattcaatacgtatgtggatcggcctatt

SEQ ID NO: 13972 - DNA, 502 bp, Zea mays
  Clone ID: LIB148-001-F1_FLI
ggaataaatagttcgtgaatccctgaagcgtgcatatatatattcctgccaagataaaggtaatggagtcgtcacgcaggttccagccggccgtcatcctgcttctcctgctcattgtgtccaccgatatggcacaggcaagggaatgcgagaagtacagtgagcgatttgttggggcatgcatgatcgcagacaactgcgccaatgtgtgccgcggtgagggcttcttggccggcaggtgcagcaccttccgccgccgctgcatctgcactaggcagtgctaaacaagatcgctcgatcgttcgccatgcatcgacaacctattcttaataacgttcattatctcgttcttatttatgacgaatgtcatgtatgttctggtgactgtcatgtatattctgatgactgtcatgtatcttgttcatgtatgctcaaggttcattatcttgttcatgtattaagtatgttatgaataactcaatatttattattttgttcatgt

SEQ ID NO: 13973 - DNA, 1841 bp, Zea mays
  Clone ID: LIB148-001-F8_FLI
taggccctaaaaagcggggcacttcgtagccgcaagcattcttccttccttctccattccatcggtgaccatggattgaagacattgatcggcttctctggaggtgcgtgtgagcagctcggaggtcagccgccgagaagagctcataggcaatggcaaccgcaaggaaggatcctcagcaggttgataaagtcaacctgaaacccagcgagtctggcaaaggggtagtacggcgtgcaaggtctgtcccgacctctccggatcgcagatcgtccccatccccggccccagtctcagacaacgccagccgaccggcatcatcactcaacactcgcacgacctcgtcccggtccacaacaacatctagctcggcggcctcttcaagccacgggaagacgatgcgctccgcttcgtcgtccgtgggtggtgcaagtgcaagcgcaaggcagacaaacgcggcgagaaggagagcagagaagcccggtgccacatccgtgtggcctgcggccggcggcgcggttacgaacgcctcgtcgtctaaggatgtggccagcagggcagcaaaatcgccatccaccgccgcgcagaagacgaggcctgctggtgtcgagaaggcagcagcgtcttcttctgtaaagctgaagacgaagcctcagaaaacaacggcaggagctggaaaaactcaagctgcacctcccgcccgtgctcctcctggcacggtaatagcaaagaagagtacgggagccgagaactatgtccccatccagaggacgacgagcgtgccggcggcgagaccaacagagacgctcaagaacgaggaacaggaggtcgacgagctgctgatgcagttcgacgagaaggagagcataagcacctcctccattgaggagcacctgcaagaacggctccctgaccctgtcgatctgaaatccgtggatctcgacagcagcaagacgacgtcctcctcctccagtcaggaggagtgcaaggatcaagaagagaacacgggggacattctggaggagaagcgtgacgggaaggacagcgaagacctgagcagcacaggcgacaaggcttgtgtcgggctcgggagcagtgatataaacatcccgatggaagaagcggttgatgaacctgttaaaccggcggaagctgtggacgaagctgggctgaagagagatgtctgctgttcaccagctgagccaaacgaagccgttggtcagaacgagctcaatgaggctgctgtcgtcggtgaaacgacgactgaaccgaaggaggctgaggatgaagccaagataataaagcaagtcgactgcgaaactgcatcaaaagaagttgctagtactggggccgagtcaagggacgatgccgctactatggaacgcgagccgctggtagcagcagcagcagcaccacaagaagagaaggccaaagctgaggagaagacgacgcagccaactaaggccgtggaatctgccaagtggaggacgaaggatgaagggaggagcaacgaagccacagaggagggcaggggcaagtctaccactactgctgccacccaggagaggaagaacaaggtgatggccttggttgggaggtttgagactgccatgtctggctgagaagagatcagaacgaggtgatgtcaaaagactgctctggctcatgaaaatgtgtacgagtactactcaactgtgcaggcgtggagggttcgtatgtttcgtttcattaattaatgtggctgttgttgttctggaagcgagtgaagattgctgatgcatattgatggcgcttctcctgtttctctttttaatgaagtgactctcctgcatggtcctgtc

SEQ ID NO: 13974 - DNA, 1294 bp, Zea mays
  Clone ID: LIB148-002-B10_FLI
ggcggagctgcggagcatggccgccgtctgccgctccatgcgcgagcgctgccgcggcgaccacctctgggagcggcacatgacaaacaggtggggccgtgtcctgggccgcgccgccagggacgaatggaggacgcacctggcgtccgccagcgagtcccgcgccgcgggcggcggcggcggcggcaagcgccggaggtggctcgccgcgctgtcctgcgtttgcccggtggtgtcctggatgcggcccagggccgacggtggcaagtcgtccgcccccgtgctggacgattccatcatgtcgtggtacctgtccgtggagagcggcaagttctggttcccggctcaggtctacaaccgcgagcatgggcatgttgggttcatgatgtcatgctatgatgcagcgctcagttacgatttccatacggacacattccgtgcaaggtacccaccacacggtcgacgaaccgtggtgttggaggatggcgtgcaatgggacagggtgagggcaccgcctgttgacacccttgcgcatgacctgcacacctctgactgcctgcatgagctccggcccggcgaccacatcgagattcagtggagaaggaacaaagaattcccatacggctggtggtatggagttgttgggcacttggagtcatgtgatggaagcgaacacttttgtcggtgccatcttagtgataccgtggtgctggagtttaatcagtacacgccgggctcaaggtggaggcaagcgttggtgaaacggaaggagcatagggaggagggcaacgagggcgacgggttctacggcggcataaggaagctccgcggcaacgatgacatctccaagtggaggcagctgtggccaacagacgtcctggagtaagcaggaaccgcatcccttctcacaccgacattgatccatcgctcaaatgacacgcctttctttcatcatcatattgaccaaattcgtcgtctctgtcgcgctgttgtaaacgggttagtagaagaacaaatcccgtagctggacaagggtgtaacacttactctctccgtttcgttttagttgtcgctggatagtgcaaaattgaactatccagctacaactaaaaagaaacggatggagtatttgttaggcgtaccaggcgcagactgcttcctatttgttcgtggggctgtaactgtaagccttgtttgtgacccctaagcagtctgcgtcttgtgcctgctgctgtagcggtagagcagagagagatcaaatgtaaattacatttttttagctcaaattcacgac

SEQ ID NO: 13975 - DNA, 1058 bp, Zea mays
  Clone ID: LIB148-002-E2_FLI
cgcaacggcgacggcggcggcgaccagctcgttgtcgccttcgagacgtaccagcagctgagccgcgtgtctatccgggccatgacggccatctccgacctggaaacgatccacgaggacgtcgtcaccagcgcgcaccagaagcgagccgcgctcatcgtgctccccttccacaagctccaccagatcgacggccacatggagtcgcttggcgaccagtaccagcacatcaaccagcgcgtgctccaccacgctccctgctccgtaggcatcctcgtcgaccgcggcctcggcggtgtcgctcaggtggccgccagcgacgtgtcatacaccatcgttgtcatcttcttcggtggccgcgacgaccgcgaggccctggcctacggcatgcgcatggtcgagcacccaggcatcgggctgcacgtcctacgcttcttgctacagtccggcggcgccgccagcgacgacgacgcgtcgttccttgaagagttccgaaccaaggtggccaacgggaacgactctgtccgctatgaagacaggacagtgggagggaaagaggaagtcgttgaggcgatcaaggcaacagggcggtgcaacctgttcctcgtcggacagggcacgccctgcatgccgctggttgactggagcacggacagcccggagctcgggccggttggtacttacctggcgctgccggaattttcgacggtggcatctgtgctggtcatgaaacagtacgatccgatggcgaagcacgacgacttcgtcgaggaggtggccgacatagcggtggacgttgacacgccgggccccagtaacaggggaaccaatactagcttccatgccggatgatacgtgctggtgttagatgtattattaacatgtcgagcagacaagactgattaacattatgtaatgtaatctcaaagtggtgtaaatggatggatcgaggtataggatcccctggagtgtccaaccggcaacccaaaccaattccttttttcgaattatcatgatgtaattcccgaaaatgtataaatttcagtttttagttgttc

SEQ ID NO: 13976 - DNA, 977 bp, Zea mays
  Clone ID: LIB148-002-F11_FLI
gccggagaactacaactatctgatggagttcgtggggagcggcgacgaggggaagcggaggcggcggcgggccgggaagaaggagatctacgcgaggctcgccaggcctgtgccttttggcgacggcaagaaggaattctggttggacaagaacaaaggcatgatctgtatggcactgtcgtccaaagcactggtgattactgggattgatgacagaagatactggcaacacatgccaacttcagaatcgagattccagtctgtagcctaccttcagcaaatctggtggtttgaggtggttggtgaagtcgatttctgcttccctgttggaacatatagcttgtacttcagggtccatcttgggaagttctacagacgatttggccgccgccagtgcacctcagagcatgttcatggttgggacaagaagcctgttcgcttccagctatcgacctctgacgggcagcaggcattgtctcagtgctacctggaggagcccgggagctgggtcctgtaccatgctggcgattttgtggcctcaaagcctgaccagctgatgaagctgaagttctccatggcacagatcgactgcacgcacacaaaaggcgggctgtgcatcgactcggttcttatctatccaaaagggaaggggtttcaccaggagagggtggtcaggtctcagaaatgagggttgtagatgttgtggaggtattcacattaggatgttagagcaaatgcagcttgcagcctgatcttatttttactttgggctctagttcgcagcagaggtgaagtgtatgtggttgtagaactcaggtattgtgtggtcaggtgaccaccagagtgctctgtcagtcctttggcaaggtcgttttcgccccccttcagctgaatttggacagcgagatagccatgaaactgtactgaaatgagttcgaaggtgtcattcccagtttctaatttgctttctactgctt

SEQ ID NO: 13977 - DNA, 663 bp, Zea mays
  Clone ID: LIB148-002-H1_FLI
cgagtgccggcctccccgttacatctccaagccaagcaggtccagagatctcgatcggtcctcgctcttgcagaaacgaggaaagaaaacatgtcttctcgctgggttagggcggaggtgtacccgctgttcgcgacgacaggggtggcggtggggatctgcgtgatgcagctggtgcgcaacatcaccaccaacccggaggtgcgggtgaccaaggagaagcgggcggccggggtgctggacaaccacgacgaggggcggcgctactcgcagcacggcgtgcgcaggttctggctctccaagcgccgcgactacatgcaggccatggacaaggtgcccacggaccctaataagtagacgacgacgatataccccaatgcatggcaagaagatatatatatcagcacaacgcaactgcatgcgatgctgcttgttgctgcaattaatccactatactatatactataggagtattattgattccagttgcagcatgcatgatgatatatgtgtctctatatgcatgcgttggtatatacaattcagatatgcatggtatatataagtggtagtgcgcacgtacactacatgcagtcattaatttgtacgtcttcgcgtgcatttgggctgtcagcttattaattaaagttcatactctttatt

SEQ ID NO: 13978 - DNA, 1200 bp, Zea mays
  Clone ID: LIB148-003-A1_FLI
gagagagggagccaagggaagctctcttctttcttcctcctcctcgtcctctcgaattccgtctcttgtctctgtcctcctcgctcggcttccccggttcttgagaggggaaataggaggcggagccgaggagagggatggggagggacgagaggttcccagtgtgggaggccgcgctcggcgctggggtcgccgccgccttcgccgctgggctcgtcggggtttacctttccatgccggactccgactacagcttcctcaagctgccacgtaatctccaggaactccaaatcctcactggccatcttgagaactatactagcgactacaccctacaggtgttggtaggctactgcgccgtgtacatcttcatgcagaccttcatgatcccaggaacgatattcatgtcactgcttgctggtgctctgtttgggcagctccggggcgtggccctggtagtcttcgccgccactgctggcgcttcttcgtgctatttcctgtcgaagatgattgggaagccactggtgttcacgctgtggccagataaactcagcttcttccagagacaggttgctaaaagaagagagaagctcttgaattacatgcttttcctcagggtgaccccaacattgccaaataccttcatcaacttggcttcaccgatagtagatgtcccctaccacatattcttactgggaactctcattggccttatcccagcttcttatgtgactgtcagggctggaatcgctcttggagaattaacttcgctaagcgacctttacgacacccagtcgatagcgctgctattcctgatcggtgttgtttcagtcacaccagcattgttgggcaaggacgaggcacaagaaaaaccatcagaaatggctgtaggcgcgtcgtgatcaccaaagcaccgagcacctgtacatatcaacatgcagccatgcagtggcttcattagttcagatcgacgggcccgtgtggctggatgacaaaaacggttcgcatggctactacacagcttggataggccattcagcacattatgattatgaacgattgaatgaatctgggaagcagaatgcccgttccacaagctgctctgatgtgtaaacgagtagtgctgttcggataggcctggcatttagtctaatccctgtttatattgaccagattcattcaatccatattcagtggttc

SEQ ID NO: 13979 - DNA, 1774 bp, Zea mays
  Clone ID: LIB148-003-B12_FLI
ccaccccgcccacgcctccctccctcccgccgggacaaaaccgccgctcctcctcctccgcccctccccgctctttctgtgaggcgggaagcgaggcggatgccgaggcgacggggctcgcgcaccgcacgcgtgtgcccgccgcccgggggccaggcgaggtggtgaggtgaggccgagcgcggttttaaattgttcacccggccgcccttctcgccgtagttttcagtggtacaagcaagggaggaacgaacgtgagggctgcctgcctgcctgcggacatgggctccagcctcaagtaccgatctggcctgtgcctcatcgtcgccgtcgtgctgatctgggtcatctctgccgaggtcacgcaggggatattcacaaagtacagacatccatttgcagttacttacttgggggcctcccttatggtcatatacctccctttgtcatttctaaaagattttatatacaattcgttgagaaggcattctagaaacactagtgcttccaaaattgcaagcaaatcttcctttggtggtagtgcccctttgaagaatggtgaatttcagaagatgttggaaatggaatcacagaaaactatagtggtaaattgccctgatgtgagcatccctgtagtggaagagacaaaaccactcatatgcggaatcactgaaatggatgatggccttttcaaggacaagcaactttccactaaggagattgcaacgtatggattgtatctttgccccttatggtttgtgacagagtatttatcgaatgcagcgcttgcaagaactagtgttgccagtaccacagtgctgtcttcaacttcaggactcttcactcttttcattggtgttttacttggccaagactccataaatgctgcgaaaattattgctgttttcattagcatggctggcgttgtaatgacaactgtgggccagacttgggcatctgatgaatcagaagcaggcaaatctggttttacacagaggactcttctaggtgatatgtttggtcttatgtcagcaatcgcctatggtctatttactgtgctgcttaaaaaattttgtggagaggaagagaaaaggttgatgtccaaaaactgtttggttatcttgggctttttacccttgttgctctatggtggattgtctggccattaaccgcactaggcgttgagccaaagttttcaatgccccactcagctaaagtggatgaagtggtggtggcaaatagcctaatcggaagtgtattatcagactacttctgggctctttctgttgtttggactactcccttggtggccactctaggcatgtctctcacaattccaatagcaatggttgctgatatgatcattcacggccgtcactattcagcagtatatattcttggttctgtccaggtattttcaggctttgttatcgcgaaccttgcagatcgcttttctcgttctctagggctatcatagtctcataaaacagaacaggcccttattagagcgtgcatcaggaagctccaaggtcgggttggttaggccaatacttcagaaaacctggatcgggagataccaggaattattttccctttgcttctttaaacatagtggaggtgaattttgccgtggtgaatagtgaaaggcagcagatgaagaagaaaacatatgttatagcaaccctttgcaactgtaaattctcttactacaaattgcgcgacagtgtagactgcggccgttctcggcccatgtcaacaggcttgctcgatttca

SEQ ID NO: 13980 - DNA, 609 bp, Zea mays
  Clone ID: LIB148-003-B8_FLI
gtgaagcggaaggagcatagggaggagggcaacgagggcgacgggttctacggcggcataaggaagctccgcggcaaggatgacatctccaagtggaggcagctgtggccaacagacgtcctggagtaagcaggagccgcatcccttctcacaccgagattgatccatcgctcaaatgacacgcctttctttcatcatattgaccaaattcgtcgtctctgtcgcgctgttgtaaacgggttagcagaagaacacacagggtgacaacaaatccttgttcggttatttctaatacatatggattggatgagattggaaaaaattaagaagaagtttaacttgtttgcgattcaaacacatccaatctcattcaattcacatggattgagagctaaccgaacaagcctgtagttggacaagggtgtaacacttatttgtcaggcgtaccgggcacagaccgcttcctatttgttcgtggggatgtaactgtaagccttgtgacccctaagcagtctgcgtcttgtgcctgctgctgtagcggtagagcagagagagagatcaaatgtaaattacattttttagctcaaattcacgacaaattggttgtcc

SEQ ID NO: 13981 - DNA, 721 bp, Zea mays
  Clone ID: LIB148-003-C10_FLI
gaaatctcgccctcgttgcggtcgtccacatccttttctctcctcctcgccggcccaacctgattgttcttcaaccaagaggaagaaaggaaggaagggaccggaagcatcagccatgtcgaactcggcgtcgggaatggccgtctgtgatgaatgcaagctcaagttccaggagctcaaggcaaagaggagcttccgcttcatcgtgttcaagatcaacgagaacgtgcagcaggtggtggtggacaggctgggggggccaggagagagctacgacgccttcacggcctgcttccccgccaacgagtgccgctacgccgtgttcgattttgacttcgtcactgacgagaactgccagaagagcaagatcttctttatctcttgggccccggatacatcgagggtgagaagcaagatgctgtacgcgagctccaaggaccggttcaagagggagctggatggcattcaggtggagctacaagcaaccgacccgagcgaaatgagcatggacatcgtcaagtcgcgagccctctgaaacagccccggccgctgcacctgcacgctgcaggggcgcatcggctcctgcatgcccgtgggtcgtcgaatccttgcttgtgtgttgggaacggtcttgtgttttcgtgtccttgttttcctggaagcaaaagccctgcattctgtatgagactgtatgccattttccatctttttctctccccat

SEQ ID NO: 13982 - DNA, 815 bp, Zea mays
  Clone ID: LIB148-003-C6_FLI
gttcctcgcaatagagagatctatcgatcgagctttcgttatcctcctcttacattacaggtcatagctaagcaggtctgacaggatgtcgtggcagacatacgtcgatgagcacctcatgtgcgagatcgagggccaccacctgacctccgctgccatagtcggccacgacggcgccgtttgggcccagagcaccgcattcccacagttcaagacagaggagatgaccaacatcatgaaggacttcgacgagcccgggttcctggccccgaccggcctcttcctcggccccaccaagtacatggtcatccaaggcgagcccggcgctgtcatccgcgggaagaagggatctggaggcataactgtgaagaagacagggcaagcgatggtggtcggcatctacgacgagcccatgacccccggccagtgcaacatggtggtcgagaggctcggcgactacctcgtagagcaaggcctgtgaatggattcatttaacctcgctcgctcgcttgtccatggttcgagcatccagcagcaacgataccaacatcagcattatttaattggtagcctcctctagctacgcacgcattttagtcccctacacgcccttggattgtgcgtggctctgttaatcatctctcatccttcgtctgccatttctcccctgcccgtcgccgatcaccagagatttttgttccttgttggtaccatgcattttggcaaataattttgtaattccacccccaaattaaagtttggttgtcgtatggtttgtaaacccagaacaatatatatatgtgtgtgattgaact

SEQ ID NO: 13983 - DNA, 1245 bp, Zea mays
  Clone ID: LIB148-004-C2_FLI
aaagctctcttcctcctcctcctcctctcgaattccgtctcttgtccctgtcgtcctcgcccggtttccccggtttttgagaggggaaagaggaggcggaggagagggatggggagggacgagaggttcccggtgtgggaggccgcgctcggcgccggaatcgccgccgccttcgccgctggactcgtcggtgtctacctttccatgccggactccgactacagcttcctcaagttgccacgtaatctcgaggaactccaaatcctcactggccaccttgagaactatactagtgactacaccctacaggtgttggtaggttattgcgctgtgtacatcttcatgcagaccttcatgatcccagggacaatattcatgtcactgcttgctggtgctctgtttgggcaactgcgtggccttgcgctggtggtctttgctgccactgcaggtgcttcttcgtgctatttcctgtcgaagatgattgggaagccactggtgttcacactgtggccagataagctcagcttcttccagagacaggttgctaaaagaagagagaagttgttgaattacatgcttttcctcagggtgaccccaacattgccaaataccttcatcaacttagcttcacccatagtagatgtcccctaccatatattcttactgggaactctcattggtcttatcccagctgcttatgtgactgtcagggctggaattgctcttggagagttaacttcgctgagtgacctttacgacacccagtcgatagcactgctattcctgatcggtgttgtttcagtcacaccagcattgctgggcaaggatgaggcacaagagaaaccaccagaaatggcggtaggcgcgtcatgatcaccaaagcaccgagcggtgtccacgtcacctgtatatatgtcaacatccagcatgcagtggcttcattagttcggatcaacgggcccttgtggctggatgataaaaatggttcgcatggccacacagcttggcggtacctcggcctaaactccctccactgctggcctacagaggcgcctgtgttgccatcatcagaacatgattcggtagccattcaccacattattaatgaatgaacctgggaagcagaattgcctgtagacgagctgctctgatgtgtaaacgagtagcgctgttcggataggacaggcatttagtccaatccctgtatatattaaccagattcattcaatccatattcagtggttc

SEQ ID NO: 13984 - DNA, 1872 bp, Zea mays
  Clone ID: LIB148-004-C4_FLI
ctcggttcggccacgccccaccagccagccagccagggacccgtcgctgccctctggcgatgagggatattacgggtctgccctgaccaccgcccacgcgcagccaggggtagaaacgaccgcgtcaccgtatttgacccctcaccgtcccacaccagtgtcggcgagtccctcctgtgcctcgtcctccccctttcccctccgagtccagcccggcgccacccactcagccgcggatccgaggcgcagatccgatccggcgatggcgtccacggcggcgaggcggctgcgggagctgcaggcgcagacggggaacaagacctgcgtggactgcgcgcagcggaacccgcagtgggcgagcgtctcctatggggtgttcatgtgcctcgagtgctcgggcaagcaccggggcctcggcgtgcacatcagcttcgtgcgctcggtcaccatggactcctggaccgaggcgcagctccgcaagatggaggccggtggcaacgaccgactcaacgccttcctcacagctcgcggcgttcctaaggagacgccccacgtcgccaagtacaactccaacgccgcagccgcctaccgcgaccgcatcgccgcgctcgctgagggaaagccgtggactgacccgcccgtggtcaaggagacgcccggatctggcgcccccgcccccgctaggaagccgcccgtgcacacatctgccgcctccggcggcggcgggtgggacgactgggacgacgattttcggccggacatgaggcggaatcagtcggttggatcgttcgccgccgcgggtgcgcagtcagggaggcagccgccgaggtccaaatcaacacaggacatgtacacgaggcagcaactggaggcgtcggcggctaataaggaggactttttcgccaggaggatggcggagaacgagtccaagcctgacgggatcccgccatcccagggcggcaagtacgttgggttcggatccagcccaccgccgtcggctaacaggaacggcggtgctgcccagggcgatgtcatgcaggttgtctctcagggatttggacgcctttcattagttgcagcatctgctgcccagtctgctgccagtgctgtccaagttggcacaaaagaaatccaatcaaagatgagggatgggggctatgaccagaaggtgaatgaaactgtcagtgttgttgccaataaaactgcagagattggaagcaggacttgggggatcatgagaggagttatggcgctggcctcacaaaaggtagaggaatatgccaaggaaggaggagtgggtggctggggagaggattggcaacacagcgagcagaaaagtgagccttaccaaaggtttgagcatgagaccaacggcaacagttggaattcctcccaaaattcttcatcgaagaacaattccagttcttgggacgactgggacgacccaggcaagaaagatgagcctgcgaaaccgcaccagagcagtgactcctgggctggctgggatgatgggaaggatgatggttttgatagccctagttacaacaatcacagcacctccaacaaggggagcaaccaaaacgggacatccggtggcacattttggacagaaggcggcttccgctgaaaccagtctcttttccatagagctatactttcagagttgttacatgccaggaaacgtgagggtccagtggttggtattatttgggatacttaaacagtcgggtgaaagggtttgtgtgttttgtaccatgtctacaactgttattatatctagtgagatatatttctgtggtcagatgccattcaacactgcccaaatgactaagaaatgtcgatttgaaactgtaatttactcgactttgtcgc

SEQ ID NO: 13985 - DNA, 799 bp, Zea mays
  Clone ID: LIB148-004-C7_FLI
aataaactatggggcaagcctacccacggcttgtcctcctcgccctcgtggcgttgttgtctgccggcctcttcccgcaggcgttagggaacggcaagggcaaggtgcatggcggcggtgccgtcaacccgctggttgccggcatctgctctcgcgccccattcccagaggtttgcacggccacagccgggcgccatgcatccaagtacccggtcatcgacaatttggccgtgctgaacatgcaggtggccgcgttcgccaagcgcacagcgcaggcgcggaagcacgtcgcggtggcggcccgcactattccaccgccgcaggcacaggccctcaggacctgcgacacgatgtacatgaacacgcaggacgccatcggcgcggcacagcgagccatcgcgttcaaggacacgggcaccgcgaagatcatgctgcagctcgctgtccaggacttcgactcgtgtgaccgtccgttcacccatgccggtgtccccaaccccatgggtaagttcgataaggagctcagccagatggccaacaactgcatgacgcttgcaaacatgatatgaatcatatgcggccggggacgactgtttggcatgttcttacactccagcatgaggtggcggcgcgccgcaagcagggaatgcttggacatgatgagcacttggttttcatttaagaattcattgaaattacgagttacgttgagcaaactctgtgtaattgtccctgacctgcatttattctgttgctcatgaaatgagggagatggccattgattgctagcggttgcttc

SEQ ID NO: 13986 - DNA, 682 bp, Zea mays
  Clone ID: LIB148-004-C9_FLI
ggctcctgcccagggcgtcgactccgaggcgtaccacatgcgcatcctcgccaccgcgctcggcagcgaggagaaagccaagcgggcgctgatctacagctacaaggccgccgctagcgggttcgccgccaagctcacgccggcgcaggtcgccgcgttgcagaagcatcctgacgttgtgcaggcgctgcctgacgtgaagtacacccttgaggacaggaaccacctcaactgaaccgagtgcggctttcaccaacacgatacatagctcggcactagtgccatctcatgttagcaagtgtgcatgtgcccacaccctagggtcagaatttatataagcatgctatgtgtgggctagtgatggtaatttagtctcttcataaagattgaatgctgtacccggagcgtacgtacatattactacccagcctgctgttcattgtttgatatcaccgtggatccacgagactgctgcacctgatgagaggctagagctagaagatggatttcagaacatgcgtgtgcccaaccaattgcacatttcaggctttcaaacgtgctgttcatctgtccttctgtttcccttttttttttcaagaaacgagagaacattgtaccttgagcaatatgtatttgagcacgaatttaccctgcgactgcaatagatgcgtacagttcttat

SEQ ID NO: 13987 - DNA, 990 bp, Zea mays
  Clone ID: LIB148-005-A1_FLI
gcggtgccacaacctctcctgctgtcgctgctggtcgccgtgctagcggtggccgccgatgtcgccaacgccggccacgccaagcccctaacgcctggcgggcgcgtggtacacgacaaccacggcaagttcacggccgggccgtggaaacccgcccacgcaaccttctacggcgggcgtgacgggtccggcaccacggcgggcgcgtgcgggtacaaggacacgcgcacgcaggggtacggcgtgcagacggtggccgtgagcactgtgctgttcggtgacggcgcggcctgcggagggtgctacgaggtgcggtgcgtggacagccctagcgggtgcaagcccgacgcggcagcgctggtggtgacggtgaccgacctgtgcccgcccaaggaccagtggtgcaagccaccgcgggagcacttcgacctcagcatgcccgcgttcctccagatcgcgcaagagaaggccggcatcgtgcccatctcctaccgcagggtggcgtgcgcgaagcagggcggcatccggtacaccatcaccgggaacaagtacttcaacatggtgacgatcaccaatgtgggcggcgccggcgacatcgcggcggtgtcggtgaaggggagcaagcgtgtcaagtggacggagatgaagcgcaactgggggcaagtgtggcagaccggggaggacctcacctgcgagtcgctgacgttccgggtgatgaccagcgaccaccgcaaggccacctcatggcacgttctccccgctgactggaagttcggtgtcacgtaccaggcatccaagaacttctaagtagccacttttcctcctcttcttcaacctgcatatgcccacaagcaaccatgcagatgataacatgcatcatgcatgcatattcattctttcgctcatgcattccgatatggtgccggagttaaaaaaatgtaaatcaatgtgcaaactcaaatgacatcttaaccagttgtgatcaatctc

SEQ ID NO: 13988 - DNA, 1267 bp, Zea mays
  Clone ID: LIB148-005-B3_FLI
ctccatctcaaagcatgtcatcctcagctggtagtccgagagtgacagaaaggaaagcagacagagacagccacgagcaccacgacgatgacgacgacggcgagaagggatcaggtttctttgacaaggtgaaggatttcatccaggacgtcggcgagaagatcgaagaggtggtaggcttcgggaagccgaccgccgacgtgaccggggtccacataccccacatcagcctggagaaggcggagctcgtcgtggacgtcctcatcacgaacccgaaccccgtcccgatccctctcgtcgacatcgagtacctgatcgagagcgagggaaggaagctcgtctccggcacgatccccgacgccgggaccatccacgcgcacggctcggagaccgtcaccatccccttcctgctggtctacgacgacatcaggagcacgtacagggagatcgagcccgggagcgtcatcccctacaaggtcagggtggtcctccacgtggacattcccgtggtcgggagggtctcgctcccgctggagaaggacggcgagatcccggtgccgtacaggcccgacgtcagcgtcgacaggatcaagttcgagcagttctccttcgaggagtccaccgcgacgcttcacctgagcctggacaacaggaacgccttcgacctggggctcaactccatggactacgaggtgtggctcggcggcgtgagcatcgcgtccgctgagctcagggaggctacggatatcaagagacgggaagtgaccaccatgaacttgcctatcagcttcaggcctaaggatttcggctctgctatgtgggatatgatcagggggaagggcactggttacaccatcaagggacacatcgatgtcgacactccgtttgggcacatgaaaataccaataagcaaagaaggggggacaacccgtctcaagaagggggatgatgacgacgacgatgacgacgacaaggactagaaacgaagggatgagctatttagctttcctgaagcagataacaaatatgaaatatttccctgccagtttagtttgctacatatttaatttaagctatcctaccagcttataatctctagttagctttacttcctccactatttggtacatctgttttatctttatttcttatcttggaattcatttatatccttcatagtgcttctttaatctgtgtatgaccatatatagtcatgcatcaaggacatcaaagatgagcaaatgagacaagattactctttataccc

SEQ ID NO: 13989 - DNA, 870 bp, Zea mays
  Clone ID: LIB148-005-D10_FLI
gtggacaataatggcgcctctcctagcgtcgatgctgctcgtcgggctcgccgcgggctccgaggaggaggaggacggcggcggcaaaaagaagccccacgtcaaccacggcaagtttaaggcggagccgtggacggacgggcacgcgacgtactacggcgggcgcgacgggttaactgacaccacggacagcggcgcgtgcggctacaagggcgagctggggaaagactacggcaccctgacggcggccgtgggcccgtcgctgtacaccaacggcaccgggtgcggcgcgtgctacgagctcaagggccccaagggcaccgtggtggtgacggccaccaacgaggccccgccgccggtgagcgggcagaagggcgagcactttgacctcaccataccggcgttcctcaagatcgccgaggagaaggccggcatcgtgcccatcacctaccgcaaggtggcgtgcgagaggaaaggcggcatccggtacacgatcacagggaaccagcactacagcgaggtgaaggtgaccaacgtgggcggcgccggggacgtggtggcgctgtgggtgaagggcaacaagcgcgtcaagtggacgccgatgaagcgcagctggggccagctctggaccacggaggtcgacctcaccggcgagtcgctgacgttccgcgtcatgaccgccgaccaccgcaaggctacctcctggcacgtcacgccccgcgactggcagttcggcaaaacgtaccaggccaccaagaacttctagggtcggatcggggagctgagccgcgcccttctttattcgtgtgattaacatattgtttattccatgattaacatattgttatattgactgggttgtttgtactg

SEQ ID NO: 13990 - DNA, 528 bp, Zea mays
  Clone ID: LIB148-005-E3_FLI
cagatcgcaacacacggaaccagaaagcaaacgcaaacaagaagcaaaccagcaatggcccgcgcctgcgtcttcctcgtcgtgctcctcctagccgccgtcgccatggcgccgttcgcgggcgcggcgcgcatcgacgtcgtcgagggcaggtccatggcgtccgcggacgcaccggaggccgccgccgacgctcccgctcctgctcctggccccgactcctcctcgaccccgtcgccggcaccctccagcagcagctcttccgactagccgcccggcagagatatctacggcgtccgatcagtctttggcgccacctatgacctatcggatcctgcaaagctatgtatgattctatggtataatgtgtggttgcggcaaacgcgcggaaataatgtgcttgcgtgattgtttttctctctctttttttgtttaataatgtaaaacaggcatacggcgatgttttaacatgtaaactgagatgttgttactctttctcaaagcgagtatgtagccccagtttccatc

SEQ ID NO: 13991 - DNA, 758 bp, Zea mays
  Clone ID: LIB148-005-H3_FLI
agcgaaccaagagagcagggtgtgggcgaagagaccccagccagtcgatcgttcaagaaaaataccagcttaccaacaacagcagcagcaagcccacccgttcgacgacatggcccgcctcggcgccggcgccgtgttggcgctcctagtggcggtcgcggcggtggccgcgttcctcgcggtgccggcctcggcgaagtccggggagctgagcgcgatggggttgctggcggcgaagggcggcagcggcgcgggcccgcagaagtgctcgggcgcggtgggcgagtgcgacgtggacgaggcggaggagctcgggctgagcggcggcggcctcggctccgacgacgcggtgcggcggacgctggcgcagcggaagccgaccaaccggtacatcagctacgcggcgctgcgcgcggaccaggtgccgtgcaacaagcgcggccggtcctactacagcaactgcgaggcgcagaaggccgccaacccctaccgccgcggctgctccgccatcacgcgctgcgcccgcaacatgaactgagcccagcgctagctgctgccggggcgcgccgtcgtcgccgagccggtcggtctggtctggtctggtctgcctgcctgccaggtcacgcagcctggctccaccgatcgcacaccatacattgacgtcgtcgtcgcggccgtacgtgccgttggacggtggaggaggcggtggcgctacgacagtatatatatacacaattacacatacacaccccaaaaag

SEQ ID NO: 13992 - DNA, 2441 bp, Zea mays
  Clone ID: LIB148-005-H8_FLI
gttcgtccccgcgtggagaaggagagagagaaacaggggagcgcccccccactcctcttcgctgccaagaaaccaccattcctaacggatttctacccagtcttctttaggatttccgattcggttctccggtgagagggtgggaattttattttcctccgctgcaaccggtgcaaacatttcgaatccctccattgcattcctctccgtgcaatcggccattcatatgttccttggctgcattgaggcatcggtacgcgaattttgatgtgagctgaccagacatggctgcgaaagacggctcgggatcacaggatctgggggggcacacgttctggcccatgctgtcctacgcttgcggcgagctgtgtgtgatcgtactgctctacgtgtctgccctggcgtcctatgcggccacgaggctggcgcgcgtctgcgggctccggccgccctgcatcctgtgcgcgaggctggaccacgccctccacgggaagccatggttctcttcggacttggtctgtgccgcgcatcggtctgagatctcgtctctggctcactgcaagacccatgaccagcttgttgcatgctccggcgatctctctcggcctacatcggccaggtcaagaaggttgtgttcttgttcggatccactcaagaatgctcgcggcgcgcagaagcattctgaagcagccaatgctgtggagtgttgggatagcagtgtacctgcagatcatccaaatgagaagacttttgtggtgggtattgaggaagtccatgaatcagatggttcgccaggctcgcatggacaatctacaaaggacagcgccccttctgcgaacggtggtggggcagcaaagagcaactacatatcgcccgcaccaacacgcatcgctgtcgaccgcaacggcagtgtgaagaatgcttccgtcgctagggccaacttgacatctcctcggccatcagagatcatctctgccagggacagcaattccacgacccagcaagaagtgaaggcgctcctctctcagatgtcatctgtgcggggcctcgatggttcttccagtgaaggatctcctagccccggtaccagcgctccgaacgaagagagcaaccctgcggcagcgagcaagaggccgtatctcgagaggaactactccgtgctggaaccttcagaagggagccagctcgccgacgacgtggaaggggaaagctctctcgagaacgtgaagaaacagcttgagctcaacaagaaggcaatggccgctctttacaaggagcttgaggaagaacggagcgcttcggcggtcgcggctagccagacgatggccatgatcaataggctgcaggaggagaaggctgcaatgcagatggaggctctgcagtacctgaggatgatggaacagcaggctgaccacgaccacctggcgattcaggacctgcacgatttgcttacggagagggagaaagagttgcttgacttggacgctgagctcgcgcactgcaggaggctcctgcagaacgatccgttcaacggcgacggacgtaataatggcgctgacacagtgaacacaacgattgacggcagaaatccggcggcgatcgaatgcttggatggcgcggaccttgtggggagcgccatgtcgcttttcgaagacgagaaggcgttcattttggagtccttgagcagactggaggaaaaccttggcattttcacaaacaggcttgcttccggtgacgccagaggtagtcaagaagacgtgctgtttgaagagcatgagcatacaacagctgatgggtctccttccaacggtgacaagttgagcggcgtagcgaatcttaaggctgggatttctctgctcaatataagactgagggcacttgaagacgaccaggagtttctcaagcaggtgttgagttccctccaatgcggtagtgatggactgcagtgtatacaggagataagcggccatctagcagagttgcgaagagttgtaactcgctaaggaaaatggttttgccccgagtccacactgttaggtcatcgtgaggtcttctcatgcagcagactaacgagggtgcttccagtgagtgcccacaatcccatctatctgaagatggatgccgttgcaggaaatacccatgctcttcacttctgatcgggctcaacagcagaccaaaattttccatctcttgcacttgagttcctcatcgacatttgcagactactgaagcagatggaactctaaaagaagtgctgaaagagacgaaccatctcttgtatgtgatatggtggttgttgagaaagtaggagcaagcctgtaactgtagatgtaaccaaccttgatggttcctgccaaggaggagttaaattgtacatgatatatgcagttgacgtaaagtcagcgaatatctccttattctgggatgcaaggtgtcatgac

SEQ ID NO: 13993 - DNA, 610 bp, Zea mays
  Clone ID: LIB148-006-A3_FLI
atcatcatctccatccaccgcccgccgtagctagctagatctgctgccatggcttcctttggcgaggctcccggcggtgacgccggcagcggcgagaagatcttccgcaccaagtgcgcgcagtgccataccgtggagcgaggtggcgcgcacaggcagggacccaacctgcacggcctcttcggtcgtcagtcaggcaccaccctcggctatgcctactccacggccaacaagaacatggccgtcgtctgggaggagggcaccctgtacgactacctcttcaaccccaagaagtacattccaggcacaaagatggtcttcccggggctcaagaagcctaaggagcgaaccgatctcatcgcctacctcaaggaatccacggcttaacttcttctagctatcttaattaattcaccatgcacgcacgcacatcaataaatcaaggtaggaatctacttttccatttcttttaccttttaagtacatccatctatatattacatcggtctctgtgagttgattccacttttgttgttctttgctacggtttttatatattatataaattgatattgagatatttattcaaatataattattgtttattttt

SEQ ID NO: 13994 - DNA, 459 bp, Zea mays
  Clone ID: LIB148-006-B12_FLI
ttccttggaccactatatccaggagcgacgaagtgatccacccgccagccatggagatgaagaaggtcctctgcgccgccctcgtcgccgccgcctcggccaccgccgtgctggcctcggtcgcctccgaggcgccctccgaggcgcccgccggcgcggccggtggtgcggctggccctagcgcaagcggcgccgccgccgccgccgtgcccgccgccggggcgctcgtcgcctccttcctcgcctactacctccactgagcgacgacgcgcggggcggcaacgttgggatgcatcgtgtttggttcatccgattaattaattgttttttttatttacgtggtttgcgattggttaattgtttgtttgttcgttcgtttcgtggtcgtgtgaattgtcgaagggtttgttctgtaatcgtgactcgatgctaatattattatgatcccaattttatttt

SEQ ID NO: 13995 - DNA, 341 bp, Zea mays
  Clone ID: LIB148-006-D4_FLI
cgcctccaaggtggccgtcaacgacgtcgtcttcaagaacatccacggcacctccaacacgccggaggccatcacgctcaactgcgccaacaacctgccatgccagggcgtgcagctcgtcaacgtcgacatcaagtacaatggatccggcaacaagaccatggccgtctgcaagaatgccatcggcaagtccatcggcttggcaaaggagctggcgtgcatttgaaccaattgactaacatgcatatattatgtactaggtttgtgcccgtgcgttgacacggaagttaaaaattagtataaaacaaagatacataacgataaatatcactatgacattc

SEQ ID NO: 13996 - DNA, 696 bp, Zea mays
  Clone ID: LIB148-006-F6_FLI
ctccttcgtcggcacggaggagtacgtggcgccagagatggtgcgcggcgagggccacggcttcgccgtcgactggtgggccgtcggcgtgctcgcctacgagatggcgttcgggcggacgccgttcaagggccagaaccgcaaggagacgttccggaacgtgctgcagcaggagctcgagttcccgggggacacccggtggcggacgccggagctcgcggatctcatctcgggcctgctggagcgggacccgaggaggaggctcgggtacgccggcggcgccgacgaggtccgggcccacccgttcttcgccggcgtcgcgtgggacatgctcacggaggtgtccaggccgccttacatcccgccgccggccgacgaggacctcgcggacgtcgaagggttcgacgtgaggggccacttcaaggaccttcaccagccgccgcctcccaagtccgcgtcggagtcgtcctcgtccgagttctcgacggagttctgactgtgagctcgggctagcttcttttgcgctttggtcctcggtagattactatattgtaaccagagggtcgagggtgtctgtactgtacatacatggagacggggatggtgctgtaaattcgacgtagagttggtgtggttgtgcaaacattttgggaagcgcgagggctcgccggcgcactgtgctcgaggcattttctt

SEQ ID NO: 13997 - DNA, 651 bp, Zea mays
  Clone ID: LIB148-007-B2_FLI
tgccgccccgtcctcctctcgctccttttcctcctcgtcctcctcaccgcgccggcgttcggctcgacgctcctccccgccgcagccggcggccccggcccggcgggcaccagcgtcccggtcccggtcccggtcccggctcagccgagcgcgtacgagatgctggaggggttcgggttcccgaggggcatcctgccggagggcgtgaccgggtacacgtaccgcgcgtcggacggcgcgttcgaggtgttcatggacgacggggactgcgagttcgaggtggacggcggctaccgcctcacgtaccgccgcagggtccacggcaacgtcgcgggcggcagcatccggaacctcggcggcgtctccgtcaggatgttcctcttcgactggagcatcgaccgcgtcgccgtggaggacgcggcccgcctcgtgttctacgtcggcccgctctcgcaggagttccccgccgataacttcgggcagtcgccgcggtgccgccgtcgccgccgcggtagcgggaacggcgtgggcgtggcggcggtgtagcaggggacggaggccggacgagagaatcagacgatggagatcgttgattcaattgtacgtgtacagattcaacttcgtgtttttgcaatgagacgcttcaattat

SEQ ID NO: 13998 - DNA, 1248 bp, Zea mays
  Clone ID: LIB148-007-C3_FLI
ggcgccgaggaggacagctacggcccgccggccaaccaggcggttccaccacccaatgccaacgcccccggcaacagaggcgggccgagaggaccgggggcgccgagggtcggcggccccgccaagcccgtcagcattgacgtgcccgccatacccttcgacgagctcaaaaggatcaccaacaacttcagcgaccgcgccctcatcggcgagggctcctacggccgcgtctacaacgccacgctcagcgacggccgcgccgccgtcatcaagaagctcgacaccagcgcctcgcaggactccgacaccgacttcgccgcgcagatcgcgatggtctccaagctgaagaacgagtatttcctggagctcctagggtactgcttggaagacggcaaccgaatgctaacctatcagttcgccacaatgggttctttgcacaacatactacacgggaagaagggagtccagggcgcggagcccggtcccgtcctcaactgggctcagcgagtcaagatagcctacggggcagcgagagggctggagtacctgcacgagaaggtccagccgtccatcgtccaccgggacatccgctccagcaacgtcctcatcttcgacgacttcagctccaagatcgccgatttcaacctcaccagccagggcaccgacaccgccgcgcggttgcactccactcgcgtgctagggactttcggataccacgccccagaatacgctatgacaggccagatcaaccaaaagagcgacgtctacagcttcggcgtgattcttctagagttgctgaccggaaggaagccggtcgaccacacaatgccgaaaggccagcagagtcttgttacttgggccactccgaggttgagtgaagacaaagtgaagcagtgtgttgatccaaagctcgacagtgactaccctccgaaggccgttgcgaagctggcagcagttgcggcgttgtgcgttcagtacgaatccgacttccggccaaacatgactatcgtggtgaaggcgatcacgcctcttctgaacgcgcccaaaccggcagctccagccgcgccacagtcctgatcaacccagacgacagaattagcctggacctggacacggttcccctgatctgttcctcattgcagatgtatgctaaggaaccacgcatccttgctccatccatccattgcatacaggggaattttgtaaaatgttaatccggtactctgaattcgtgtgcttttccttgtt

SEQ ID NO: 13999 - DNA, 611 bp, Zea mays
  Clone ID: LIB148-007-G7_FLI
gatcatcatctccatccaccgcccgccgtagctagctagatctgctgccatggcttcctttggcgaggctcccggcggtgacgccggcagcggcgagaagatcttccgcaccaagtgcgcgcagtgccataccgtggagcgaggtggcgcgcacaggcagggacccaacctgcacggcctcttcggtcgtcagtcaggcaccaccctcggctatgcctactccacggccaacaagaacatggccgtcgtctgggaggagggcaccctgtacgactacctcttcaaccccaagaagtacattccaggcacaaagatggtcttcccggggctcaagaagcctaaggagcgaaccgatctcatcgcctacctcaaggaatccacggcttaacttcttctagctatcttaattaattcaccatgcacgcacgcacatcaataaatcaaggtaggaatctacttttccatttcttttaccttttaagtacatccatctatatattacatcggtctctgtgagttgattccacttttgttgttctttgctacggtttttatatattatataaattgatattgagatatttattcaaatataattattgtttattttt

SEQ ID NO: 14000 - DNA, 598 bp, Zea mays
  Clone ID: LIB148-007-H11_FLI
ccggtccttcctgcggcagaaggacaacatgctggtgctgttcgaggaggagttcgggcggccggacgcgatcatgatcctgacggtgaagcgcgacaacatctgcaccttcatctcggagcggaacccggcgcacatcatgtcgtgggagcgcaaggacagccagatcacggcgaaggcgaacgccgacgacctcagggcccgggcggcgctggcgtgcccgcccaagaagctcatccagcaggtggtgttcgcgagctacggaaaccccgcgggcatctgcggcaactacaccgtcggcagctgccacacgccacgcgccaaggaggtggtggagaaggcgtgcctcggcaagcgcgtctgcacgctgcccgtggccgccgacgtctacggcggcgacgccaactgctccggcaccaccgccacgctcgccgtgcaggccaagtgctccaagaggtcgcccagcgccgcgcagtaattcagtcgctcgtcgggacatactattcgtggctgggcggggaacacattgtcggtactgtcattgtatggctgggcggggagcatctaacaatatatttatagattgttcattttggtg

SEQ ID NO: 14001 - DNA, 691 bp, Zea mays
  Clone ID: LIB148-008-F5_FLI
gctggtcctcgaggccatggattgcgtcctcatcgagatcttccaggtgtacggcgagatatgcaccggcatcgcgcggttcctcatcagcggcgttcagggcggaccggcgatgctgacgacccgcaaggaggtcatggcggcaggggtgaaggtgctctggcgggcggcggagcagagcgctcagctctcgtcctacttcgacctgtgccgcgagctcggcgtggccaacgcgcgcaagctcccgacatcattagttcgcttgaaagacgacgacgtccgggacctcgagcggatcctcatgagtgagagtgacatccagaacgaaagcggtgaggaggcggaggcggaggcagaggcagaggcagaggcggcggcggacgtgaaggacgcggggtcaacgtcgacgaacactgcggtggtgatggcaacaacggaatgggtgacattcgacgaggagagaccaagcgctggcgttgtcgcctaccacggcgggggtcacgtctctaatcactggaaccccttcgtcgctgcgccgttagacggtagggaaggcggaaacctgatcgagcttttctagttttctaaccgaacgcaatattgttgggttaaaccataaccttttgctcttttgcgcccgcccgattgtacactatgctctttgtaaatagtaacgtgactcgtttggtcc

SEQ ID NO: 14002 - DNA, 728 bp, Zea mays
  Clone ID: LIB148-009-A3_FLI
cgcattcccctgcctcgcccttccccctcctatttaccgcccgcgtcgccccccgccgcacgccttcccacccccgcgcctgcctctgcctgcctgctccccgacgccggggggccccacaacgatccggccccggccccgcgcggtcacagcaagccgggacatggcgcgcggcggcatcgcccgcctactcgccacgctcctcctcttcctcctgctcgccacgcccctcgcagacggagcttccgaggcagaggcggcgggcctcgcgcagggcgcgtccgaggcggcggcgccggacgcgggcgcggacgcgcagcagcagcacctcctgccgcggcccctcgtcatcgagctcccgtcgtcgcgggccgaggacgaggacgagcccggcgccgacgccgtgccgccggacgtgcgctgcgccagctggcggctggcggcggaggccaacaacctcgcgccgtggagggcggtgccgccggagtgcgcgccgcacgtgcgggactacgtcaccggcgtcgcctaccgctccgacctcgacctcgtggcgcgggagtccgccgcctacgcgcgcgccgctgcgccgctcggcgccgacgggcgcgacgcctgggtcttcgacgtcgacgagaccctgctctccaacctcccgtactacgccgagcacggctacggggctgagttgttcgaccaccacaagtttgacgagtgggtggagaggggcg

SEQ ID NO: 14003 - DNA, 1214 bp, Zea mays
  Clone ID: LIB148-009-B5_FLI
tgcaacctccgtggacgaagcattcgcctcgccttgatctccaaccccttccttccttgcttaggagagagagggaggagaggagaggaggaagaagatggagagggcggccccagtgaggagttcccacacctccacggccggcctactcgcgtggcctcaacccgatggcgccgcgtcgcaggcaccacgtcggcctaaccagccgacggaggaattcaggaaggtggtgttcggggggcaggtcaccgaggaggccgacggtctcaacaagacgaagatgaggacgacggcctccgcacccaagtcgaaggagacaacagggatcggcatgtttaaggccgagagcgccgccgccgccgtcacaactgcatcccgtgatcgccaggctagccagatcaccttttctcaggacgggaccattcctcccaggaagccaacttcagttgctggggtggcgaggcagcgcgaacttagccataccgttgagagttcgggggacggtaagatgaagcggcaggtgtccaatgcgaaatccaaggagctcagtggtcacaacatctttgctgatcatgaagatccgagtcccaacaggtcaagcagctctgctgctgctctggcacatgtgaaaaatgcaaatgtgagctccttctcctttggaaaggccgacatggacagcacagtgaaaacagcaaagaagaaagggtccagcaacaagtctactgatctgatgaatggcaaggccatctccgagagggattcagcgcctgcagggaaacagcctctgaaccgcgcgaagccgaaaggattgagtggtagtagcatttttgcagacgggaaggcctcaacaactggtgatcatgcaggccgtcggacccggcagccacctggcggcgacagcagcatcttgctgggctagcgtgcatatggatattgtcctatgccgccacacgggtggttggtccgtccgtctgcggccatgttttcctgatcaggcgatgagtcccatctcagatgatctggttcacttctggcgtgtgtatgggtttgtgtctgtgttggttgtgacatgtccaatggaacaaccctatccctactgcgtgtggtgccgttttgttgtgtagtagtacaacggatgacatgtggtaccgtttcgttgtgtgtacgtggatatacatatgtgtgtttggttattaaatactccctccgttttt

SEQ ID NO: 14004 - DNA, 1029 bp, Zea mays
  Clone ID: LIB148-009-D6_FLI
cgatgggatccctcgctaataacatcatggtcgtgggcgccgtccttgcggcgctcgtcgccggcgggtcgtgcgggcccccgaaggtgccacccggccccaacatcaccaccaactacaacggcaagtggctcaccgctagggccacctggtacggtcagcccaacggtgccggcgctcctgacaacggcggtgcgtgcgggatcaagaacgtgaacctgccaccctacagcggcatgacggcgtgcggcaacgtccccatcttcaaggacggcaagggctgcggctcatgctacgaggtgagatgcaaggaaaaacctgagtgctcgggcaatccagtcacggtgtacatcactgacatgaactacgagcctatcgctccctaccacttcgacttgagcggcaaggccttcggctccctggcaaagcccgggctcaacgacaagattcgccactgcggcatcatggacgtcgagttcagaagggtgcgatgcaagtaccccgccgggcagaagatcgtgttccacatcgagaagggctgcaaccccaactacctggccgtgctggtgaagtatgtggcggacgacggcgacatcgtgctgatggaaatccaggacaagttgtcggctgagtggaagcccatgaagctctcttggggcgccatctggaggatggacactgccaaggcgctcaagggccccttctccatccgcctcaccagcgagtccggcaagaaggtcatcgccaaagacgtcatcccggcgaactggagacccgatgccgtctacacttccaacgtccaattctactagactttgaattcccttcgattcatccggcacagcgggctatggaccttcagcagcaagctaattaagttggcagcatgcaccgctaaccttatatactactgagacttccaaattctagtatatgtaatccttttgttcgggttcatgatcgaattccaaagagtggaaaacaagcaaaaggttaaatatacatgccatttttggaggcatttttttc

SEQ ID NO: 14005 - DNA, 607 bp, Zea mays
  Clone ID: LIB148-009-F7_FLI
cacggggtggtacaagggcatcgcccgggagttcgtggacgcccacaacgagctccgcgcgcgctacggcgtgccgcccatgaagtgggacaggaagctggcgcggcaggcgcggcgctggtccaaccgcatgcgcaaggactgcgagctcgtccacagcggccacaagtacggcgagagcctgttcaggagccacgacgactggaacgccaccgccaaggaggccgtcttctggtggggcaaggaggagtccatctacgacaggaacacggagcagtgcacaggcggcagggcgtacaaggagtgcggccacttcgcgctcatggtcggcaagaggagcaccaaggtgggatgcgcacgagcagagtgcttcaagggaggcgtcttcatcacatgcaactactatgccacggacctcaagaagaagaacaagaagaagaagaagagcaccaccaactgaactcatgatttccagctagcttcttccagttttgagccaagcatggatcttgtacaattaattgatctcagtataccttcaaaattatcatcactacaatatataattcgcccaagcatagatatataataatcaatcagttcatcc

SEQ ID NO: 14006 - DNA, 978 bp, Zea mays
  Clone ID: LIB148-009-G5_FLI
gccttaccctcgaagccgaaggcctcgtgccttctcttcctccctggcatggaggaagtagctgtttcgcctatgatcgttgccgccgtagtgctggacaacaatggcgctgacgcggtctcctgcactgccatccctagcgtaacaataagcctagaggagaaagaaaatatcaatggggatgttcccacgatcacctcggccgcaagcaacgaggaggaggcgttgttcagtgtcggagaatccaccaaggacgatggccatcgcttgacgatggaatgctccactcccgtctcctccagtagcccttccactcgcaagaagcgcggggcgttcagcctcttcagggcgatgttcctgtccttcggccggagcgacgacagcatgaagaagacagacgacgacaccacgagccccaagaagagagccatcgcggctgctgatgacgattgcaagcctgccggtgacgagtcaacgtcgtggaagcgcctcgtggacggtatgcgcccgctccgcctccgcgggcagctggagtactacccgccgccaccgccgccaccgccgctgggccacgccgatgtgtaccatgacgtgatcctcccgccgccgtcgcaggcacggttcggcttcgagatcaaggaggtgggcatgaccagccgctacgcgtccgctgaggatctgcaccagatggacagcgaccaggaagagggtgctgagggtggcgatgacggtgacagcagttgcccacacgccatcgacatgcaggcggaggagttcatcaccaagttctatgagcagttcaagtcagaatcgttcaacggccgtgcctccgagtgatccattgatccatccgcttgcggcatgtatgtaatcgttctgatcttacaccgaaattgcattcgtgtcagagacgactctacccaatatggatcaggaagaaatgtatcagtgatcgcatcgataaacacagtttgtctg

SEQ ID NO: 14007 - DNA, 948 bp, Zea mays
  Clone ID: LIB148-010-B3_FLI
ccaagatctgcgtggacagcctcgccgccaagccggagagccagaaggcgacgccgcgcaagctggcggagctgttcgtgaacatcgcggccgagaagggatccgggatggccaccttcgtgcaccgcaagtacagcgacaaggaggacagcgacatattcaagtgctacgacagctgctccgacgacgtggaggaggccgtcgcccacctcaacggcctcgtccgggagcccaccgacgccaagttcctcgagctcaagtcgtggctctcctccacgctcggcggcacctccacctgcgaggacgcctgcaaggacctgcccaagaccagcgacaaggacgacgtcgtcaacttcagcctcgacttcgagaagctgcagcgcgtcacgctcgacctcatcaccgaggcgtccggcaccatgtccgcaggcatcgccctgccaccctccaacgccggagcgccctcctacggcgcggcggcgccttccgggggctccgccgatgcccccgccggcgcctccgagggccctgcgagcgccagcggcccgtctggtgacgacgcgccggcgtccggtgctggtgccagcgcgtcggctgctgatgctccggcggcggcggcctcatccggtccctctagcgcaccagcgccatcgtcgtcgtctgagtcctccgccgcaccaggcccatcttctgatggcacctccagcgccccagcaccatcgtccggcgacgattctgattccgacgacgatgggtcagcttgagcctgaccgatgacgcgggtttgggttaccggtgccactcaaaatacgatcccttttattgtaaaagagggatcccttctttccattgcattcttgcaatccgtttcttcttgactatgtttcttcttgactatgtaacgataataacatgagaaaattatctgaatgacattatattttttct

SEQ ID NO: 14008 - DNA, 1639 bp, Zea mays
  Clone ID: LIB148-010-C10_FLI
caagcattgaagccgtagccgccgccgccggacgagacaggttgaggcggggcggcaatggccgccggggaccttgaggtgctcaccgcgctcgacaccgcgaagacgcaatggtaccacttcaccgccatcgtggtcgccggcatggggttcttcaccgacgcctacgacctcttctgcatctccctcgtgactaagctcctcggccgcatctactacaccgtggaggggtccgcgacgcccggcaccctcccgccgcacgtgtccgcgtccgtcaacggcgtggccttcgtgggcacgctgtcagggcagctcttcttcggctggctgggcgacaagctcgggcgcaagaaggtctatggcatgacgctcatgctcatggtcctctgttccgtcgcgtcggggctctcgttcggccacaccccggcgtccgtcatggcgacgctgtgcttcttccgcttctggctcgggttcggcatcggcggcgactacccgctgtcggcgaccatcatgtccgagtacgccaacaagaagacgcgcggcgcgttcatcgccgcggtgttcgcgatgcagggcttcggcatcatggccggcggcctcgtggccatcgtcgtgtccgcgtcgttcaaggccaggttcccagccccggcctacgccgtcgaccccgccgggtccacgccgccgcaggccgacttcgtgtggcggatcatcctgatgctgggcgcgatgcccgcggcgctcacctactactggcgcaccaagatgcccgagacggcgcggtacacggcgctggttgccaagaacgccaagcaggccgcggctgacatgtccaaggtgctgcaggtggagatctcagccggcgccgccgaggaggacgccgtggctgcgactgcgactgcgcctgcgccggcgtcggcgtcggcgtcctttgggctcttctccggggagttcctccgccggcacgggctgcacctcctgggcacgtcctcgacgtggttcctgctggacatcgccttctactcgcagaacctgttccagaaggacatcttcagcgcggtggggtggatccccaaggcggcgacgatgaacgcgctggaggagctgttcagcatcgcgcgggcgcagtccctgatcgcgctgtgcggcacggtgcccggctactggttcacggtggcgctgatcgacgtgttggggcggttcgcgatccaggtgacggggttcctgatgatgacggtgttcatgctggggctggccgtgccgtacgagcactggacgacgccggggcaccacatcggcttcatcgtcatgtacggcctcaccttcttcttcgccaacttcgggcccaacgcgaccacgttcatcgtgcccgcggagatcttcccggccaggctgcggtcgacgtgccacggcatctcggcggcgtcggggaagctgggcgccatcatcggctccttcgggttcctgtacctggcgcaaaaccgggacccggccaagacggaccacgggtaccccgcgggcatcggcgtgcgcaactcgctgttcctcctcgccggctgcaacctgctgggcctggcattcacgttcctggtgccggagtccaagggcaaatccctggaggagatgtccggcgagaacgacg

SEQ ID NO: 14009 - DNA, 1858 bp, Zea mays
  Clone ID: LIB148-010-C6_FLI
atcgtcgactgctgctgcgttctgttccgttcggaagatgttcttggagagcttccgggtggagagcccgcgggtgaagtacggcgacggcgagatccagtcggagtaccgctacgacaccaccgaagtcgtcccgccggggaatggcggcggcgcggggtgggtggtgcgcccaaagtccgtcacctacaacttcaagaccagcaccaacgtcccaaagctgggggtgatgctcgtcggatggggcggcaacaacgggacgacgctcacggccggggtgatcgccaacagggaagggatttcgtgggagacgaaagagaaggttcacaaggccaactacttcggctccctgacccaggcttccaccatcagggtcggctcccacaacggggaggaggtctacgcgcctttcaagagcctcgtgcctatggttgaccccaactctatcgtgtttggtggatgggacatcagcaagctgaacatggccgacgccatggccagggccaaggtcctagactttcacctccagaagcagctcaggccctacatggaatccatgctgccactccctggcattttcaacccagacttcgtcgccgcaaaccaaggtgcccgtgctgacaatgtcatcaagggcaccaagaaagagcaggtggagcagatcaagaaggacatcaaggagttcaaggaaaaaaacaaggtggacaaggtagtcgtgctgtggacggcgaacaccgagaggtacagcaacgtggttgcagggcttaacgacaccatggacaagctcctggcttcgttggacaagaacgaagcagagatctcgccatccaccttgtatgcgatagcctgtgtcctcgagggtgtcccgttcgtcaatggaagccctcagaacaccttcgtgcctgggctgatggagcttgccataaaaaagaattcggtgataggaggcgacgacttcaagagtgggcagaccaagatgaagtctgtgttggtcgatttcctcgtcggcgctgggattaagcccacctcaattgcaagctacaaccatctgggaaacaacgacggcatgaatctctctgccccacaagtcttccggtccaaagagatctccaagagcagcgtggtggacgacatggtcgctagcaatcccatcctctacaagcccggcgaacatccggatcacgtaatcgtgatcaagtacatcccctacgtgggtgacagcaagagggctatggacgagtatacctctgagatcttcatgggtggcaagaacaccatcgcgctgcacaacacctgcgaggactcgcttctcgccgcgcccatcatccttgacttggtgctcctagctgagctcagcactcggattcagctcaaggccgaagggcaggataagttccactccttccaccctgtcgccactattctgagctacctcagcaaggctcctcttgtacctcctggcacaccagtggtgaatgctctagccaagcagagggccatgctggaaaacatcttgcgggcctgcattggccttgcccctgagaacaacatgatgcttgagcacaagtgaagagtttcacgtcccttaattaactaccacaagataggatgaatggaaaaaggagggatcaagcgaaggtgtgggaataatcagtgactcctctgagcccaacgaagaaatgtcaggaggctacaggaaggagaagtgtaaggagagaagaccaagcatggatatatcctcttttcgaaggcaatctatctattctttttttgtagatttgactcgttttttgtactcgtgggacgagattgtgtactggctatatatccactgtatgcagcatgaaacctttatttg

SEQ ID NO: 14010 - DNA, 620 bp, Zea mays
  Clone ID: LIB148-011-A6_FLI
catccatcaaagaaacaagagcacacaaacaatacctctctagctcgccaccaacaatggcctctaggttctccatcatgctcgccacaacggcactggctacgttttttgtgattggttcgtgcaccaccccgctcaccttcaaggtcggcaaaggctccaagcctggccacctggtcctcacccccaacattgccaccatctccgaagtggagatcaaggagcacggtggcgatgacttctcctttgagctcaaggagggcccggccggcacctggacgcttgacacaaaggccccactcaagtaccccctctgcatccgctttgccatcaagtctggcggctaccgcatcgccgatgatgtcatccctgaaaattttaaggccgacaccacctacaagaccaccctcagcatctgatcatcctcttatgaggaataatattttgaaagagctcatctgatccatgtgccagcgagctaatatttaatttttgttctatggttattttatggcaccacaccacccaagaaataagttatgttacatgtcccttcgtgcaccttgttgtgttgggttaatacggttatataaattgaaatacaatatgtatttaatatt

SEQ ID NO: 14011 - DNA, 331 bp, Zea mays
  Clone ID: LIB148-011-F5_FLI
aggtggtccccgtgggctgggacggctggcagatcgccaagccggagagcagcggcatctactacggcgagttcaagtgctttggccccggcgctgacgccaagaagaagaagagggtggggtgggcgctggacctcaccgaggcgcaggccaagccattcgtcggcacacactacgtcctcggcgacacgtggatccagccaccgcccaagtagcgacgcatgccacacgatatatctatttgagtacgaagcaaaagcgagagacacgaatctctaatctctttactgatgagatgttttgcttatatatatatatagacgagctaatg

SEQ ID NO: 14012 - DNA, 724 bp, Zea mays
  Clone ID: LIB148-012-A11_FLI
cgatcgagcttaattgcgccactgctcgttatcctcctcttgcattgcattgcaggtcgtagttgagcagcagcaaccactgcacaggatgtcgtggcagacgtacgtcgatgagcacctcatgtgcgagatcgagggccaccacctgagctctgccgccatagtcggccacgacggcgccgtttgggcccagagcaccgcattcccacagttcaagccagaggagatgaccaacatcattaaggacttcgacgagcctgggtttctggccccgatcggcctcttccttggccccaccaagtacatggtcatccaaggcgagcccggcgctgtcatccgcgggaagaagggatctggaggcataactgtgaagaagaccggacaggcgctggtgatcggcatctacgacgagcccatgacccctggacagtgcaacatggtggttgagaggctcggtgactacctcgtagagcaaggcctgtgattgaatgcatccaaacaacgacaccaacgccaacattaattaattggtagtctccatgccctgggattgtgcgtggccgctccgttaaacaccacccatccttcgttcggcattttttcccccttgtttatataattttattgtatcgttttggcaaataattttgtgattcgaccccaaagtttggttgtcttacgagatttgtaaacctggaacaatatataatgtgattgaactgct

SEQ ID NO: 14013 - DNA, 1073 bp, Zea mays
  Clone ID: LIB148-012-B12_FLI
ctccatgggtctcctctcaaacaggattgggagggagagcctcaaggcgggggatcatatctactcctggagggcggcgtgggtctacgcgcatcacggaatatatgtgggcgatgataaggtgatccatttcacaagaggaagaggacaggaggtcggaacaggaactgtcgtcgatattattcttgtgagttccaccccaaaacgaagcaacacgccttgcccggtgtgcaccgacgaaaccagcgacagcagcacagagacgaacggcgtggtatcctcctgtctcagctgcttcctagctgggggtgctctctaccgtttcgagtacgcagtcaacccggcgctcttcctcgccaaagcgcgaggagggacgtgcacgctcgctccctctgaccctgacgacacggtggctcgccgcgccagatacctgctgagcaacggtttcaggtgctacaacctgttcaagagcaactgcgaggacttcgcgatatactgcaagactggccttcttgtcgctgagcagggcgttgtcgggcagagcgggcaggctatctccatcatcggtggacctctcgccgcggtggtctcgaccccattccgcttggttaccacgaacatctatgggatggcggtgatggccgtcggggtgtactgcgcgagcaggtatgcagctgatattggcaaccgccgtgatgtggtgaaaatggaagtcgaggacctgacggccggactggccagcggcaggatatgtgctgtggagaacatcgcccagctggtggctccggaggcagaaggcccggccgatgccacggccacggccacgctggctgcttaacggaccattgtgccattattgctgcgacagagatgtgcgtcagccaacatgtgtgctgttgttttggcttatttgtgttcagaatccacttaaactcggtcgaagtgagctttccattcggcaacgtctgtactctgtacgaatctcgatcgtgtatgtctttaaggattgtgttgtgtttcaaagataaaaaatgtgacctttcgaatttataaagaaaattggtgtttacagt

SEQ ID NO: 14014 - DNA, 2021 bp, Zea mays
  Clone ID: LIB148-012-B5_FLI
ccatgcacgcgcgcacaaggcacgcccagcaacacaaaagttccaaggcctccccttcctctagcagtggcgaggcaggaaggcaggccgggtgtcctgcctcccttgcgcgcgctctcacgacccatcccgtcgtgcgtcatcgagctccggcgggcgggccatgcacgcgtccagctagctcacacagcgccgtctcgaccggctgccggtgctccacccggcccgcgtccacatcacggcgggcgggcgcgcgcgtgaacggtttcctctccgcatgaccctgtgatggtcggtgggttcctgcggcgcggccacagcctcgacaggctcctgtcgaggaggcgccgggccgtttcgcccagcccctcgttctcgtcctcctcctccacgccgtcgtctccgcgtggcagcagcgtcaggagcggcatgatggcagaggacgacgacgacgcgcccaccaccgtggcggcgccaccgctgcagagacgggtgctgtccaggagccacggctcgcgggccactcccggccggtcccaggacctgccgccggtgccatcgaggaccgtccgcgacagtgggccgccttcagatttagatttgatgaaggataagttcgccaagctgctgctcggggaggacatgtccggcacgggcaaaggggtgtcctccgctctcgctctctccaacgccatcacaaatctggcggcctccatattcggggagcagcgccgcctcgagcccatgtccgcggagcggagggcgcggtggaacaaggagatcgactggctcctctcggtcgccgaccacatcgtcgaattcgctccctcgcagcaggtgtccgaggacggaacaaacatcgaggtgatgggcactcagcagcgcggggatctcctcgtcaacatccccgccttgcgaaaactcgacgcgatgctcctagagtatctggacagtttcggcgaggcccaggagttctggtacgtggcgaaggacgcggacgggggcgaggacgacgacgacagcacgtgcgacaaatggtggatcccgacggtgagggtccccgccgagggcctgtcggacgcgtccaggaagtggctccagcaccagaaggacctcgtggggcaagttctcaaggcggccatggccatcaacgccgacgtcatcgcggagatggagatccccgaggagtatatcgagtccctgccgaagaacggaaggtccattcttggagactccatgtacaagatcataaccgacgacgtcttcgaccccaacgagctcctgcagtccgtggacctgtcgacggagcacaagatcgtggacctcaaggaccggatcgaggcctccgtcgtcatctggcaccggaagatcagcaacaagctctcgtggggccccgccggcgtcagcctggagaagcgggaggagttcgaggagcgggcgcagaccgccctgctcatcctcaagcacaggttccccggcatccctcagtcggcgctcgacatcagcaagatccagtacaacacggacgtcgggtacgccatcctggagagctactccaggaccctcgagagcctagccttcgcggttctgtctcggatcgaggacgtcctccacgccgacgccgtcgcctgcgaccccaagcgcaccaagtccaggaggcggcctagcctagagtgtgacgccgccgccgaagccgaagccgaagccgagacggcgcaccacagcggttccgtgcactggcaggaccatcaggatgccgaggacgacggcggcgagaagcatccggacggcaacggtaggaagctgaagaagctccacagggtggcgaccaagaagtttctccacacgcagaagatcgacggtgtggccggcgggctcaagagcttcgcacacaggtagcgtttttgcgtgcgtgcgtgcgtgcaatggtgccatactgtttggaaacgaagaacgtgtgtaaatagttccaagtttatttatatgcaaaaataggaccacggggtgcgggtcttgcccgt

SEQ ID NO: 14015 - DNA, 879 bp, Zea mays
  Clone ID: LIB148-012-B6_FLI
gcggccggccagccagcgcgcgagaggacgtacggacgaacagctataggcggaggcgatggacggccaacgacgacagcaatggccgaggtcgcgctcgggggctgccgccgcgcctctcctcctcctgctgctcctggcggtgtccttgggggggcatggtgatcacggcgcggcggctgcgggcgtcgccccggcagccggcaacggcatgacggagctgcagaagcacgtggcgttcttcgaccgcaaccacgacggcatcatcaccttcgacgagacctatcaaggtctgcgggacgtcggagtcggcgatgtcacggccaaagccagcgccgcgttcataaacggcgccctcggccccaagaccagacctgacaattccaactcctcaagcacggatatctacgtagagaacattcagaagggcaaacatggaagcgacacaggcgcctacgacgctcaaggaaggttcgttcccgcgaagctggacgagatgttcaccaagcacgccaagaccgtaccgaacgccctgacgaaagacgagctggacgagatgctcaaggataaccgggagaagatggacgtcgcaggatggctgggagccaagtcggagtgggagatgctgtacaagctggccaaggacaaggacgggcgcctgcccaaggacaccgtcagggccgtgtacgacggatccctcttttaccagctggcggcgcaggggaagaagggctgattcggttacgttaatttcagtaatcaataacaagcaacgttttttttgtcgtttctgaatgcttgcctgtgtggctgtgtaagaaagcgagtgggtcggactcaatggcaggcaacggttttgtttttttttattattatttt

SEQ ID NO: 14016 - DNA, 849 bp, Zea mays
  Clone ID: LIB148-012-C10_FLI
ctagtagcgaaaggcaagggacgtaagaagtcgtctaattcttggatcgaattagacgacttcttcgtccctctcttcattagcacgctaacttgtaatctgcaggatctaagcaaagacttgatttagttatggacggattggtaggcctcttgaaagttcgcgtggtccggggtatcaaccttgcctaccgcgacgcaagaggcagcgatccgtatgtcgtcctacggcttggcaagaagaaactgaagacaagcgtgaagaagagatccgtgaaccccatatggcaagaggagctaactctgaccgtcacagatcccagccaaccactgaagctggaggtgttcgacaaggacaccttcagcagagacgaccccatgggagacgcggaggtggacgtggcgccactgatggaggcggtgagcatgaacccgcgggaggagagtctgaggaacggcgccatcatcaggtccgagcggccgagcgccaggaactgcctcgccgacgagagccacgtgtgctggaggaacggcaagttcgcgcaggacatgatcctccggctcaggaacgtcgagagcggggagatacagctgcagctgcagtgggtgaacttccctcctggtcctgctcctgctgctgcaacaaccaggtgacctgatcgatggtagctgctgttcctgtcgccattgcctcctgctggcaggaacaggaactctctgaagcacggggtcagggtagttcatgttgcttcgattcgatcgtaggggagataatgccggatggctttgtaaagtttgggaggacatgcatcataattgaagtcaagtgataggatcctgttttttaagt

SEQ ID NO: 14017 - DNA, 605 bp, Zea mays
  Clone ID: LIB148-012-C3_FLI
tacatctcggagctggagcgcagcgtcacgtcgctccagacggaggtgtcggcgctgtccccgcgcgtggcgttcctcgaccaccagcgctcgctgctgacgctggggaacagccacctgaggcagcggatcgcggcgctcgcgcaggacaagatcttcaaagatggtgaccgccattgccggccgcccctgctcctcccgactacgaccctcgccgctcatcaggaggcactgaggaaggagatcgagaggctgaggcaaatctaccagcagcagagcctgaagagcggcagggagcccgacgcggccccgtcggtccgcgacgacaaggacatgatcggcagcgaggggaccgccgcgcccggcccgccctcgtgatgaggaggaggtggtggggcgacacgtccagacatccgagtcggtcgctgtagtcggggatggccctgtcgcccgccctgcagcccatcacagcgaggttgccgctgccgctgctaggattggtgtgtgtgtgccgtgtgcgtgtccgtgtgtgcattctttgggggtgtgtaacgtgatgtgatgtaaagagaagaggaactgcatcggttcggtttggtttggtt

SEQ ID NO: 14018 - DNA, 1044 bp, Zea mays
  Clone ID: LIB148-012-C5_FLI
tgacttctgcaaacagcttgagcttgccaggacgttccagtttcctactctcaggcagccacccgcatcgtttcttgcaacgatggaagagtacatcagagaagcaccccgaccctcgatcaagagtgaggagagcgaggagccgaagctactgacctacgagcaagaagctccagaggaacccgaaaatgctgtggaagaggagaaagaagaaccgagtcaaaaaccagaacctcagcctgtgcctgatccagaaccccacccacagcaaacgactggagatctactaaacctggaagcagaggtgaatccttcggctctggaactcgaacaaagcaatgcattggcactcgctattgtagcaccaggtgactacaagccgccagcatctcaaagtatgtttgatgtcaattcgtctgggtgggagctggcactggtcaatgctccaagcacccatacaagccaagcagttgagaccaacttggctggaggctttgacaagctgctacttgacagcctctacgaagacgaggccaggaggcagcagatcgccggcgcgacctacaccggtagcctaggagcagccaaccctttctgcaccaatgccagcgatccgttcaccatgtctagcagatttgcaccaccggctaatgtgcagttggcactgatggctcagaaccaacagcagtattaccaggcgcagcagtattaccaggcgcagctgtatttccagccacagcagcagcagtattttcagcagcatcaacagacgttggcaatgccaatgccaaacatgtatcaccaccagtatcagtactctgtgcctacatctggagcttcgaacccatttggtgatcctttcagtgaccttgccccaatgggtgctcctgcaaaacagagcaactcagtttttctctgaactggttgctacttctgagtctgatcattcaattggtagagcagcaaacctgtacagcacttgttccttcgctaagtggaggtgttgtatattgtctttcttttgcaatatccaaatcttgaaat

SEQ ID NO: 14019 - DNA, 1089 bp, Zea mays
  Clone ID: LIB148-012-E1_FLI
gtcgtcgtcgtccctcccgaaacaaaagaagctattttgacaccacacacacacacacagaggagagaagataagagaacgaggggcagggcagccagcgccgctagctgaagcaaggcagggcaagagaatccgtacgtcgaggtgcaggtcgtaggtaggatggacgcggaccagcagggcgtggttgcggcggcggtgaagccggcgctggccaaggggacgccgtcggcgtcgttccggctccgcaacgggagcctgaacgcggtgcgcctccgccgcgtgttcgacctgttcgaccgcaacggggacggcgagatcaccgtggacgagctggcgcaggcgctggatgcgctgggcctggacgccgaccgcgccgggctgtccgccaccgtcggcgcctacgtgcccgacggcgccgcgggcctccgcttcgaggacttcgacaagctccaccgcgcgctcggggacgccttcttcggcgcactgggaggccaggacgacgccaccgccgcggcggacggcgccggcgccggcgccggcgccgaggaggacgagcaggagatgcgggaggcgttcaaggtcttcgacgtcgatggcgacggcttcatctccgccgctgagctgcaggaggtgctcaagaagctcggcctccccgaggccagcagcatggccaacgtccgggagatgatctgcaacgtcgaccgcgacagcgacggccgcgtcgacttcaacgagttcaagtgcatgatgcaggggatcaccgtctggggcgcctgactgacctcatcgtcgtaccgcgtacgttctgacttctgagtgtgtggcaactggcatgatggtccccgcatttcgtcgagacagtcctgcgtctgcgtctctaattgaattctttagtatcgtccttcacatcactggtctagtggtgatgagaatgccctgtcctgtgtgtgtgtgtcacataaccatggtatgtaatgtcatactggaaattaggtatatgatgatgacagctgataagaaaatgtatcaaactgggctattgtaatcattgtcaaccaatgtcttgggtcgggttagttatccacg

SEQ ID NO: 14020 - DNA, 1558 bp, Zea mays
  Clone ID: LIB148-012-E4_FLI
gggcgcgccatcgcaagcgccgacgcgaggagctctccaaggagaaagaatgtacaacctacatgccagaccaaacaaattttaatgaagtcgaagcagaagagtgcgatgcgtatgaagaaaatcaagaggaacctgtagcaatgatggaaggatctccacctgatgttggtcaagatggtgatgatgagcaaggtattgatccatcttgggctgctgtagttacgccggttttacgagtcaagacaatttatatcagttcggcgattcttgctgcgaagagtcctttctttttcaagcttttctcaaacggcatgaaagaatcggaccagagacatgcaacccttagaattactgactcagaggaaattgccctcatggagcttttaagctttatgtatagtggaaagttgacaactactgagcccactcttcttctggatatcttgatggctgccgacaaatttgaggttgtttcatgcatgaggtactgcagccagttgctcacaagcttgcagatgaccacagaatctgcacttctctacctagatctcccttgctcagtttcaatggcagctgcagttcaacctctgacagatgcagctaaggattttctcgctgttaagtacaaggatttgattaagttccaagatgaagtgatgaacatccctcgcgctggaatcgaagccatcttgtcaagtaatgacctccaggtggcatctgaagataccatctatgacttcttactcagatgggcccgtgcacaatacccgaaatcagaagagagacgtgaggtccttagttctcgtctgctccctctagtgcgattcagtcatatgacgtgtaggaagctgcggaaggtcctagcctgcacagatatagaccacgagcaagcaaccaagtgtgtcaccgaggctcttctgttcaaagctgatgcaccacaccggcaacgagctcttgcagcggacgcaataacctgccggaaattcgccgagcgggcttacaagtacagaccactcaaagttgttgagtttgatcggccctacccacagtgcatagcatacttggatctcaagcgcgacgagtgctctcgactctttcctgcagggcggatatactcgcaagccttccaccttgcagggcagggtttcttcctctcagctcactgtaacatggagcagcaaagcgcgttctactgcttcgggctcttcctggggatgcaagagaagggctccacgagtgtgacagtggactacgagttcgctgcaaggacgagaccatccggcgagtttgtgagcaagtacaagggtaactacacattcaccggtggaaaggcggttgggtacaggaatctctttgcaatcccatggcagaagttcttggccgatgacagcctcttcttcgtggatgggatgctgcatctgagagccgagcttacgataaagcaaccctagagcaatggtctctgtatagtggtagttgttacgacagatgaaaaatatatcggatgggatacctcacaagttccagttcgctgcaagtttccagattggccggt

SEQ ID NO: 14021 - DNA, 668 bp, Zea mays
  Clone ID: LIB148-012-E5_FLI
gttcgtccagccttccggccttcccccccggtggtcatcacatctcccccaattcgccgccccctccgacctcgccgtactcctctcgctccgggttaatcgctgctgtcttctgcagttgaagtagcctcttcatctgctcgccgcagttcgtccgttgcccatggcggatgaggaggtaactgatccaaaggcgttcctagaggaacgttcaaaggctaagtgtgtgtcgcagtggtatgaatatcagaaatgtgttaagaggattgagaatgacgagactgggcacaaacactgtaccggccagtactttgattactggaaatgtgttgacaagaatgttgcagaaaaactctttgagatgttaaaatgacaagaaaagttttccctacttcagttatccacccaaagttggtaataattgtatcacttgtgtggcctatagactattaaggcgctcaatatttgttagagaagttttgccacttgggtaacacaaattttccactgccagtttgcatttcatttctgctactagtattgaaccagcaggtttcctcctgcattgttggataaaaaatccatcgaatatttacaagattgtggctgattattaaatgctgtaatacaccttaattgcttttacggtgtattttgaggaaaaaaac

SEQ ID NO: 14022 - DNA, 759 bp, Zea mays
  Clone ID: LIB148-012-E9_FLI
gttcctggacgccaacccgtccgaggtggtcaccgtcttcctcgaggactacgcggcgccagggtcactcagcaacaccttcaatgccgccggactgtccaagtactggttccccgaggctcaaatgcctagccctagtaagggcggcggtgactggccgctgctcagggacatgatcgccgataaccaccggctcatcgtgttcacatccaagaaagggaagcaggggacggaggggctcgcgtaccagtgggactacgtcgtggaaacccaatacgggagcgagggcatggcggatggcagttgcccaaagcggaccgagtcgaagcccatggactctaaggcccagtcactagtgctgctgaacttcttcaccagcaacccgagccaaagctgggcctgcagcaacaactccgcgccgctcatcagcaggcttaacgcctgctaccacgcctccgccaaacgatggccaaactacatcgccgtcgatttctacatgaggagcaacggcggcggagctcccctggccaccgacatcgccaatggccgcctccagtgtggccacgacaacatcgcacactgcaagatttcttctgcatcggcaccggcacccgcttcggcttcttcaccggcacccgcttcagcctcttcaccgtctcctgccccggcaccggattttgccgccacttctcccgccatctcatcgtctcctgggccggcgcctgggcctcttaatagctactactagtagttaaaagg

SEQ ID NO: 14023 - DNA, 425 bp, Zea mays
  Clone ID: LIB148-012-G11_FLI
gtcgaccgagtgctaccaccatcgtcgtttaggggggagggcatccgccgaagtcatgcagagtgctctaccgttgtagggcgaccaacacaaatcatggggttggggatcggctgcactcaggcaggccgcgcatcgtatcctcgtgtgggattgtgatcggagggcacggcaattcctcgccataatggatacaccatagtcgagccgcattctgtcgtcaaccgagcatggcgcgacattattcaaggtcaagaacaggtaccgcaggatgaggggcatggaggatgatgtgacgagttcgtgaggtcgtcgtctcccagtcaactttgggttgctggatcattgtctcatatgatgtaattatttattttattttgtacagaactcctattatatagtaaagatgtgacattcgtttctgt

SEQ ID NO: 14024 - DNA, 1101 bp, Zea mays
  Clone ID: LIB148-012-H2_FLI
cgtcggaggaaacgtgggaggaagtggcaaggcatataccggagctgatgcaggtacaagtgtttcgagcggaggatctgctggcgccgatgcgggtaccggtgctaccgtgggtgctggtgtctccaaagacgccaaagttggtggtggcgtcggaggaagtgtgggagggagtggcaatgcctataccggaactggtgccggcgtttctagtggaggatcctccggtggcgccgatgctggcgctggcgctaccgtaggtgctggtgtctcgggaggcgctaaagttggtggtggcgttggaggaaacgcgggaggaagtggcaaggcgtatacaggaaccggtgccgatgcgggtgtttccggtggaggatccggtggcgtcgatgctggtgtctccggaggcgccaaagttgacggcaacattggaggaaaagcgggagggagtggaaatgcatatactggagctgatgcaggtacaagtgtttcaggtggaggatccggtggcgccagtgcaggtaccagtgctaccgtgggtgctggtgtctccggaggtgccaaagttggtggtggcgtaggaggaaatgcaggaggaagtggcaacgtctatactggaaccggtgccgatgcaggcgtttctggtggaggatccggtggcgccgacggtggtattggagctaacataggtgctggtgtcttcggaggcgtcaaatttggtggcggcgccggaggaagtgtaggaggaagtggcagtgctgctgcaggtgcttctggagggagtaaatcatcggggggtggctcagattttggatatggttcagcgagcaaggagttatagaggatgatgaccactcaccaccgtaagatcgatatgatccgtcccaaggaatttattcctgccctttttgttatcgcgtgttgttttattaccacgcaccagtcaatagtgtggaggcaatatacattgattccccttgactggacaatacaaagataaccttatgtatttcatttttgcttacttaacattgccatgtaaaccagaatagctgaggcttattctcatgataaacatgacatttattttacggcttcatcttg

SEQ ID NO: 14025 - DNA, 1717 bp, Zea mays
  Clone ID: LIB148-013-B4_FLI
ctggagctccgccccggcgatcacccgccgggaacgtagcgcccggctccacagccgcgccattcgagctgctgctcgcgcgcggctggttcttctcggggggattttctttttgcgggcaccctccgctccccctcaccgccctgccgtcagccgtctcgttttcggattcgtttgctccggcggtggccgacctgccgtgcggggcgcggtgatgccggaggtggggcagtacgggtacaagaagaccgacggcatctgcgacagcgtgtgcggcgagcctgtgtcaaagacagctctgacgatgtcaaggctaaagtgcgctctccggggatttgatttaagggcacttatggtcctcttgattggtgtgccaattctaatcctaatgatatatgcgcatggtcagaaggtcacatacttcctgcggcccatctgggaatctcctcccaagcccttcaagacaatccctcactactaccatgagaacgtcaccatggagaacctgtgcaagttacatggttggaaagtccgtgacttcccgcgtcgtgtctttgatgctgtactcttcagcaatgagcttgatatcctggagatccgctggaatgagcttagtccctatgtgtccgagtttgtgcttcttgaatccaactcaacctttactggcataaaaaagcccctccacttcaaggaaaacaagcaccgttttgggttcgctaaatcacggctgacatatggtaatattgggggaaggttcgtgaagggggagaacccatttgttgaggagtcatatcagagggttgccctggaccggcttcttaagcttgcaagaatagaagacgatgacctgctgatcatgtcggacgttgatgaaatcccgagcggccacacaatcgatctcttaaggtggtgcgacggcattccagacatacttcaccttcagctcaggaattatctctactcgttcgagtttttcctggacgacaagagctggagggcatcgatacacaagtaccaagctggaaagacgaggtacgcgcacttccggcaggcagacgagctcctcgccgattcagggtggcattgcagcttctgcttccgctacataagcgatttcgcattcaagatgcaagcgtatagccacgtcgaccggatcaggttcaagtacttcctgaaccctgagaggatccaagatgtcatctgcagaggggcggaccttttcgatatgcttccagaagagtacacgttccaagagatcatcgccaagctggggccgatcccgagcacgtattctggcgttcatcttcctagctatctgctaaggaatgtcgaccggtttagataccttctaccgggcaactgcaggagagaaagtggctaggttttatggcccactaccctgcaacctgttgtgcgtgggtgggtgggtgccagtgccacactgccccgctgcaaagctgctgtccatgggatatctgtggcagttcacctggtacggttgcctaacgtagttgaacaaatgctttggggaagaattggttcatggatgggggtgagcacatgattctctaatgtgtaatagaacatgggaggaggatctaacggcatagcgcacgcttggtcctggctgggtgtgcatgagctgagcggtttgtcattgtcattcattacttccctgattgatatatataaactcaaaaaggctgttgtagattgc

SEQ ID NO: 14026 - DNA, 493 bp, Zea mays
  Clone ID: LIB148-013-B5_FLI
cgcggagttcgacgtggaggcgctggcgcagatcgtgcagatggacctggaggacatccgcagcggcaccgtcgtccgcaccgtccgccccggcggcacgggaagctgcctcgccgacgagagccacatcatctgggacaagggccacgtcgtgcaggacctcctcctcaggctccggaacgtcgactccggcgtcgtccacctgcagctcagatgggtcgccaccccacctgaagactgaactggaggagacgaactgcagtatgtacgtgctctcgctccatatccccatgggaagaacgtacggattcgctcgcgtgacgatgatactatgcgatgcatgcatgctcaagagtcaagatgtcactgtcttctgtgtattttagtacagccacgtacattgtcgccatccaacatcactatgcatggacttttttttttgatataaatatatatatgtggaactaactaatttattaatcacgagttcatc

SEQ ID NO: 14027 - DNA, 1413 bp, Zea mays
  Clone ID: LIB148-013-D8_FLI
tgacgacgctggcgtggacggcgctggcgttcaagcccgagctggagtcgaccaaggagctgaagcacgtgcaccaggccatcaagtggggcaccgactacctgctgaaatgcgccgccaggaagaacaagctgtgggtgcaggtcggcgatcccaacctggaccaccagtgctgggtgcggccggagaacatgaaggcgccgcgcacgctgtacgagatcgactcgaagacgcccgggacggagatcgccgccgagacgtcggccgcgttcgccgcctcgtccatggtgttccgcgacgacaagaagtactcgcgcaagctgctgaacaaggcgaagctgctgttcacgttcgccaagagccacctgggcagctacgacggcgagtgccccttctactgctcctactcgggctacaacgacgagctgctgtgggccgcgacctggctgtacctggcgacgaggcggcaggtgtacgcggacttcatcgcccacgaggccatctcgtcgagcgtggccgagttcagctgggacctcaagttccccggcgcgcaggtgctgctggccgagttcaacatgacctcggcgggcggcgcgcagaacttcaagtcgcaggcggacaacttcgtgtgcgcggtgctgccggacacggcgttccaccaggtgttcatcaccccgggcggcgtgatccacctccgcgacggcgccaactcgcagtacgtgaccagcacggcgttcctgctggtggtgtacgcggacctgctgctgcggacggggcagacggtgctgtgcgggaaccagccgctgcccccggcccggttgcacgagttcgcgcggcagcagatggactacctgctgggcgccaacccgcggcacagctcctacgtcgtgggcttcggcgccaacccgcccacgcagccgcaccaccgcggcgcatccacccccgtgctgccccccggcacggacgtcaactgcggcctcagcttcggggactggatggcgcccgacaagcccaaccccaacgagctcaccggcgccatcgtcggcgggcccgacaagaacgacggcttcgtggacaagcgcggcaactcctcctacaccgagccctgcacctacatcaactccctcgccatcggcccgctcgccgcgctcgccgtccgaggcgtgcagctcgtcgccacgcagtgatctatccccatggccatgcgtgtgtgtcccgctgtttcgtttcttccctgacatgacatgatttctactccgttactgatgattcattgattccggccgcccccgcattgttcattatattaggtcgacgtctgcgggcgcgtgcgggggatccatccaaatctctcactctgctattgtttctgtacgtccaagattataatgatactcataataatctcgtcgc

SEQ ID NO: 14028 - DNA, 655 bp, Zea mays
  Clone ID: LIB148-013-F3_FLI
cgccatttttggaaggtccaccacctcctcctcggcccgcggcaaaaatggcgtgggagatccgccacctcacctcctccaattctcgcgctcgcgcctgatatggaaggtccgtcggagggactcgggcatcgaggccatggcggagccgcaccccttctcccccctgcctcgcgcgcggcggccgagatggtgctgagcgcctgagcctgccctcctacgggctcactggcacgctctccacggccatcgaattccagagctgcgattcccgaggccatggagcagcagacaatatcaattgccaaagctgccattacaatagtactcattttagggacttcagttcttgcagctgtcaatccaattgcaggatgctatgacgctcttaaggttcgtaaacatgtatttattgatgcaataattatccattgtataaggtataaactgttctagctatacaggcaagccaattaatttgacaaattttcttttgttgtttgcaagccaaactaacttgtatatcttttcttataaatcccatttcaagcatatgttgctttctgataagtcatatgcttcaattcacgcggttggttatacagttcctggtggtgattattgaaattgtatttaactattttacaatatttag

SEQ ID NO: 14029 - DNA, 724 bp, Zea mays
  Clone ID: LIB148-013-H8_FLI
gcttgcgcgagcgcagaaggcacacacgtacagccatggcgaactcgtcgtccggcctggcggtgagcgacgagtgcaaggtgaagttccgggatctgaaggcgcggcggagcttccggttcatcgtgttcaggatcgacgacaaggacatggagatcaaggtggaccgcctcggcgagccgaaccagggctacggcgacttcaccgacagcctccccgccgacgagtgccgctacgccatctacgacctcgacttcaccaccgtcgagaactgccagaagagcaagatcttcttcttctcctggtcccctgatactgcacgcacccggagcaagatgctgtacgccagctccaaggacaggttcaggagggagctggacggcatccagtgcgagatccaggccaccgaccccagcgagatgagcctcgacatcgtcaagagccggaccaactgatcgtcatcgtcctactatcatcacatcaagcaacacgtcgattatatatgcatcattatagtatcgtttattaatttcagacccacccactgctaaccacatcgtgcacgagagattatattcatccgtggactacgctctcgatcttacaatttgaaacctttctattttcctaattactatgtattccaggttcattttgattgtgaccattcttcagttctttctgtaaggatcggagcatattatatactctatgtggctatgcc

SEQ ID NO: 14030 - DNA, 698 bp, Zea mays
  Clone ID: LIB148-014-A4_FLI
caagaacctcctcgcctcctccattgaccaacaattaagcctccccgaccgccacatctattaggtgcagccatgggtgcctgtgcaacgaagcctaagacgcttgaggggaaagccccagctgaggccaccatctccacacccaaggttgcacctgagaccactaccatccacattgaggttgcggcaaaacatgcagtagttgagaaggtggaggaggacaaggaggaggcactaacagtggcggcgaaacaagagccagcagccaccattgagcctcagcagattgctagtgaggtgaccacttcggaagtggcggtcgtcgttgtcgagcctgagaacaaagaggaggaggaagttgtggagaagaccgtcatcgagaaggagaagccatcagcagtccatgcagaggaaaatattgccaccaacaaggtggcagccgagcccacgacagaattgaagaaagacaccgaggaggagatatagatggagaaggagaagccatcgctaagctaattgactgcatgtcaattggctgatgcctgatgatcaatgtgcaagaaagagatcgaccactaattggcatacatgtttaagtcgggagagagactcggtcaccttgtaaacaaaacaaacctttgatgtctcccgttttccctccatggggttctgataatacaacatcctggggcttattg

SEQ ID NO: 14031 - DNA, 1173 bp, Zea mays
  Clone ID: LIB148-015-F3_FLI
tggtaaaaatgacgagtccatggaagattcaacaaggaaatgtattgaaatgctttgtgctcctgatggtgagcttcctgagaagctgaggaatctagaacctcgccttattgaacatgtcagtaatgaaataatggatagggatcctaatgtccgctggaatgacatagctggtttggaacatgcaaagaagtgtgtgacagagatggtgatatggccactgctacgtcctgatatattccgtggttgtcggtctcctggaagaggtctactgttgtttggacctcctggaacaggcaaaaccatgattggaaaggcaatagctggtgaagccaaggcaacatttttctacatatctgctagttcactaacaagcaaatggattggtgagggtgaaaaacttgttcgggcactttttggtgtggccagttgtcgtcaacctgctgtcatatttgtggatgagatagactcattattatctcagcgcaaatcagatggtgaacatgaatcaagcaggagactgaaaacacagtttctaattgagatggaaggttttgacaccggaaatgaacagatcttacttataggagcaacaaacagaccccaggaactggatgaagcagcgcgcaggcgactcacgaaacgtctatacatcccccttccttcattagaagcacgggcttggataattcgcaatctattggagaaagatggacttttcatgctctcggaagaagaaacaagtgccatctgtaaattaactgaaggctactcaggatctgacatgaaaaacttggtgaaagatgcctcaatgggaccactaagagaggctcttcagacgggcgttgaaatcgcaaagctcagcaaggaggatatgcggccagtgatgctgaaggatttcgagaatgctatgcgggaggtaagaccttctgtttcctcaagcgagctggggacttatgaagaatggaacaggcagtttgggagcctatcgatctagtctgtcggcaggcatcaacgaatacaatcatgtcggcactatagaaaaaggagctcaacgattttagccggaacatgacatgcataacacagctctacagtttaacaatcttttgaagcatcaaaatttgaactgtctatttggagtgctgagtaatatccaggagcctacatatc

SEQ ID NO: 14032 - DNA, 743 bp, Zea mays
  Clone ID: LIB148-015-H9_FLI
cctgctggcgctggcgctggcagcgctggctttcgtctccagggccgcggcgcagggcaacggctgttccagcgtgatgatgaccctggccccgtgcatggacttcatctccagcaaggcgtcggagccggggatctcctgctgctcggtgctggctggagtcgtgcagaccgacccccgctgcctctgcatggtcctggacggcaccgccacgtccttcggcatcgccatcaaccagaccagggcactggagctccccggcgtctgcaaggtcaaggcgccgccgctcagccagtgcacaggcatgtcatgtgtcaggtcatcgttcaaatgcaaaccattgccagtttctgttgccgcttagaatcctagtacgtacctggtctcaggcgtccctgcggcacctgcaccgacgcctcccgacgaaccagcagcggcagcggaggaagaagccgacacagctgcagatgccccttcagcaaatggagcctcaagctccacaaactcaaagaatgcagcgagcttactgcttctcatctgcgcattgctgtatgccttctaataagtggtgatacaacttcgctggccatgtcaccgtgcaggaattaggtctttccctgagtcctgactatgtacttacccatgattctcggcaaattttttgtatggtatggtatgggtttctgatgtgccacatcaaacaacattgcttttcgccaaatgagaaagatcagttctcgccc

SEQ ID NO: 14033 - DNA, 1222 bp, Zea mays
  Clone ID: LIB148-016-A2_FLI
atccattgcgcccggagccggccgatcgggggagcgcagcaggcgggccgcgccggccgccgcaccaccgggtagcccaggccgcgcgcgcgcgccgtccagctcgtctgctgtcgctcctccgtgatggccgacgtcgacgtggacgccaacaacgaggccgagcaaaggacgcgctcggagccggggacctccatgtcgccgtcatcggaggccgacgacgacacggccagcagtacacccaacgagtccccggcgcgcgccttcgcggggcacacgctcgaggagccgcctcggcggcgggcgccgtcccggcggtcccgtcccgttcggatgctccagagcgtgtgccggtcgctcccgctgctgaacccgcggtgcgggcggccgatgatgcaggccggggcgtgccggatcgcggcgccgtcgtcgcggcccgccgccgccgccgccgcgccgtcgtcggactcatcgagctcgctgctgacgcagctcatcgcgtcgtcctccttcggcggggccgcgtcgtcgcgccgccgcctcaccggcacgctcttcggctaccgcgacggccgcgtgtcgctgtcgctgcagcagaacgcgcggtgccagcccacgctggtggtcgagctggcgctcccgacgcacgcgctgctccgcgagctcggcgcccacgcgggcgcgcgcatcgtgctggaggtcgagaagcgcgccgagcagggcaccgccgacggcaacgaggccatcgccaccaccgaccacgacgggtgggtgctggaggagctcatgtggaccatgttctgcaacggcaagagggtgggctacgcggtgcggcgggaccccaccgaggaggacatcgccgtgctggagacgctgtgggccgtctccatgggcggcggcgtgctccccggcaggtcggacatggacggccccgacggcgagatggcgtacatgcgcgggagcttcgagcacaccgtcgggtcccgggactcggagtcgctctacatggtcggaccgcccggcggcgactgcccggagctcgccatcttcttcgttaggctatgaattgaaccgagcgaaccatacgaatcgaacaatacagtgtacacgtcgcagtcgtggtgtctaatctctcgcctggtctcgttcgttgttcagcagcctcagctagcgtcagagatattattcatttgccccatcaaaagatttttcaagcaaaagg

SEQ ID NO: 14034 - DNA, 2100 bp, Zea mays
  Clone ID: LIB148-016-C3_FLI
caaaacatagagtgtcgacttttctattggtgtgattgggggcactaaatacctaccacattgcactcagactacatatactgtgtttgtgtgttgtatgccgtatgcgtgtgtgagcttgcgcaaattggacatctaggccgtgcgtaccctgcgatgaaaggcgccgtcatcggcgcatcgaccgtcctggtcgtggcggtggtggccaccatctgcgtcgtttccttcaaaggcagcggcgatggcgggagggccgaggagggcgagatgtccacgtcggtaaagtccatcaagtccttctgccagcccgtggactacagggagacgtgcgagaaggcgctggaggcggcggccgggaacgccaccagccccacggagctggccaaggccatcttcaaggtgacgtccgaccggatcgcgaaggccgtgcgcgagtccgccctgctcaacgagctcaagcacgaccgccgcacgtcgggcgcgctccacaactgcggggagctgctcgactacgccatcgacgacctccggacgacgttcgacaggctcggcggcttcgagatgaccaacttcaagagcgccgtggacgacctccggacgtggctgagctccgcgctcacgtaccaggagacgtgcctggacgggttcgagaacaccacgacgcccgccgcgggcaagatgcgcaaggcgctcaacagctcgcaggagctgacggagaacatcctggcgctcgtggacgagttctccgagacgctcgccaacctgggcctgccgagcttccaccgccggctcctcgcggagcacgcccgcggcgcgccctcgtggatgcccgacgccaagcgccggctgctgctggtctcccccggcgagaagggcttcaggcccgacgtgacggtggccaaggacggcagcggcgacttcaggaccatcaacgcggcgctggccaaggtgccgctgaagagcgccaccacgtacgtcatgtacgtgaaggccggcaagtacaaggagtacgtgtccgtggcccggaacgtgacgaacctggtgatggtcggcgacggcgccaccaagacggtgatcatgggccacaagagcttcatgatgaacatcaccaccaaggacacggccacgatggaggcgatcgggaacgggttcctgatgcgcgggatcggcgtgaagaacacggcgggagccaagaaccaccaggcggtggcgctgcgggtgcagagcgacatgtcggcgttctacgagtgccggttcgacgggtaccaggacacgctgtacacgcacacgagccgccagtactaccgcgactgcgtcatcacgggcaccatcgacttcatcttcggcaacgcgcaggtggtgttccagaactgcctcatccaggtgcgcaagtgcatggacaaccagcagaacatcgtcacggcgcagggccgcaaggagaggcggtcggtgggcggcaccgtcatccacaactgcaccgtcgcgccgcacccggagttcgagaagagcgtcggccggttcaggaccttcctgggccgcccgtggaaggagcactcgcgcacgctctacatccagtcggagatcggcgggttcatcgacccgcagggctggctgccgtggctcggcgacttcggcctcagcacctgctactacgccgaggtggagaaccacgggcccggcgccaacatgagcgaacgcgtaaagtggaggggtatcaagaacatcacctaccagcacgcgctgcagaagtacaccgtcgagagcttcatccagggccagcactggctcccacagctcggcgtgccattcatcccggggctgctgccgcagcagcaatcgggcaggatacactgacatctaaggaagataatatatgatcggcaggctgcgttgtcgatatgacgtggcactaacatgtacgtaccatggtttagtttgttggttggtttatgctattttgactactactttttttatatttgataaaaaaatgcagtacaaaattaactaatgtgtgcactgattggaacttggattgccccgaaactggtaataggttattaataataacaaaatggaagaagtcatatttttctc

SEQ ID NO: 14035 - DNA, 1461 bp, Zea mays
  Clone ID: LIB148-016-C7_FLI
ataaaccgagtggaatacatgcattccaagggatttattcatcgtgacatcaagccagacaacttccttatgggcttaggtcggaaagctaatcaggtctatatcattgattatggacttgctaagaaatacaaggaccttcatactcataaacacatcccgtacagggagaacaaaaatctgactggaacagcacgttatgctagtgtgaatactcatcttggaatagaacaaagtaggagagatgatctggagtctgctggctatcttctgctatattttttaagaggaagcctcccatggcagggtcttaaagctggcactaagaaacagaagtatgacaaaattagtgaaaagaaaatgcttacgtcagcagaggttctttgcaaatcttacccgtcggagttcgtctcatatttcaactattgtcgctccctgcgatttgaagacaggccagactactcttttctgaagaaactgtttcgtgatgtatttatccgggaaggataccagtttgattacgtatttgactggactgtactcaagcaccctcaaatcggttccaacaacaagcttgttcaacaaccaagtgcaagaatggctggagttggaccatcagttgagcgaacagacaaagcctccgtgggacaagaggcccgggacagattcacgggtgctgttgaggcattcgccagaagaaatccaggctctggtcgccatggagatcattccaggcaccaaagccttgcagattcctttggcacatccaacgaagcagttgccgactcagagaaaacgcacatcttgtcctggggagggagctcgtcgaaaatgcccgcggcttcgtccagccggccgacctcctcgggggactgcagtgaccagaaccaccggtgggtttctggcagtagtggcggcagcgggcggccgtccacagtgcagaggcaccaccactcggcaggcgccgagaacagcaggtcgtccacgcgctcccccgtggcccggaacgcggccgagagaggaggctccggctcgcgggacagcacgacgttccggagcctcgagcgcctctccatcaccaccagcaggaggaagtgagctgccgaggaccacgccgacgatttctgtgagtgaaaggcggttactaggccgacatcttttgcgggatcgttgctctctgcagctgaagcaaatcggcaaatggatggacgggattgcagcgcaatgacctcgaggatggcctcctttacaagaactgccatgaaaatgctttctccaaaccgtaacgtataacgcttcccccaaccaaccagagggaagacaactccaaagtacaatgcaatcctgtttcacggcaagctttcactgttcacttgttttgccgttctggcactagtttctaaagtctccagcaatgtaatctatattcatcttctatgcctgtactttatagtctcatct

SEQ ID NO: 14036 - DNA, 733 bp, Zea mays
  Clone ID: LIB148-016-F7_FLI
gttgctctcaccggtggaaggaagtggaagtagaaggctggaagcggaagcattcgatttccatcgtggggcatggcggcggaggggaagaggaagggcgtcccggcgctagggtggtggctgatgctagtcggctccctccgcctcgcctccgtctggttcggcttcttcgacatctgggcgctccgcgtcgccgtcttctcgcagacggagatgactgatgttcatggccgtacatttggtgtctggactcttttgacctgcaccctgtgcttcctttgcgcactgaacctggaaaataggcctttgtacctggccaccttcctatcattcatctacgctcttggtcatttcctcacggaatacttgatataccacaccatgcctgcagcaaatctgagcacagttggcttctttgcaggaacgtcgataatatggatgcttctgcagtggaattctcatgggaacccccggggttcctatgctgggaagcagtcatgactgatgcttgggttgttcgcttcacttgatgtggtctgggcccgctaggggaagaaggatggttgaagaaagctcgctggaaagccgcctgatgatggctctgcaccatttgtacttcagttttcaacttttcatcatgttatttcattgcatgagacgttcgtgtccgactgagcagggagatttccgaacagttatgccactggttgggaatgagaatttttgaacactg

SEQ ID NO: 14037 - DNA, 503 bp, Zea mays
  Clone ID: LIB148-016-H4_FLI
caggtgtgggcatgtgtgcacctgttttgactgcgccgatcagctgaaatcgagcggcatgagctgcccaatctgtcaatctcctattgatgatgttgttctggcgcggttgaatttttgagcttagaatttaggaaaggccaagagaaaaagagccggcactcccagatttagacgtggagtttgcgaagccctggttttgaggcggcttcttacctttttgcttaaccaccactaaagaaatacgagctagttcttggagaaaatgtaaatatgtttttttggcgcaagagcggtgtgcttgtatcgcactaaaggaaaacagagttctaattaaaatgctggttgtattccccgtatgtaccacatcacttgttcacggagagaatgtaatggttctggttctatttgcgcgataggtttgaactcacagcattgatactcttcactcaggcctatttgaacaaattcaacgccaactaataatatgtttggtttgagga

SEQ ID NO: 14038 - DNA, 1036 bp, Zea mays
  Clone ID: LIB148-016-H9_FLI
gagggcaacaggagagagggatggctaggctgatgtcgctggttgacgaggggttcgccgtcaggcgccagacccaggaagcgttgtactgcatgcagatgatgacgaggatccagactcagctgtacacgagacggctcaagaccgagaaggacaagaaggttctcaagagtcagaccaaggccgttaataaacatagcctggacaaagcaaagattggtgaaggctgggatcatagcctgcagtccaaggagcagatggaaacggtgcagaagatgaagcaggaagctgctacaaggcggcaaagggccttgtcatacgcattctctcaacagtggaggaacaggaacacctcttctgcgcgagctgcgcatgggcctgctcccatgtacatggaacctggcaacccgaactggggctggtgctgggcggagcgctggatggcggctacgaggccgtgggagaaccagaccatgccaccgccggacactggccgcgcagcatccaaaagcgctagcacccggctgcctcgagtcgccgtgtcggtccagatacccacggccaccactactccaaagggcaagccgttccgcccaccgaactggtcgtcgtcgtcgtcgctgtcgtccccgtcgacgcccccgccgcggaggacggccacgctggccagcccgaggagcggcccgctccacgcgacgagcggcctccagcacagcaagagcctgcagccagaccaccgccgcccgcggagcagccaggaactctcggcaaacagcccgcgccgcgccgccgtgccggcgagtcccaggtgcgccagcgggagcagcagcccgctccacccttccagtggcgccggcgcgcagcacgcgacgacgacggcgaccatacggctcgagcgccgcccgcggagcagccaggaccgcgggatgagcagcccacgcctgctgggcgccaaggacgccccgctgcggcgcaccgcgagcctacggtctgagctcccgataaggctgagcctaggaagcgccgtcgcggccgc

SEQ ID NO: 14039 - DNA, 756 bp, Zea mays
  Clone ID: LIB148-017-C6_FLI
catgaacaggatggacagggaagaacacctctacaccgcgttccagtacttcgacaaggacggcagcgggtgcatctccaaggaggagctggagcaggcgctcaaggagaaggggctcctggacggcagggacatcaaggacatcatctcggaggtcgacgccgacaacgacgggaggatcgactacagcgagttcgtggcgatgatgaggaaagggaccgccgagccgaaccccaagaagcggcgcgacgtcgtgttgtagcctgtgtaggagcatgcgtagaggtagctgctgatatatggtatggtatatcggatggtaaaatggaacggcgtccagcagttgatgccattgccacgacggtggttgcttgcacgctggtcgagcagcacaaggcgcgcgcggtggtggcagggagatgcgcgcactcggctgcgaatacgtggagatgctggagcatggaggggacagagactctttgacaatgtacgtagctactatgggatgatggaatggaaggatgcacgcatacctgatcgaccgaccgaggacctgtgctggagcctctgaacacacagcagcagcagctgctgctgctgtgtcttggatccgtaggtatgcttactgatggttcgagaattcgtatgcgtaaaacgtgcaatggccatggactgtgtatatatcctcagatgtgtaagtgtaagtaacgtcgtaaagggaagaagaaaaatataatatgatgagacagttttttt

SEQ ID NO: 14040 - DNA, 1149 bp, Zea mays
  Clone ID: LIB148-017-C8_FLI
cggcctttccctcccatatactcgccgtcggccagcggatctaatcggggcgggcgcgatggctgggcagaaccagcggctcaacgtcgtgccgacggtgacgatgctcggcgtcatgaaggcccggctcgtcggcgcgacccgcggccacgcgctgctgaagaagaagtccgacgcgctgacggtccagttccgcgccatcctcaagaagatcgtcgccgccaaggagtcgatgggcgagacgatgcgcgcctcctccttctccctcgccgaggccaagtacgtcgctggcgacggcgtccgccacgtcatcctccagtccgtccgcgcggcatccgtccgcgtccgctcccaccaggagaacgtggccggggtcaagctccccaagttcacccacttcgtcgaccccgccgcggcctccgggggcccctccaacgcgtccccgagcctcacgggcctggcccgcggcgggcagcaggtcgccgcctgccgctccgcgcacgtcaaggccatcgaggtgctcgtcgagctcgcctctctgcagacctccttcctcacgctcgacgaggccatcaagaccaccaaccgccgcgtcaacgcgctcgagaacgtcgtcaagcccaggatcgagaacaccatcagctacatcaagggggagctcgacgagctcgagcgcgaggacttcttcaggctcaagaagatccagggctacaagaagagggagatcgagcgccagatggccgccgccaggctatttgcggaggaacagcttgccgaggatctcgcgcttaagaggggtatctccgtgggggctgcggcaaacctgctggttgctggtggggagaaggacgacgacatcatcttctgaccactccttccatggccatccagtcattcaatcgtggcagaaacaataagttgatgctggagctccagaattgtatctgtttatagaatgatggagattttgattcagtaagtagtctggagtctagccatccgagaccctcaataatctgtacctggaaaccaaacagtgccaaataacttttacggagcgttatgtgcagctcatgtagaaaattcaattggaccgtatttcctgtcgtgtaccttctagtatcgtattatattatatatttattattc

SEQ ID NO: 14041 - DNA, 1465 bp, Zea mays
  Clone ID: LIB148-017-E10_FLI
gaaaatattcacattgaattaaattgtggaggcttcttggaagaagatttccgcagcatccttcgaactccatcttctcttggccggtctttctcccaccgccgcattaatagtttaccttccttcgatcggtcattctttcaagaccgtactggtagtttcacggagtgttctatagcagattcagagccacagttcgaaaacttgcagcttgaggacgaggactggttagtcaagccaccactgtccgcaggagcatatgctgccaatttcaatgatgaagaatggctggtcacaccactgaagcgctcccgtgtcatgaatggtattgaccatgaggatgaagagtggttagttaaggcgacgaaactgtctggtgccaaggatgctgatcttgaagctgaagagtggttagtcaagtcagggcagcctaacgatgctttggattcggacttccgcttcatacacgaattttctgaacaaggtgctgcagaacccttgcacatctatgtcagtgacaagaacgaggctgatttccagtatgtcaaggacatcctcaagaaatcagggttcagctgcggcgatgtcgactggtacgcgtccaatcagccagtgagccctgtggtctttgacgaggcagaatgctcgtgtcaggaggtcagcatggcaagcgatgaacctcacagcatcgtcaggcgcatgctcctgtttgatctcatcaacgaggtcctgctggacatctatgactcctcactcgtcatcggcccatggcactcacgcttcgacctgcgaaccagacccattcccatggggtaccatgtccttgaggaggtgtgggcgaaggtgagctgctacctgagcctgcattggaaggaaggccagacggtggaggacattgtggcacatgaccttatgagaaaggacggctggatgaacctggtatatgacgcggagtgcaccgcgttggacatggaggatctgatggtggaggaccttcttgatgacgttgtcattcagatagtgttagaatccattgatgaatgactatccggagcctctttttttaaccagcggcttgagcttcgcagtaatctgttcataaggctgaacagtgaagtgatatccgaaggaatgtactagatagatggatcgcttgtctgtctcgcattgtgcaacagtaactgtgtagatcattttaaaagattggcgattctatgaattgtcaaatgtggcagatgttggccatgcatacaaagttggaaacagaaggtaaacaatagataagaaatagcgaaacagatagcattatatacctgttaaattcaaccaaactgtcgtgagtttttattagtcaatactggtatatctaggttgtgtctcccctacaaatcctggtgttttgtactctattcatgagtctgtggaaggcacaattctgagtgtgaaaaacactactctgttatat

SEQ ID NO: 14042 - DNA, 872 bp, Zea mays
  Clone ID: LIB148-017-F2_FLI
gtgttcaccgccaacgactcgccgcccgatcagaagatccccttccaccacgagatggctcaggttccaacatttccgtccaaattgttcttcttctgcgaagtggagccaaagagtggcggagagacgccggttgtaccgagccattatgtctacaagaggatgaaggagaaattccctggattcgtggagaaactggagaaggacatgattgtatatacaagggttttaggagagggcgataacccgtcctcgtcaatcggtcgtggatggcaatcgacatttctcactaaagataaagttgttgctgaggaaagggccgcaaagctcgggataaagctagaatggaccgacgacagcgtgaagacggtcatgggccccatccccgcggtgaagtgggacgagagccgagggcggaagatctggttcaacagcattgtcgccgcctacattgggtggaaggacgcccggaacaaccccatgaaggcggtgaccttcggcgacggctcacccctgcccgctgacgtcatcgacgcgtgcggccaggtcctagaggaggagtctgtggccgtgccatggcagcacggcgacatcctcctcatcgacaactgggccgtcctgcactctcgacgctcgtttgagccaccgcgtcgcatcctcgcctcgatctgtaaatgatgtgtattgatgcgctgcgggttttctgcttcgatgggcaacgaaggcctgaaactcacacgttggaaagagcggtgtttaaaatattagaggtgtgcgtgcgggcgaaataattggtatttcgccgctcaaaacattgtctcctagttataattaccattgtatctatgagttatgagtccatttgagtctac

SEQ ID NO: 14043 - DNA, 652 bp, Zea mays
  Clone ID: LIB148-017-H12_FLI
gcccggccctctcctttcgtcaccatcacatccagccagccaacaaaaatgtcgcgcgtcacagctgcggtgctcttttacatcctcgccgttgctgccctcagcgcggccgaggccccggcagagtcaccgaaggaaggcagtgctgccaaggcacctgaggctgccaagagaactgctgcccccgctgaagcacccggagccgcgtccacccccgtcgccgccgctgccccatcatcgtcgtctaggaagtctggtccagctaccgcgccagccaccgcctctacacccccttcttccacggacgaggagttgagcccttccccgccagcatccaccgccgcggcgtcccctgcggctgagggaccggctgctgatgactccgccggtgctgctgcccttggaagtggagctgccatcgccggcgttgccgctgctgttgctaccatgatcttcttctactaaactcaccgacgatggtcgtgtcgcggtgagacattagggtggacacgtaattggctgtgctgtaatcgctctcgtctggtggggagggagggaccaagtgtttctttgctttgctcacttcgtttgctcttgtaacattatggggtcaaccgttatgtaactaatggatttgattaatctggtctct

SEQ ID NO: 14044 - DNA, 615 bp, Zea mays
  Clone ID: LIB148-018-A8_FLI
ttttatcaacgcttctcctgctggttactccgcgcgccttctctttctctcccggacgtcgatcgtgttcttcagcacgggctagctagctccctccctcccagccatggcgacgccggacaacaaggggcacgggcatccgctgcccaagtttggggagtgggacgtgaagaatccggccacgtccgagggcttcaccgtcatattccagaaggcccgcgacgacaagaagaccaccaccggccctggggctgggaacgcgcgcgcaggcattccgccggccttcaggaacggcggcggcgacggcgggtacaggcccgacttcggcgacggcaaccagtacacgccgcccaaacggaagaagtgggccttctgtggctgctgaatcgaagctcgctgtgctgctgtgctgactcgaaaggagaacggatcgtgcagcagctcaagtgatccaggatgatgggagcgccgagacacgatggaaggcattaattatttcagccatggtgtttcgccttgctttaaccttttgctcatctctaccgaggaacactagttccatcgggtaactgaacctgcaaatcttcatgatgaaactgtcgcatcatttgtttc

SEQ ID NO: 14045 - DNA, 936 bp, Zea mays
  Clone ID: LIB148-018-C8_FLI
cgaagattgccacttccctaacagcatcgagaaggcaatcagaagcgcttttgtaaaggccgacaatgcaattgcggattcccattctcttgaccggaattctgggaccacagcattgacggtccttatatttggcaggacactgcttgttgcgaatgccggtgactgtcgagctgtattaggaaagcgaggccgagctgttgaactctctagagaccacaaacccagctgcatagttgaaaggctcagaatcgaaaacctgggtggtaccgtctttgatggctacctcaacggtcagctggctgtagcaagggcaatcggtgattggcacatgaaaggctccaagggctctgtatgccctcttacaccagaacctgagtttagggaggttaggcttactgaggaagatgagttcttgataataggctgtgatggcctttgggatgtgatgagcagccagtttgctgtttccatggtcaggaaagagctgatggaacacaatgatccacaacggtgctcgcgagagcttgtccacgaagcgcttaggcgcgactgctgtgataacctaaccgtagttgttgtgtgcttctcagcggacccaccccctcaaatcgagatcccaagattccgagtacgaagaagcatctcaatggaagggcttcataggctgaggggtgctcttgacagtaatatctgaagcttaaaagtgtcccttcggctgtaacttctgtcgtcgttgtgatttatatgtaccggtcaccatttgattgttggatgctcacgatgtaatcgagcaattaaccgacattgttctggtacgaatgagagttataggagttgatcatttttttctctggttcagaattccacttgtatgattggatgagctccctgtttattatgaaaactaaaagataatgatgtcattatgggatg

SEQ ID NO: 14046 - DNA, 821 bp, Zea mays
  Clone ID: LIB148-018-D9_FLI
caagcagcaggtgttcatccagtccgatgactcgtctgtgctcgcggcgttcaagaagttcgccaggttcaggagggtgctcaacatcgaggccaagatcagcggcgcctccaaaccgtcggtggatgacatcaagaagtacgcggacacggtgagggtcaaccggaactccgtggcgcagatcaatggctacttcctgacgcacttcaccgacacggtcagcaacctacaggacgccaacatcaccgtgtttgtcggcgtactcaagaacgagttcatgaacctcggcttcgactacttcgctgacccgacggtcgagatcgctacctacacgttggcagtgctggctgatgggctcgtcacggacaaccctgccactgcagcttcctacttcaggagtccatgcagtgacatgaagctgaacctgagctacacgatcctgcctgcacaacctggcgctctggtcaacctggcatccccgggggcgctggctccggcgggagcgccggcaccgttgctccaacccgctgacgttgtggacccgccgctgcctccagttaaagctgtgatcgccgccgacgcgccggcgccaggggcggctgacaacacctcctcggcgttcagctccagcgcggggaacggcctcttgtgggctggcatcgctgccctcttgtccctgacctttctgcactgatctttccttggcgtggcttccattcacgttttccttcttcctctccgtgtttccctcttactcctcaaatgtagctctaactgtaacataatgttccttaaatagatataaattgtcatcaacctgc

SEQ ID NO: 14047 - DNA, 1335 bp, Zea mays
  Clone ID: LIB148-018-F2_FLI
ctcttgtgcgcccccccatccctcaactcgcgcgcgcacggccgcatccgcggcacgccgcgccgcatcccgtgcccgcgcaaaaccggatccgccgccgccatggcggtggaccgcgtggacggcgaggaggcgttcgaggaggtggacccgacggggcggttcgggcggtacgcggacgtgctggggctcgggtccgtcaagaaggtgtaccgcgggttcgaccaggaggaggggatcgaggtggcgtggaaccgtgtccggctgcggtcgctggccgaccgcgaccccggcatggtggagcgcctccacgccgaggtgcgcctcctccgctcgctcagccacgaccacatcatcggcttccacaaggtgtggctggaccgcgacgccggcgtcctcaacttcatcaccgaggtctgcacctccgggagcctccgcgagtaccgccaccgacaccgccacgtctccgtcaaggcgctcaagaagtgggcgcgccagatcctcgaggggctcaaccacctccacacccacgacccctgcatcatccaccgcgacctcaactgcagcaacgtcttcatcaatggcaacaacggccaggtcaagatcggcgacctcgggctggcggcgatcgtggacaagacgcacgtggcgcacaccatcctgggcacgccggagttcatggcgccggagctgtacacggagacgtacactgagtcggtggacatctactcgtacggcatgtgcgtgctggagatggtcacgcgggaggtgccctacgccgagtgcggcagcgtcgtgcagatcttccacaacgtcacccggggcgtcccgcccgcggcgctcaagcggctcaaggacgccgagctgcggggcttcatcgagcgctgcatcggccagccccggaaccggccctcggccgccgatctcctgcaggaccccttcttcaacggcgtccgtggcggggacgacgacgacgacgccacggcgctcgccgacgcctccagcgttgtcgccgccacgcccgtgccgcgccccaggagctacgtcgacgacctcgccgggctccggctggactgacctgaccgtccctcccagcgttctgcctttcatcagtaccgggattccggcgcgtgttagacgtgttttagaagtggattcctggccggcgagcgagactgcctgcaagtgtgtatagattattgtttatttttacgtctccccggcgattggctagttttcactgtacctgtaccaataattgttgttggctttgcgccagatgaagcgctgtatttgactttgcgtgctgattctttcaaacagaggttggttggc

SEQ ID NO: 14048 - DNA, 820 bp, Zea mays
  Clone ID: LIB148-018-F5_FLI
gacaagagcagcggcaggcaggtcgtcgatcgccttgggtggtgaataattgaagaagaagaagaggcggagacttgagcaggtgatgtcttcgctgccaggaggcttcctgtgcgtgcgcgtcctgcgcgggatcgacctcgtcagctgcgacgccaagggcagcgacccctacgtcgtgctcagcctggatggacagaaactgaagacgagcgtgatgaagaagacggtgaacccgttgtggaacgaggacctcaccttggccgtcatggacgcgtcggcgcccatcaagctagaggtcttcgacaaggacacgttcagcaaggacgacatgatgggggacgcggagttcgacgtggaggcgctggcgcagatcgtgcagatggacctggaggacatccgcagcggcaccgtcgtccgcaccgtccgccccggcggcacgggaagctgcctcgccgacgagagccacatcatctgggacaagggccacgtcgtgcaggacctcctcctcaggctccggaacgtcgactccggcgtcgtccacctgcagctcagatgggtcgccaccccacctgaagactgaactggaggagacgaactgcagtatgtacgtgctctcgctccatatccccatgggaagaacgtacggattcgctcgcgtgacgatgatactatgcgatgcatgcatgctcaagagtcaagatgtcactgtcttctgtgtattttagtacagccacgtacattgtcgccatccaacatcactatgcatggacttttttttttgatataaatatatatatgtggaactaactaatttatt

SEQ ID NO: 14049 - DNA, 676 bp, Zea mays
  Clone ID: LIB148-018-G3_FLI
ctccaagccaagcaggtccagagatctcgatcggtcctcttgcagaaacgaggaaagaaaacatgtcttctcgctgggttagggcggaggtgtacccgctgttcgcgacgacaggggtggcggtggggatctgcgtgatgcagctggtgcgcaacatcaccaccaacccggaggtgcgggtgaccaaggagaagcgggcggccggggtgctggacaaccacgacgaggggcggcgctactcgcagcacggcgtgcgcaggttctggctctccaagcgccgcgactacatgcaggccatggacaaggtgcccacggaccctaataagtagacgacgacgatataccccaatgcatggcaagaagatatatatatcagcacaacgcaactgcatgcgatgctgcttgttgctgcaattaatccactatactatatactataggagtattattaattccagttgcatcatgcatgatgatatacgtgtgtctctatatgcatgcgttggtatatacaattcagatatgcatggtgtatacaagtggtagctatacgcacgtacactacatgcagtcattaatttgtacgtcttcgcgtgcatttgggctgtcagcttattaattaaagttcatactatttactaaacggatctatacatgttcaggttcagcagtaacc

SEQ ID NO: 14050 - DNA, 1044 bp, Zea mays
  Clone ID: LIB148-018-H1_FLI
ttgcttatgagtatgcaactaggggatcattgcatgatatcctccatggtaaaaagggtgtcaaaggagcccagccagggccagtcctgtcatggatgcagcgagctaggattgccgtatgtgctgctcggggtctcgagttcctccacgagaaggccgatcctcgagtggtccaccgcgacatcaagtcaagcaacatactgctctttgaccatgatgttgcgaagatcggggacttcgacatctcaaaccaggcccctgacatggctgcgcgcctccactctactcgcgttcttggcacctttggctaccatgcaccagaatatgccatgactggacagcttagcacgaagagtgatgtctacagctttggagttgtgctgctggagcttttaaccggtcgcaagccagttgaccacacactgccccgtggccagcagagccttgtgacatgggctacaccgaggcttagtgaagacaaggtgaggcaatgcgtcgatccaaggctcggagacgaataccctccaaaggctgtagccaagatggctgctgtggccgccctctgcgtgcaatacgagggtgaattccgtcccaacatgagcatcgtcgtcaaggctctgaaccccttgctgcacagccggtctggcaaccgccctactgcctcgtcggcctcccacgctgccgcagcagcagagcgatccggactgtgatttcccatcgctgcgacaactttgggttcacgaaaaaggaccgtcttgtggagcgttggtgttgctgtgtcgtgactgccaacgccttggcgcagagaagagctttgccatgcagctgtgtattgtaaattgttttgtaagcgatgcgcctcctggtttgtgtgccctgtcatcatcctattctattctagaaaatggtgtacgatggatcatggatgataccaactatttggtctcttttggaatgcgaaaatgcagcacttggcttcctatgtgtgtagatcaggtttgttgttctattgctacaaaccaggaatactacagtatgaatatt

SEQ ID NO: 14051 - DNA, 1741 bp, Zea mays
  Clone ID: LIB148-018-H10_FLI
gataaaaagatcttagttgacatgttaatctgggctattgacaatcctccaccggcaaattatttgctaatttctggtgatcgggacttctcgaatgcccttcataagctagtgatgaggcggtacaatattctactagcacaacctccaaatgtgtctcaagcgcttactgctgcagcaaaacatgtttggctatggaaagacctcgtggctggggaacaccattggcagagtccccatacataagtagcataacaaatggcagtgtggaccattcaaatgcatcgaagaacatggattcagattcttcagttgcaactccacatagcagtactcaaggacagaatagcataccgtgtgatcagcaaaaaggtggtaacagcaaggcagacaaacaatctaaagttaggcaacctcggaaaaaccagtcagatgaagcttcagttgatgggctacctggtagtcctaaaggaagcactgctcccgagccaaatcaatctcagccttcatcatcctcactaccaagttctgatttgcaagatgagggtggggcacaggtggttcagctgaatacacaaaaaaaccagccatcttcccagcccaaaaagcctgtaaaatccactctttcccatcaaaagagtgttcctcatgacttttaccatggtaagaagcctggtgcgtcaactgactcttcatctaaaaacggtgctcctgaagtgactaacaatggtcgtccaagacaacagaaaccccaatcctcaaagcaaccaagacaacagaaaccagtgaaccatcgtcctcatggtggatcatctggcaattttcaatcatcaaactcacatagaagcaactcatgtccagctctagctgggcataatggtattcctactgcaccaatgcaattctggccaagcggcccacattatcatggaccaccaatcaattatcctgatacggatcggttgaatatttctgaataccctagtggtattcataataaccaaggtttgcatgccaactaccatccaaaccatcctggtgcccatcatatcattcaacctggttacaatggttatagctacagacctccaactcgacctaacatgcctagcaacatgcaaaatattggacactggggagccaacccgggatgtccacagccatcttcagatcctcaagatcttgtaagatatatcttaggtgctttggaagttctgaagactgagaagattcccccaacagaacaatatataacagactgtatatgttatggtgatgctaatctaccaaaatttgatgttaagaaggcacttcaggttgccatgcagcatcaagcttgatgcgctgaaggcgccaaaagaaactgctgcaaacattatgagtagaaacggggctttaaccaacgttctatttgatcttccgtggctagttggaacaccagaacgcataacatgaacttccatcctactccctgatcttcttccgtccttcaaacaagaatatgcttctgctatctccttgaattttgactcagcctgcgatttcagatgcgttgggacacgatcaggatgggactccatcaccattcttctatacgcagccttcacctcggaaggggagggcctggagtagggagggaagcccaggagctccatggcctcgctgctcctcatcgccccgtgccgaccccgtctcctgcggcggggcgggggcgggggcgggcggggcggtgcggggcttg

SEQ ID NO: 14052 - DNA, 898 bp, Zea mays
  Clone ID: LIB148-019-D12_FLI
aactctacgtagatgtgaagataaataatgtggtaaaagtttgcaacaacgtacctaatcaaatgacaatggcaggtacatataaacgtaccccacatcgatatatactataaacaaacaaatacaatatggatcgagatatgtatggcgctccgcggattaatcaacgaattaataatcaattaatgaatcttggcgcgggcggcgggcgccggcgccggcgcgtcaccggcgccaccggtggcccgcttgatgagcgcgtgggcgacgcgcatgagcgcctcgaagtccttgttcttggcgagcagcgtggttttgacgggcgtggatggggcgtgcttgcagcagacgtcgcaggaccacgtgtcctcctccgccgtgtccaggaacagcttcacgtcgtggagcttgccgtcgtcgaggccgccctcggtgtcgtccaggtggtccagcgcctcctcgatctccccggcgcactcgttcaggcactgccacatgtcgttgtccttcaccacgtccatctcgtgccgcgcgtagtcgcccgccgcgccgcccgcggtcgtcgccgcgcggagcgccgcctccgccaggtcccgcggggtcttggagtcgctgtccgcctggagcgcgcgcaggcacacgtccgggtccggcgtcgctgcacacgacaccttgatgtcgacgccggcgccggcgccggcggcgcgcacgccgagggacacggacaggaacagcgcgatggccacggccagaagggagccgcagtaccagctcatggccgctctcgcctccatcgccgtggatatgctcgcacgatggatcggatcggagacgcttgctactccgggcgaccgggccggtgggagaggcgagaagaaatagctatagctagctatag

SEQ ID NO: 14053 - DNA, 1927 bp, Zea mays
  Clone ID: LIB148-019-F8_FLI
cccccgggaagcccatgcccaagaccatcaagttgaccaaccccgtgggcttccggtgccccgcccccaaccacaaagacagcgtgatgtacgtgtgctgcgtcaaggaccgcaagttcaaggcgaagaaggctaacagcacgcggtaccagacacggcggaaagcggacctgacgttcgcctacgacgtgctgcaggccaacaccaacaactaccaggtgcaggtgaccatcgacaactggagccccatcagccggctggacaactggaacctcacctgggagtggaagcgcggcgagttcatctacagcatgaagggcgcctacacgctgctcaaggaaggccccgcctgcatctacagccccgcagcgggctactacaaggacatggacttcacccccgtctacaactgcgagaagcggcccgtcatcgtggacctcccaccggagcgggagaaggacgacgccgtcgggaacctccccttctgctgcaagaacggcacgctgctgccgcccaccatggacccgtccaagtcgcgggccatgttccagatgcaggtgtacaagctgccgccggacctgaaccgcacggcgctgtacccgccgcagaactggaagatctccggcaagctcaacccgcagtacgcgtgcgggccacccgtccgcgtgagcccccaggagttcccggacccgacggggctcatgtcgaccacccccgccgtggcgtcgtggcaggtggcgtgcaacatcacgcggcccaagaagcgcgcctccaagtgctgcgtctccttctccgcctactacaacgactccgtggtgccgtgcaacacctgcgcctgcggctgcggcgacgacaccgcgacgtgcgacccggacaagcgcgccatgctgctgccaccggaggcgctgctcgtcccgttcgacaaccggtcggccaaggcacgggcgtgggccaagatcaagcactggcgggtgcccaaccccatgccgtgcagcgacaactgcggcgtcagcatcaactggcacgtcatcaacaactacaagtccggctggtcggcgcgcatgaccatcttcaactggcaggactacaccttcaaggattggtttgccgcagtgaccatgggcagccacttcagcggctacgagaacgtctactccttcaacggcacgcggatgggcgcccccttcaacaacaccatcttcatgcagggggtgccgggcctcgcttacctcgagcccatcaccgacgcgaagacgacatcggaacccaggcttcccggcaagcagcagtcggtcatctcgttcaccaggaaagacgcgcccaatgtcaacattcccagaggggaaggcttccccaagaggatctacttcgacggcgaggagtgcgcgctgccggataggatacccaaggtgtcgagcgcgcgccgacgggctgggaccgcgagcctgggtcagatagccatggcggcggcgctcgtgatgattgtggcgctagtggattccttgtgcctatgatgactgaaaacttctttggttcatagaggatttgactgacctagcgcgctgcatttgttgaacacttcattcattaattggaagggacaacttttttcactccagttcagagatcataaatgatccccacaaaatggaggaacagcattctacaaacgagagcacacaagcatccaagtggaaactgatccggattgaacagtggagggtaggatgaacatatattctggattggatccaacaaatgtttgtgaggatcatacgggtatgatgatgcttgtgagttgtgtgtaagggggaaagggcatgtaacatttcaaggctgtggtattattggttggacgtctatgctcattgggtttacacttttattccactttctttgtgttacacaaaagctcacgagtttgtgt

SEQ ID NO: 14054 - DNA, 1125 bp, Zea mays
  Clone ID: LIB148-019-G2_FLI
gtcctctctccatcggccatctctggcgcatgatcgaaccgcacgaccgaggcagcaagtgagtctcagacaccaccatgcaggcgatgcgtccggccgcggagggggaggcacaggagcaggcggtgagggcggaggcggacgaggtgaagagggaggtggcgaaggcgcacgacgaggaggaggcggtgcctgaggagaaagacgtggcggttgtaggggaggaggtggaggcggaggcggagacggagacagagactgaaggcgaggcggaggcagaggtcgaggccgaggtggaggtcgaggtggaggcggaggccggtgcatcgtctgcgaagaagaaccgtatccaggtgtccaccaacaagaagccgctctatttctacgtcaatctcgccaagaggtacatgcagaactacgacgaggttgagctctccgctctggggatggccattggtaccgtggtgaccgtcgctgagatcctcaagaacaatggcctcgccactgaaaagaagatcctcacatcaaccatcggcaccaaggatgaggcgaagggccggcttgtccgtaaagccaagatcgagatcctgctgtgcaaatcagagaacttcaacagcatcatgtcgagcaagaagtccgagcgcccgaagccgcccgccgaggaagagatcaaggtgtgatctatccgaccaacgaacttctccatcggccagcgcagcatgcatgcagagggccttcttccctagctagctagctagctaagctcccctgttccatttccagaggctggcagctcaccacacagctcagctcggattattgataatggggcatcgcggcagtctgattaagtactagtaaatcattcatgtcatgcatggcacattaattaccttattattagtccttgctgagatggatcagatcttgtgagttaagtaaaagcatgcaagatatgtcgacagacactacatgagatgacacggttctacaactctaccggagtctctagtttgttctgcttctgcatgcctttggcgtaatgtaaacgaacgctaaggtttctgtaattttgctgctgtcgcgctggcagtttggttccagatgaaccgttactgatctcgc

SEQ ID NO: 14055 - DNA, 915 bp, Zea mays
  Clone ID: LIB148-019-H12_FLI
cactttcctggcacacacggatgaagatcgcagtgggtgcagctagaggcatcgagtacttgcacgaggtagccaacccgccagtgatctaccgcgatctcaaggcatccaacatcctcttggacgcaagcttcaacgcgaagctgtcggacttcggtctggccaagcttggtccgagcggcgacaacacccatgtcagcacaagggtgatgggcacgtacggctactgcgctccagagtacgccatgactggcaagctgaccaagacatctgacatctatagctttggcgtggttctcttggagctcatcactgggaggcgagcgatcgacaccacgaaaccaactcgggagcagatccttgttcactgggcagcaccattcttcagggataagaggaagtttgtgaagatggccgacccattgcttgacatgaagtttcctctgaaaggtctgtaccaagcactcgcgatctcatccatgtgcttgcaagaagaagcaagcagtaggccgctgatcagcgatgtcgtgaccgcccttacatttcttgctgatccaaactatgaccctccggatgacatcaaggatcctctgcccataacagttccaaacctagacatggaaacaactggccaaaacggaacagaaggaggtaaagaacaattgcagcaaaacgaaggagaaagccgccattccacaaaaaacgaagaagaaggtagctgaaatgtggctttctctggaattacgaaatgttaaatcaagccagagctagctccttgaatgaaactaacaggtggacgtggtttggttaggtgtaatcaatttctcaacattcttgaaaccggtgtatgtcatataggcaaagatgtaatatcagctcattttcttgaatgaaactagcgtgtgcagtttggtt

SEQ ID NO: 14056 - DNA, 784 bp, Zea mays
  Clone ID: LIB148-020-C10_FLI
ccgccaacggggccgggccccggcggcgggggtgggcgcgggcgcggatgcggcggtacagcgaggcgtccacctcgggtctgccgccgccgccgccgccgccgcaggaggcggcggagtcgtcgtccgggggcaggaggcgagggcgcaaggtggcgccggagcccaaggagccggcggaggaggggaccgccgcgctgccgccgatgcccggctcgcccagcttcaggtactactgccagaagaagacggcggccgtcgacaggatcgtggccgacgccgacgccgccgacgccgatgactccgtcagggtcagagcgacggcgcgtcagctgagcaacaggtgcgaaatcacggcgaccaaggcacacgattctaccgaggttgctcaacctaaagagggaaccagatggcttaggttcagtggcctgtccctcgtcgctaccgcttggcacaacttgatcagccgacaaagaagcaaacattcgccgcctcctgctgccgcaacctctcaaccatgaccaggcagcgctgtacgggatcctcagcttgtaaaaaacacgcacacacacgcatggctcatccatccatccatccatgctacatttgcagtcatttgctgttattttccaatcctggttagttcttgtaagctaaccccgcatccgataagctaatcctgtaaatggcgcaaggagcatcagctctggactgctcctgttgtagagaaaaaaaaatactacagcttagagttggggaaggagggcaatctggaaattcatcc

SEQ ID NO: 14057 - DNA, 1708 bp, Zea mays
  Clone ID: LIB148-020-E3_FLI
cgcgaggagagctcggagcgggagggtacgggccgtcggatgctcgcagctgccaccgccgcctacggctattttaaccccgcgctcctgccgacgccgcactcgcccccggcctcctcccgcctcccagatctcgctcgctcggcgccagttgcctcgcagtttggatcatctcatacctcggcgaagatgagggagatcctgcacatccagggagggcaatgtggcaaccagattggcgccaagttctgggaggtggtgtgcgatgaacatggcattgaccctaccgggcggtacactggcaattccgaccttcagttggagcgtgttaatgtctactacaatgaagcctcctgcggacgctttgttccccgcgctgttctcatggatcttgagcctgggacaatggacagtgtccggaccggaccctatgggcagatcttccgccctgacaactttgtgtttgggcaatctggtgctggtaacaattgggctaagggccactacaccgagggtgctgagctcattgactctgttctggatgttgtgaggaaggaagctgagaactgtgactgcttgcaaggattccaagtatgccactcccttggtggtggtactggatctggtatgggtacgctgttgatctcaaagatcagggaagagtaccctgaccgcatgatgcttacattctcagttttcccctcaccgaaagtatctgataccgtggttgagccatacaatgccactctttctgtccaccagttggtcgagaatgctgatgagtgcatggttctcgataacgaagccctctatgacatctgcttcaggactcttaagctgaccacccctagctttggtgatctgaaccatttgatctctgcaaccatgagtggagtcacctgctgcctaaggttccctggtcagctgaactccgacctcaggaagctggcagtgaacctgatccccttcccccgtctccacttcttcatggtcggcttcgcgccgctgacgtcccgtggctcccagcagtaccgggccctcacagtccccgagctcacgcagcagatgtgggatgccaagaacatgatgtgtgccgctgaccctcgccatgggcgttacctcaccgcctcggccatgttccgcgggaagatgagcaccaaggaggttgacgagcagatgatcaacgtccagaacaagaactcgtcctacttcgtggagtggatccccaacaacgtcaagtccagcgtgtgcgacatcccgcccaggggcctgtccatggcgtccaccttcatcggcaactcgacctccatccaggagatgttccggagggtgagcgagcagttcactgccatgttcaggaggaaggctttcttgcactggtacacgggcgagggcatggacgagatggagttcaccgaggccgagagcaacatgaacgacctcgtgtcggagtaccagcagtaccaggacgcgactgccgacgaggaggagtacgaggacgaggaggaggtgcaggccgatgacatgtgaggggagggctgttatcgtgtgaagccttgtggtccctagggcaagcggacctcgatgagttcggtgttccctttcgtgttgttgccatctttctactgctagcgtacccaccctcgtggcccattccgtcgctgttgacgtatgtatttttcttgtgctatggaaccttgcttttggt

SEQ ID NO: 14058 - DNA, 1232 bp, Zea mays
  Clone ID: LIB148-021-B6_FLI
gaccctcctccccctctccggcgcgcgacgctcgccgccgcgcctcccctcccctcctccgaacgccgtggctgccgtgcgcccgaccggccggtgacggacacggcagctgctacgagaggaggaggatatatactagtatatagctagagcaattattagctggtcgtaagcatgaatcgattggacatgatagacaacatcgacggccgtcgggtaaccaagaacaaggcgcgcatccaagttggcgactcctcttcgtcggacgaaagcgacagggagaaggaggaagatgaagaagaagcacatgaggaagtggccaaggcgcccccgttgggttggaatcatcacaatcaccacgaagcggccggcggcattggcaacaacagcaacaggaggcggcttctgtcgaagcagctgtccatgaaggagaccaccagggagatcaaatgggagaagcgccggcggcagatactgcggcgcagcagcctggtggtgtcgttaaacgacgacggaggaggaggatgctgcggcagcatgaagagcgccgccgaggaaccggaacggcactgtcatcatcacgttacgaggtcttcgtcggagcgcgtaatgaggtgcctgaccgacgaggacctggacgagctgcggggctccttcgagctcgggttcgggttcgacgaggagtccggcggcgcccacctccgcgacacgctccccgccctcgacttctacttcgccgtgaaccgtcagctgtccgaccccgccaagctgcggacgctgtcgtcggcggcgagcctcacgtccacgccgtcggccgtgtcctcgtcgtccacgctccccgacgtcccgagcgacccacgcagccccaaggtcggcgcaaccgccgcgtctggcggcggcgccgacgcatggaagatttttacgccaggtgacaaccctcagcttgtgaagacgaggctgaggcactgggcgcaggtggtggcttgctccatcaagcacggctgataagacgacgcgcggacggacgatgtcctgtgtagtcgagagcaatatgttatataggtgggtggccaaattaaaatgtgaaactcttgatgaatgaattaataaccagcaaccaccaagaatgatcgatgtctaaacacgcgtggtcgccgttgtcgtctgtcattcctcgtgtacagaagaagcttagtgcctaacacatgaattaacggtacactgaatctatc

SEQ ID NO: 14059 - DNA, 947 bp, Zea mays
  Clone ID: LIB148-021-F2_FLI
gccctgcccccgctccatctcgcagctcgtcaagaccaacggccgccgcgccttcctcgtagacaccctcgccctggtcaggaagctggagtcgcagggcgtgcccaccaagcaggcggaggcgatcacctccgccatcacggaggtcctcaacgacagcctcgagagcatctccgagtccttcgtctccaaggccgagatgcagaagagtgagatgctgcaggagtccaatatctccaagttcaagtcccaagtgcagagctcgcaggaaaaccatttctctttactacagcgggagactgagaaacttcgcggagatattgataagatgaggagtgaactgaagtatgagatcgacaaggtcaccgcaggacagcgattggatctgaatcttgaaagagggcgcatacgtgatgagcttgccaagcagaatgaggaaaccactgagcttaccacaaagcttgacaaggaaatccactcactgaaggcccagttggaggcagcaaagtacgatgtcatcaagtactgcataggtaccattgtttcgatctcagccgtcggcctcgccgtcctccgcatcgtgatgtgaaggcagcaaagcaaatacgttctttggttttacccatattcgtcgcccgtccgtggaaacccgcaagaagagaataggttctaattctgttcctagtttttaaaggggacaaaacgtgctcaggggagggggacacttggtagtagggagatgttgctcaaacttgtaaaaatagattgcccgtggaagaaatgcatccgaaatgattctttacctgtgctgaagcgtgcctggtctccagagctgctgaagccactgttactgtgggggatcctgaactgtgttagcctcgtcctgtgttggagccagcaatttgggctctgccatctggccgttatcagttctgcccactcgtttg

SEQ ID NO: 14060 - DNA, 1312 bp, Zea mays
  Clone ID: LIB148-021-F9_FLI
caaagtcaaaggacaacgatgcaaaagcgtccgggcccggtgggtccttcgacatcaccaagttgggcgcctccggcaatggcaagacggatagcacgaaggctgtgcaggaggcgtgggcatcagcgtgcggcggcaccgggaagcagacgatcctcatccccaagggcgacttcctcgtcggaccactcaacttcacaggcccatgcaagggcgacgtgaccatccaggtgaatggcaatctgctggcgaccacggacctaagccagtacaaggatcatggtaattggatcgagattctacgcgtggacaaccttgtcatcaccggcaagggaaagctcgacgggcaggggccagccgtgtggagcaagaactcctgcgtcaagaagtacgactgcaagatccttcccaactcgctggtgatggacttcgtgaacaacggggaggtgtccgggatcacgctgctcaactccaagttcttccacatgaacatgtacaagtgcaaggacatgctgatcaaggacgtcaatgtgacggcgcccggggacagccccaacacggacggcatccacatgggcgactcgtccggggtcaccatcaccaacaccgtcatcggcgtcggcgacgactgcatctccatcggccccgggacctccaaggtgaacatcaccggcgtgacctgcggccccggccacggcatcagcatcggcagcctagggcggtacaaggacgagaaggacgtcacggatatcaacgtcaaggactgcacgcttaagaagacggccaacggcgtccgcatcaaggcgtatgaggacgccgcctccgtgctcaccgcctccaagatccactatgagaatatcaagatggaggactcgggctaccccatcatcatcgacatgaagtactgccccaacaagttatgcaccgccaatggtgcctccaaggtcaccgtcaaggacgtcaccttcaagaacatcactggcacctcctccaccccggaggccgtcaacctgctctgctctgccaagatcccatgcaccggcgtcaccatggacgacgtcaacatcaagtacagtggcaccaacaacaagaccatggccgtatgcaagaacgctaagggcagcgccaagggttgcctcaaggagctcgcatgcttctagaaccaccatcgacccatctctctagttatacaatgtgtttggttgttggatgctgagagattggttctcagctcagatgcaagctgcgcctagcctgtgtaggtttgtgctggtacattgagagctcttatttatttgctttgattgcaatt

SEQ ID NO: 14061 - DNA, 2010 bp, Zea mays
  Clone ID: LIB148-022-A5_FLI
tcggccggtcgatagatcgatccacgtacgcgcatacccatgcaccacctctagctagtttcggtttgatttcattccatttcttctttccatccatccacccaatccaatcaaattagtaatgagcaaaggtgctatcatcggcgcgtcgaccgtccttgtggtggcggtggtcgcggccgtgtgcgtggtgtccttcaagggcaactccggcaagggcgatggcgacgagaacctgtccatgtcggtgaagtcggtgaaggccttctgccagcccgcggactacaaggagacgtgcgaggcggagctgtccaaggcggcgggcaacgccagctcgccgtcggacctggccaaggtcatcttcaaggtcaccaccgacaagatccacaaggccatcagcgagtcggcgacgctggaagagctcaagaacgacccgcgcacgtcgggcgcgctccacgactgcaaggagatgctggggtacgccatcgacgagctcaagtcgtccttcgacaagctgggcggcttcgagatgaccaacttcaataaggccgtggacgacctcaagacgtggctcagcgccgcgctcacgtaccaggacacctgcctggacggcttcgcgaacgccaccaccaccgaggcctccgccaagatgcagaaggcgctcaacgcgtcgcaggagctgacggaggacatcctggcggtggtggaccagttctccgacacgctgggagggctcagcatcggccgccgcctgctgctcacgcccagctgggtgtcggagccagccgaccccgccaggcagcggctcctggccgccgacagccccgcgggctccccggacttcaagcccaacgtcacggtggcggcggacggcagcggcgacgtcaagacgatcacggaggcgctggagaaggtgcctgtcaagaacgcggacctatacgtggtgtacgtgaaggccggcacgtacaaggagtacgtcaccgtgggccgtccccagacgaacgtggccttcatcggcgacggcgccgagaagaccatcatcacggggaacaagaacttcaagatgaacctgaccaccaaggacacggccaccatgcaggcgatcggcaacggcttcttcatgcgggacatccgggtggagaacacggcggggcccgagaaccaccaggccgtggcgctgcgtgtgcagagcgacctggccgtgttctaccagtgcaccttcgacggctaccaggacacgctgtacacgcacgcgcagcggcagttcttccgcgactgccgggtgaccggcaccatcgacttcatcttcggcaactcccaggtggtgctgcagaactgcctgatccagccccggaagcccatggagaaccaggccaacatcatcacggcgcaggggcggcgggacaagcgctccgtgggcggcaccgtgctgcacaactgcaccatcgagccccacccggacttcaaggaggaagccggcgggaagatccgcacgtacctggcgcggccctggaaggagtactcccggacgatctacatccagaacgacattggtggcttcatcgaccccaagggatggctcgagtggaacggcgacttcggcctcgagacactcttctacgcggaggtggacaaccgcggcgacggcgccgacatgagcaagcgcgccaagtggggaggcatcaagaccgtcacctacgaggaggcacagaaggagttcaccgtagagaccttcatccaggggcagcagttcatccccaagttcggggtgccgttcatcccgggattgctgccgcaggagcaaaaaggcaggacacactgatcatccagccttcacttcacttcactcactcactactaccacctaatatcagttggactggacctgcacttcagcgagtcacccccggcccagcccactaatatgtccactgtactctagtattcgatttcccaatcttttttctcttctcttttgtcaattattaattatatacatcttttattatt

SEQ ID NO: 14062 - DNA, 889 bp, Zea mays
  Clone ID: LIB148-022-C2_FLI
gcccgacgcgcggtgggagaaagaggacatgcccgtgggccgcgtcatgggcgacatgctgatcctccccaccggcgacctgctgctgctgagcggcgccgccaagggctgctccggctggggcttcgggcggcagccggtgctgaccccggtcctgtactcgccgcggaaggcgcagggcccgcggttccgggcgctggcgtcgtcgaccatcgcgcgcatgtaccactccaccagcgccgtgctgcccgacgccacggtgctggtggccggcggcaacacgaacgcggcgtacaacttcagcggcgtggacttccccaccgaggtgcgcgtggagcggttctccccgccgtacctcagcgagggggccgccggcaaccgcccggtgctggacgcggcgtcgttgcccgcggaggggatgcagtacggctccccgctcacgttccggttctctgtgcccgccgagcccgtggcagaggccgacgtgaagaccaccatgtacgcgccgccgttcaccacgcacggctgctccatgaaccagcggctgctgatcctgcgtgtcaccgcgttcgtcgaggagggccggagctacagggtgaccgtggacgcgccgagaaagccggagctggcgccgcgagggtactacctgttgttcgtggtggcgaagggcgtgccgagcatgggtgcgtgggtgaaggtccggtgagatcgatcagctcacatccaccgtgtgggtcgctgcgggatcgtgtacacaagtggagagccagcctaactctctctctctctctctgtgtgtgtctctttgcgttctttggttttgttttcctgctagggatggatggatgtaaataggatcgatcagattggccagttcaccgctggatcc

SEQ ID NO: 14063 - DNA, 827 bp, Zea mays
  Clone ID: LIB148-022-C8_FLI
tgggcgcggcgaagggcatcgagtacctgcacgaggtggccaacccgccggtgatctaccgcgacctcaaggcgtccaacatcctccttgacagggaattcaacgccaagctctccgacttcgggctcgccaagctgggccccatgggcgaccagagccacgtcagcaccagggtcatgggcacgtacggctactgcgcccccgagtacgccatgaccggcaagctcaccaagatgtcggacatctacagcttcggcgtcgtgctgctcgagctcatcaccggccgccgcgccatcgacgtcacgaggccgtccgaggagcaggtcctcgttcactgggcaacgcctctgctgagagacaggcggaggttcatgaagctggccgacccgttgctgggcaagaggtaccccgtgaaggggctgttccaggcgctcgccgtcgcgtccatgtgcttgcaggaggacgctgccagccggccggggatcagcgacgtcgtctcggcgctctcgttcctcgccgatccgcaatactaccctccccaaggcacgggagccgagcagaaggccacagccacaggtcgagagagtaaacccaaggaggatactacagacaaggatagcagtcctcataaggccgaaatgatcagggcagacgacgaaacgaagcatagatgatgaccgtagggggaagctaaccacgggaaagggaggaacactgcagagctgtctgtctgctctcttgaatcttctttttgtaaagcgtacaccacgtaggcaggatgtaacaacaacattcaaggagttatcttgactgagatgcagattttc

SEQ ID NO: 14064 - DNA, 680 bp, Zea mays
  Clone ID: LIB148-022-E2_FLI
ggcttcttcgtcgtacgccggcgtccctgctagtgcctgccgttgaactatccggccaccattgatccgacctcccctaagccatcgatgagtagagaaaaacagtgaacgccacctctgtactcgccccaccttatggcgcgtcgctcctgcagtaccggcccacgctctgcgcggcgctcaggtgttacggctgccctcaaatccgtcgtcggaccattggcactggggcaagcaaaagcacggacaggtgctcggcgtgctgcaacggcttccgatttgcccggctagatggaagacggctggggagcatcttctctggggaacaccgcgtgtcatgggtgccttgccgaagttcagggacggcgtgattgctcatcgtcgttcatgctccaccgtggcgccacccatctccgtgggcagtgggctgcatcgtccaatcgaccgtgagatcacgagaatctgaagatcatcctggtacctggaatctcaagtcccaggtcaagaacaggtaccacaggatgtggcgcatggaggatgctgtgacgagttcgtgagaggtctaggtcgttgtctcccagtcaactttgggttgctggaccgttgtctcctcataatgtaattatttgtttattttgtacagaactcctgttatgtagtaaagatgtgacattcgatcc

SEQ ID NO: 14065 - DNA, 955 bp, Zea mays
  Clone ID: LIB148-022-F1_FLI
cgccatcgagcacccgtggcgcagcatcctggagcgcaggtaccggccgcagctgacggtggcagcgctgatccccttcttccagcagctgacgggcatcaacgtgatcatgttctacgcgccggtgctgttcctgaccatcggcttcggcgacgacgcgtcgctgatggcggccgtcatcacggggctggtcaacatgttcgccaccgtggtgtccatcgtgtgcgtggaccgcctgggccggcgcgcgctgttcctgcagggcggtacgcagatgttcgtctcccagatcgtggtgggcacgctgatcgcgctccagttcggcaccgccggcgtgggcgagatgtcccgctccaacgcctggctgctggtgctcttcatctgcctctacgtcgccgggttcgcctggtcgtgggggccgctgggctggctcgtcccctcggaggtgttcgcgctggaggtccggtcggcggggcagagcatcgccgtgtgcgtcaacatgctgctcaccttcatcatcggccaggccttcctcagcatgctgtgctcgctcaagttcgggctcttctacttcttcgccgggtggatgttcatcatgaccaccttcatcgccctcttcctgccggagaccaagggggtgcccatcgaggagatgaacctcgtctggagccgccactggttctggggcaagtacgtcaacgtcgacacacaacacggcggcgccagcccgagatccaacggcgtctgatctgagcaagctgcagcaacacctcggcacctgacctggccatgcatgcacacgtatactataatctaacaacgtagctgacctgggcaaattgccagcctgacagggccagggtgctcgaatgtctcactctcaccgccgactaactttccatcaaaattgattcttgttcatactccatagcatgcacagattgattgaactgct

SEQ ID NO: 14066 - DNA, 1094 bp, Zea mays
  Clone ID: LIB148-022-F3_FLI
gtccacggcgacgatctgcagcggcgatggctcggcgaccggacgacctagcgttggccgccatcacctttgcgatcgtcgccttgtgcgcgcggtatgcatcggccgtgggcactacaccccagtcaaccttcagctacaaggagggtgaccctaccgggcctacaaaatgggccacattgcagaaggactgggatgtctgtgacagcggcaccgagcagtccccgatcgacgtcgccaaggtggaggtctctgaggatttagacccgctgcagcagacctacgagcctggcgacgccgtcatgcacaaccggctccacgatttcatgctgaactggacaggagggaacggcggcctgacaatcgaagggaagaagtacaagctgaagcaggtgcactggcacgttccctctgagcacaccgtcaacggcacccgctttgacgcggagatgcacatggtccacgaggactccaccgacgccaagtcgaaagccgtcgtcgcggtgctgttcagcgccaaagcaggcaagtccagcaagctgctccgcgatgtacctcaagccctacttcgagaggctcgctggtaaacagaacggcacggaggaagtgaagggccccgtcgtcgatccggcagcctggatagacaaggcctctggatactacgggtacgagggctcgcttacaaccccaccctgcactcaaggagtgctttggactatcatgagcaaggtagcagatgcatccaaggaggagatccactccatcgagtcggtgaaggaggcaaatgcacggccggctcagaaaatcaacagccgcgttgttcgctactacaaagcagcaggagccacagaagcgccggcgccggcgccggcgccagaagcaacctgatcgaggagaacgtgagccttgaagacgtaccacgatgcttctttgttcggcttcctatatatactcgaaagctcgtgtgctgagtattgacagtttctttggtgaaacaggttagaacagtagctcaccctcccgagagtatgggttgaaaatctttggcgaattgatgtctcgatgcaaattaaacaggcatgccatctttgtct

SEQ ID NO: 14067 - DNA, 1313 bp, Zea mays
  Clone ID: LIB148-022-G2_FLI
gtcccattctgatcctgtggacagtgggttaataatagtaataaaaatgataatccacctcctctgcttcccaggcccagcagcaggagctcccccgtctccgtcctcctccgcctctgtcagggtcccggtcggacttcctcacgaccgccgcgccaaatcccgtctcgttcctccgttccgctgcgcatcctcaggaatggaacttggcgccaccactgccctgtaccctctgcaccgctgcaaaaccatttacctggtcaggcatgcccagggcattcacaacgtcgcaggcgagaaggacttcggcgcctacatgtcacatgaactgttcgatgctcagctcacccctttgggttggaaccaagtcgatggtctgcgggagcatgtgaagaaaagtgggcttgcagagaagattgaattggttattacttcccctttactgaggactatgcaaactgcagttggggtctttggtggtgaaaagtatactgatggtgtaaatgcacctccactaatggttgaaaatgctggacacagtggacgtccagctgtttcaagtttgaactgccccccatttattgcagttgaaacctgcagagagcacttgggtgtccatccatgtgacaagaggaggagcataacagaataccggcctctcttccctgccattgatttttcattgatagagaatgatggagatgttctttgggaaccagatgtgagagaaacaaatgaggctgtcgcattgaggggtatgaagtttatggactggttgtggacaagagaagagaaagagatagctattgtcagtcacagtggtttcttgtttcacaccttaagcatgtacagcaaggagtgccatccaaccataagagacgaagttagcaagcactttgcaaactgcgagctacggtcgatggtgttggttgacagaagcatgcttgggtcatattcgtcaagattcaactatgctggcaagaatccaaccgggctagatgtgcctagtgatattgcagataagaagcaggttgatgaagctcagaagaactgaggcaaccttgaaagcataccgtagatgacttggattatcaaaaagccactctgacctttgcgaagcttgcttgcttgctttgaagagggcatctactacagatagagtttacacataccattgcgttagtcgagatgaactacgcagcaatgtataagcatgtctgctcttttgtctcagcctacatttgagattcagggcattggactaagatcgcctatttatgataataataataataataaccggatcaccccac

SEQ ID NO: 14068 - DNA, 705 bp, Zea mays
  Clone ID: LIB148-023-A4_FLI
ccgcgcccccgatccagatccagatccaggggcttgtcatggcatccaaacgtatcctcaaggaattaaaggacttgcaaaaggaccctccaacatcatgcagtgcaggtcctgctggtgaggatatgttccactggcaggcaaccatcatgggtcctcctgatagtccatatgctggaggtgttttcttggtgaacattcatttcccgccagactaccccttcaagcctccaaaggtatcttttaagacgaaggtcttccatccaaacatcaatagtaatggaagcatatgtcttgacattcttaaggagcagtggagccctgctttgacaatctctaaggttttgctttctatctgctccctgcttactgatcccaacccagacgaccctcttgtccctgagattgctcacatgtacaagacggatcggcctaagtacgaggcgacagcccgcagctggacccagaagtacgccatgggatgaaatgttcggcgttactggctaaatgcagacgattgtggtgttgcccatgaaactgttatcggggacgtatgttcttctgttccttgtgcattctccgatccatctctaggatccgagttctagtccaacattaacctaccattgccttgggtaatgagatgacttgtgcttgctgtggtaactatgctagtgttgatgttaatgattctcattgagggct

SEQ ID NO: 14069 - DNA, 601 bp, Zea mays
  Clone ID: LIB148-023-B8_FLI
ctgaaatggtgggagaaaaatgctggaccaaatatgattgacatccactccacagtggagttcttggatgcacttagagatgctggagacaatcttgttattgttgagttctacggaacctggtgtgcttcatgcagggctctctttccaaggctctgccggacagctttggagaaccctgatatattgtttctaaaagtgaattttgatgaaaacaaacctatgtgcaaacgactgaatgtcaaagtccttcctttcttccatttttatcgtggagctgacgggctacttgaggctttctcctgttccttagctaagtttcagaagctgaaggatgccattgcaatgcacaacactgctcgttgcagcattggtccacctgttggagttggcgatgttgacttgctggataacgcgagccctcaagagaaacctgcagaagctagcccacggtagattcatgagaatgagctccacctcatccacttctacgtcctgctcattgttttcttcactatagatctcaatgtaatcagttgtggagaacataagtagcctcggttcatgaatcagatgtatggattattgtaacgcattcttg

SEQ ID NO: 14070 - DNA, 675 bp, Zea mays
  Clone ID: LIB148-023-D3_FLI
ttcccctgttcctcgaccacctcaacgagcttctgctccgacgacgacgacgcgccgccacagccacatggcggacgacgccgtcgccgccggagcggccgtttgctgcgcagggccggcctcgctgtcttctagcaggaagcagcagcagcagcccgacgacgccggctgcggcagcagcagcagcgacgaccactaccagcacgacgtgatcatgctgaggcggacgaggagcgggcgggcattcccgccgccgatctccgtgatcggcaagggcgggcggccgtggctctgcctgcgggcgcaccgcgagggtggacgcctcgtgctgcggcagatgcgcctgccgtcgcaggagctgctgcagccctgcaaggaggacggcaggttcaagctcctcatgcacccggaggcccgcgcgcggccgtgcgggggcggcacactgcaggaacggcaagggaatgatagctagcgctcttaattgatcagctgatcagatgatctgccgccacgcacacgtcgtcttgtatgggctggctgctacaatgcaaccggtagatctccctgcttagtttcttgagatcgagggctccagttcttgctttgcatcctgcaaccgttgtccacaatctttgccttccgtcaaattttaatacatggtcggaacattgaggc

SEQ ID NO: 14071 - DNA, 907 bp, Zea mays
  Clone ID: LIB148-023-E1_FLI
gtgctccgctaggtcaatcgaagagtccaaagatcccagctttcccatcccatggcgggcggcgacctcacgcctcctcctcctcctcccgaagagacgccgccggcagcggcggccgaggacctgatcgagatcgtggaggaagggtcggggcggctggacatcgcgcggtacgtggaccacgtgcgcgacctgtcggcgggcgccatcgcgacgttcgagggcacgacgcgggaccacttcgcggggcggcgcgtggtggagctccggtacgaggcgtacgcggccatggcgcggcgccgcctggcggccatactgcgggaggcccggtcgcggcacgcgctgcggcggctggccgtggcgcaccgcctgggcgccgtccccgccggcgaggccagcgtgttcgtggccgcctccgccacgcaccgcgccgacgccatggaggcctgccgctacgtcatcgacgagctcaaggcgtccgtgcccatctggaagaaggaggtgtacgacgacggcgaggtctggaaggagaaccgcgagttcctggaccgccactccgccgacggcgatgcgacggcgggcgggtgctgcgggagcaaggtcagggtccaggaggcttgacgctgatggatggcggcgcccggatccctctctcgctccatcgcggtcgcgactcgcgacccattggagcagggggtttcatgaaattctatgtactacttactcgatctccgttgattttgttctccatctattttttctttctgagagagactgcagcttgtacttgcacaccatgaagatgaaaggcaaatagtcataactcataatgggacagtagttcagttttaacaagagagatgagatgtaacctggggtgtttgctttcgaatgacatcgaatgttt

SEQ ID NO: 14072 - DNA, 503 bp, Zea mays
  Clone ID: LIB148-023-E5_FLI
cgccccgcggccggggacgagatccacacgctcatcgccgccatggacgccgacggcaacggcaccgtggagttcgacgagctctcctcctccctggcgccgctgctcctggggccctgccgccccgccgtggccgtcgaccacgcgcagctcgccgaggccttccgcgccttcgaccgcgacggcaacggcttcatctccgccgccgagctcgcgcgctccatggcgctcatgggccaccccatctgctacgccgagctcaccgacatgatgaaagaggccgacaccgacggagacggcgtcatcagcttccaggagttcacagccatcatggccaagtccgccgtcgacttcctaggcctcgctgctctgtgacttcctctctctctcttcctacacatcggaggcgatctcctcctctgttcgtgcgttccttcccttttcttctccatttggcaattgccagtgcgcgttcgaagtgaattgatatgtgcgatgtctgt

SEQ ID NO: 14073 - DNA, 1000 bp, Zea mays
  Clone ID: LIB148-023-G3_FLI
cgatgatccagagtcagtgcacagagctgttggaggactgaatgttgttgggcagcgactagagaagcttgcagaggactgtgaggtacggtttgagttcagggcagtggctgctaacattgaagatttgactgctggaatgctaggtcgccgtcccggagaggccctcattgttaactttgcattcctgctgcaccaccttcctgatgaaagtgtctcaattatgaaccaaagggatcggcttctccgtatggtgaagggtctccgaccaaaactagtgacgttggtggagcaggacgcaaatactaacactaccccattcccttccaggttccgggaggtctatgactactattcggcactttttgattcactggatgccacccttccaagggaaagcccagatagaatgaacgtggagcgccagtgcctcgcacgggaaatcgtcaacatcttagcttgtgaaggccctgaccgtgtggaaaggtatgaagtggctgggaaatggagagctaggatggcaatggcgggctttgtgccgtccccatttaacagcggcgcggttgatggcataagatctctactgaaatcgtactgcgataagtacaggttcgagaaggtccaggacggcctccactttggctggggcgacaagacgctcgtcttctcttcggcgtggcaatagaagcttgcttgtagtattgccgatctgagcactttccagcgttttaggagcatctggtgcaagggctgtaaagagatttctgtcgccgtattgttgaagtacactcgtagctaaccttagcgtgttgcctgcctgtaggcttgtgaggtctacggtttacctagtttcttagatgaagtatgttgtgcattgtacacctactgaactacatgtagactgtagagtcgcgggtgtatttaattttgcccttcttttggaggggcagaatcacaatatgtcgacattgtttcgtgtataaagtactggatgatgatg

SEQ ID NO: 14074 - DNA, 557 bp, Zea mays
  Clone ID: LIB148-023-G4_FLI
caggcaagggcgcaaccaataatagcaagtgtgatcatccgttgatccatcttgctaataagcctgcgtgcccttcgttcttcctcgtctcgatcccgacgacgctccgttcggctccggcaaaccacatcaagtcgcgatggagatgaagaaggtcgcctgcgccgtcctcgccgccgccgcctccgccaccgtggtcctcgccgccgaggccccggcgcccgcccccaccagcgcctcctcggccgcgttcccggccgtcggcgccgtgctgggcgcctccgtgctctccttcttcgcctactacctgcagtaaaattaaaggaggatcggagggagaggctgctggctgccattgcctgtattcggttggattccgtttatatatatatttaagtactttaatttgggtctgaacatgtcgattgatccattcattttatttgctttgccatttctcccttttctgttaatttcgatatgtaaagaggggagaatgggagacactattcgtttggacatgacaattggaaattaatcaatacccattgttagtt

SEQ ID NO: 14075 - DNA, 432 bp, Zea mays
  Clone ID: LIB148-024-C12_FLI
tatactcggggagagagagtgcgggttgcgggcgccgtcttggttcgccgccgccgcatgtgcatctcggcgaatccgcctgcggagaccaagttagcgccagggacgtttgtgggggcaaccgtgcatccattccctaccggcgattgggcgtggaaggcggtgtggcgtgggcaattcttcgtcgaagatcgcgcttcgtcgtgaagccgctcacatccgcggtcggcgtccggtgctgcctaaattttggtcaagaacaggtaccacaggatgaggcgcatggaggatgctgcgatgtgttcgtgagagatctaggtcgtcgtctcccagtcaactgtgggttgctggaccgttgtctccttataatgtaattatttatttattttgtatagaactcctgttatatagtaaagatgtgacattcgatcc

SEQ ID NO: 14076 - DNA, 977 bp, Zea mays
  Clone ID: LIB148-024-C7_FLI
ccttaccctcgaagccgaaggcctggtgccttctcttcctccctggcatggaggaagtagctgtttcgcctatgatcgttgccgccgtagtgctggacaacaatggcgccgacgcggtctcctgcactgccatccctagcgtaacaataagcctagaggagaaagaaaatatcaatgggggatgttcccacgatcacctcggccgcaagcaacgaggaggaggcgttgttcagtgtcggagaatccaccaaggacgatggccatcgcttgacgatggaatgcaccactcccgtctcctccagtagcccttccactcgcaagaagcgcggggcgttcagcctcttcagggcgatgttcctgtccttcggccggagcgacgacagcatgaagaagacagacgacgacaccacgagccccaagaagagagccatcgcggctgctgatgacgattgcaagcctgccgatgacgagtcaacgtcgtggaagcgcctcgtggacggtatgcgcccgctccgcctccgcgggcagctggagtactacccgccgccaccgccgccaccgccgctgggccacgccgatgtgtaccatgacgtgatcctcccgccgccgtcgcaggcacggttcggcttcgagatcaaggaggtgggcatgaccagccgctacgcgtccgctgaggatctgcaccagatggacagcgaccaggaagagggtgctgagggtggcgatgacggtgacagcagttgcccacacgccatcgacatgcaggcggaggagttcatcaccaagttctatgagcagttcaagtcagaatcgttcaacggccgtgcctccgagtgatccattgatccatccgcttgcggcatgtatgtaatcgttctgatcttaaccgaaattgcattcgtgtcagagacgactctacccaatatggatcaggaagaaatgtatcagtgatcgcatcgataaacacagtttgtctg

SEQ ID NO: 14077 - DNA, 1348 bp, Zea mays
  Clone ID: LIB148-024-C9_FLI
cttcatcacgacgccggtggtcatgacaatctacaagccagcgcggcggggggcgccgtacaagaaccgcaccgtccagcgcgcgaacccgcacgacgagttccgcatgatggcctgcttccacagcacgcgaaacatccccaccatcatcaacctgatggagtcctcgcgcggcacgcggaagcgtggcatcaccgtctacgccatgcacctcgtggagctctccgagagatcgtccgccatctgcatggtccacaaagctcgtcgcaacggcatgccgttctggaacaggcggcgcaacggcgacggcggcggcgaccagctcgttgtcgccttcgagacgtaccagcagctgagccgcgtgtctatccgggccatgacggccatctccgacctggaaacgatccacgaggacgtcgtcaccagcgcgcaccagaagcgagccgcgctcatcgtgctccccttccacaagctccaccagatcgacggccacatggagtcgcttggcgaccagtaccagcacatcaaccagcgcgtgctccaccacgctccctgctccgtaggcatcctcgtcgaccgcggcctcggcggtgtcgctcaggtggccgccagcgacgtgtcatacaccatcgttgtcatcttcttcggtggccgcgacgaccgcgaggccctggcctacggcatgcgcatggtcgagcacccaggcatcgggctgcacgtcctacgcttcttgctacagtccggcggcgccgccagcgacgacgacgcgtcgttccttgaagagttccgaaccaaggtggccaacgggaacgactctgtccgctatgaagacaggacagtgggagggaaagaggaagtcgttgaggcgatcaaggcaacagggcggtgcaacctgttcctcgtcggacagggcacgccctgcatgccgctggttgactggagcacggacagcccggagctcgggccggtgggtacttacctggcgctgccggaattctcgacggtggcatctgtgctggtcatgaaacagtacgatccgatggcgaagcacgacgacttcgtcgaggaggtggccgacatagcggtggacgttgacacgccgggccccagtaaccggggaaccaatactagcttccatgccggatgatacgtgctggtgttagatgtattattaacatgtcgagcagacaagactgattaacattatgtaatgtaatctcaaagtggtgtaaatggatggatcaaggtataggatcccctggagtgtccaaccggcaatccaaaccaattccttttttcgaattatcatgatgtaattcccaaatgtataaaattcagtttttagttt

SEQ ID NO: 14078 - DNA, 748 bp, Zea mays
  Clone ID: LIB148-024-D9_FLI
cacgcaccggtgcatatatggggctcctgaaccagctgtgggacgacacggtggccgggccgcgcccggactccggcctcggcaagctccgcaactgcagcgacgacgcccaggggagagggctggacgaagaagctgcgcgggaaagccaggatgggcggcggcggcggtgacgacgcccccggcacgccgaggagccccaccgtgtacgactgggtggtgatcagttcgctggacctctgaagcccaagccaagacgagaactgcacaaggaaacccaccaccaccatcaacacagctagcgaactgaaggagggagggggcagaggggccatggccatgtaatgtaacgaccaatctctttcagagcttctggtgacgtgtccagttactatatacatacatacgttaacggtgtactatgtgtcttgttgtaaatgtcacccctgcgaggtgttgccgattttgtaagctactacgtactactacgctcggcatgtcaccgtgtgcaagtgcaacacaagtttgtaaaaatgactagctagtagtagcaatgctgttgctgtacgagtaggcctccctctgctttgtacaggggtagtccaacaagtatatggtttgctggtgccatgtaaaaatgtatatagaatcctacgttcacgcccagcaaggatgcgtggttgagtgttctggactctggacaatactactatccaataacagccataccgtgtttttttcctgggcc

SEQ ID NO: 14079 - DNA, 792 bp, Zea mays
  Clone ID: LIB148-024-E5_FLI
cctcgtcgtcgtctcactcaccccgccttcacgcctccctcaccaaataaggtcccgcccttttccgacattcacaggggggacaggaaatcagcggccatggcctcgattccggcgacgaccttcgccgtcatcttatccgtcctcttctgtgccgcggctggcaccgccgtcgacaacgacctccccgactacgtcatccagggccgcgtctattgcgacacctgccgcgccgggttcgtgaccaatgtcaccgagtacatcgcgggcgccaaggtgaggctggagtgcaagcacttcggcaccggcaagctcgagcgctccatcgacggggtgaccgacgggaacggcacgtacacgatcgagctcaaggacagccacgaggaggacatctgcgaggtggtcttggtggagagcccgcgcaaggactgcgaccaggtgcaggcggacagggaccgcgccggcgtcctgctcaccaggaacgtcggcatcagcgacaacctgcgccccgccaacccgctcggctacctcaaggacgtgccgctgcccatctgcgcctcgctgctcaaacagttggactcggacgacgacgacgatcagtaatagcacatcgacgacgacgatcgatatgtaatagcacgtcgtcgacgaccgaccgcagtcgtcgcagactggctggcactaaaccacaaatcctcttcacctggattacaaatatgtaactgagaaaggaaaggaaaacaaaaatgtaactgcgtggctgtaccaaattctgagtgctggattcttgct

SEQ ID NO: 14080 - DNA, 751 bp, Zea mays
  Clone ID: LIB148-024-E6_FLI
ctccgatccatcaacaatcgccgagagcgatcgagagataaataaagatgaagaaagtggcatcatcgtcagccgttctcttcgtgctagccctgacgctagtttgtgccccgctgatagcagaggcaaagaagaagagagtcgccgccgccgccgccgaggagaagaaggtgcaggacaacttctgctcgacgctgtgcgagggcaggaaggggatggacctggtggtgtgcaaggagtcctgcgacctctcacagcgctccaacctggtgctgtacggccggatccagtgcaagggcaagtgcaccgagcagaagggcatcaccgcgccgcagatgaaggtgtgccaagaggcgtgcgacaaggactacgtggtcaaggcggctgaggtcaccaaggcctgcaacaccacctgcgccaaggagaagcagcctctgctcagcgagaactgcaggaggtcctgcacccctcctccttcctgaacgcagagcacgcccgccggtcgtcgtcttctgcctgcttgcgtgacactgaatcactgatacatcatacatgcatgcatgggatgcgatgacgatttgatgcatgcatgcatgggtatacctaccaatttgatgaccgacgatgtatagtttcgtcgactgcttcatacacatatatagcagcccaattaatgtaacgtcacgcaaataagcatttgcggtaattttttgtctcgttgattcgatgaataaagggcatgcttgagagt

SEQ ID NO: 14081 - DNA, 1665 bp, Zea mays
  Clone ID: LIB148-025-C5_FLI
accgaccggccggccaacccaaccccaccaccaccagtccccgcggcccgcgtcgaggaagaagaagggataggagacggagacggagacggagccggtggtcgcaaggatggccgggggcatgcaggcggcggacgcggcgggccggctgagcgcgctgctctcgctgctcgcgctgcgccggctcctcgccgtgctccagccgctggccctgctcctgctcctgcccttccggtggcgcgcgcggccggccggggccgtggccgcggccgtggcgtccgatgccgccacggcctccgcgccgggggccagcgggaggaaggggaaggcgtcgtcgtcgtcgtcggtggttctgcgggtgccggccgggtcccccatggtcgccgcgcggaggcaggcgtccgcgcgcagggagatcgccgtgcgccgggcgcgggaggccgggcgggagtacgagctcgtccccaccgctcgcggcgagacgctcttcacgcagtgctggtggccgcacccgccctccaccgttaaaccgagggcgctagttgttgtcatgcacgggctaaacgagcacagtgggaggtatgaccatttagcgaggcgattgaatggcatcggcatcaaggtgtacgggatggactggactggtcatggtggaagtgatggtctccatggatatgtgcaatctcttgatcatgctgtcagtgatttgaaaatctacctaaagaaagtgttagctgagaaccctggtcttccatgcttctgcttcggccactcgactggtggaggtatcattctgaaggctgcacttgatccagaggtagaaactctccttagtggtattgtcttgacatcaccagctgtccgtgttcagcctacccacccaatcatagcggtcatggcaccgatttttgccctcatcgcgccgaggtatcagttcacggcgtcccacaggaacggcccgccggtgtcgcgcgaccccgaggccctgcgggccaaatacacggacccgctcgtgttcacgggcgccatccgcgtgaggacgggctacgagatcctccgcctgacgtcgtacctgcagcagcacctgcaccggatcgcggtgccgctgctggtgctgcacggcgccgacgacctggtgaccgaccccaggggctcgcgggcgctgtacgagcgggcctcgtccgcggacaagtccctcaagctctacgacgggctgctgcacgacctcctgatcgagcccgagaaggacagggtgatggacgacatcgtggcgtggctgagccccagggtctgacgccgccggcgcgttgcggtgctggccgtaggacgcgagcggctttttgatcatctgctgagcgcggaggacctgcaggccgaggacgcctcgcctccggacggtgggtgatgacgcggtctggtctggtaggctgcggaccgagggagagcgggtgtgccttctcgcccccttggtgtgctgaactgctgatacgatacgaggagcaggacaggagtacggagaactactactacctacggctatgggcgatggctttactcgcgcctcccggtgtgtcccgagattttttttcggggacacgtacgaattatgtaacggagttcgtttcgccgtgccacacgcacgagcggtgtccgatacacctatag

SEQ ID NO: 14082 - DNA, 1603 bp, Zea mays
  Clone ID: LIB148-025-D11_FLI
cccgcgcccgcgccgtccgcgcggcgctacggcccccgagccagtggtccgtcgggagctggcggggccgcccggcgcagcagcagcccgagtacccggacaaggcggacctggaagacgtgctgcggacggtgggaacgttcccgcccatcgtcttcgccggcgaggcgcgcaccctcgaggagcgcctcgcggaggccgccgtcggccgggccttcctcctccagggcggcgactgcgccgagagcttcaaggagttcaacgccaacaacatcagggacaccttccgcgtcctcctgcaaatgtccgttgtgctcatgttcggaggccagatgcctgtcgtcaaggtgggaagaatggcaggtcagtttgcgaagccaaggtcagatggttttgaggagcgggatggattgaagttgccaagctatagaggggacaatatcaatggggatgcattcaatggggagtcaaggttgccagatccacaccgcatgataagggcgtactcacagtctgcagcaacactgaatctgctgcgggcattcgcaaccggaggttatgctgcaatgcagagggtagcacaatggaaccttgatttcacagagaacagcgaacaaggtgataggtacatggagttggctcaccgagttgacgaagctttggggttcatgtcagctgctgggctccctttagatcaccctataatgacaacagcagaattttggacgtcacatgagtgtcttcttctaccttatgagcaagcgctcactcgtgaggattccaccacgggcctctattatgactgctctgcccacttcctatgggtcggagagcgcactcgccagcttgatggtgctcacgttgagttccttcgaggcattgccaaccctcttggtatcaaggttagtgacaagatggacccagcagaacttgtgcggttgattgatatattgaatcccgaaaacagggctgggagaataaccatcatcacaagaatgggacctgaaaacatgagggtgaaacttccacacctgatacgcgctgtccgtggggccggtcagatagtaacatgggttactgacccaatgcatgggaacactatgaaggccccttgcggactcaaaacccgctcgttcgacaggattttgggtgaggtgcgtgcgttctttgatgtccacgaacaagaagggagccaccctggaggagtgcatctagagatgactggacaaaatgttacagagtgcatcggcgggtcacgtacggtgaccttcgatgatctggggtcacgctaccacacgcactgcgacccaaggctcaatgcctcacagtctctggagatggcatttatcatcgccgagcgccttaggaaaaggaggatggcctcgtcgcctttgtacacgaaccagctgggttccattccatcaatgggtctgtgaacaacactaggttcactgtcaaggactagtccttgggttttgtttcagctgctgtgtcaaactttgctggcatgcatgcactggtaaactagatagcctgctgtactgctcattcccggcactgggtctgccctcaaagtataatagatactcatcactttttgacc

SEQ ID NO: 14083 - DNA, 1467 bp, Zea mays
  Clone ID: LIB148-025-D2_FLI
ctcgtccctccctacccgcggccggccacccacgccgttgctgctgttctggcgcgccctccacctcttctctcgaaggtgccgtcgtcggagcttgcttttggggaggtcgtgcggcatgatctgctgaccgccccaaatcaacccggccgcgcatcgaccgtcgtcatccagtccgacgaggaggaggaggagagggagagggggagccacaaaactaagatgtcttgctgcggtggcgccgaggaggacagctacggcccgccggccaaccaggcggttccaccacccaatgccaacgcccccggcaacagaggcgggccgagaggaccgggggcgccgagggtcggcggccccgccaagcccgtcagcattgacgtgcccgccatacccttcgacgagctcaaaaggatcaccaacaacttcagcgaccgcgccctcatcggcgagggctcctacggccgcgtctacaacgccacgctcagcgacggccgcgccgccgtcatcaagaagctcgacaccagcgcctcgcaggactccgacaccgacttcgccgcgcagatcgcgatggtctccaagctgaagaacgagtatttcctggagctcctagggtactgcttggaagacggcaaccgaatgctaacctatcagttcgccacaatgggttctttgcacaacatactacacgggagtccagggcgcggagcccggtcccgtcctcaactgggctcagcgagtcaagatagcctacggggcagcgagagggctggagtacctgcacgagaaggtccagccgtccatcgtccaccgggacatccgctccagcaacgtcctcatcttcgacgacttcagctccaagatcgccgatttcaacctcaccagccagggcaccgacaccgccgcgcggttgcactccactcgcgtgctagggactttcggataccacgccccagaatacgctatgacaggccagatcaaccaaaagagcgacgtctacagcttcggcgtgattcttctagagttgctgaccggaaggaagccggtcgaccacacaatgccgaaaggccagcagagtcttgttacttgggccactccgaggttgagtgaagacaaagtgaagcagtgtgttgatccaaagctcgacagtgactaccctcctaaggccgttgcgaagctggcagcagttgcggcgttgtgcgttcagtacgaatccgacttccggccaaacatgactatcgtggtgaaggcgatcacgcctcttctgaacgcgcccaaaccggcagctccagccgcgccacagtcctgatcaacccagacgacagaattagcctggacctggacacggttcccctgatctgttcctcattgcagatgtatgctaagaaaccacgcatccttgctccatccatccattgcatacaggggaattttgtaaaatgttaatccggtactctgaattcgtgtgct

SEQ ID NO: 14084 - DNA, 2545 bp, Zea mays
  Clone ID: LIB148-025-E8_FLI
cggagagagaggcagaggcaggcggccggtgcatgcatgccccgccctccctccgtgcgcccccgaagacctcctccgcccccggcgcggtgagctcgtgaccgcccggacggcacccgcctctgcggtttgaggctcgctgcacgcactccaataaaacaaaagaagcaaccatggcgtccatttccccggaggacattggcggggacgtcaatctgtccaagatcccggtggaggaggtgttcaagacgctgaaatgcgaccgcaaggggctgtccagcacggagggcgagaaccggctcaggacgttcgggcccaacaagctggaggagaagaaggagaacaacctcctcaagttcctgggcttcatgtggaacccgctctcgtgggtcatggagatggcggccatcatggccatcgcgctcgccaacggcggcggcagggcgcccgactggcaggacttcgtcggcatcgtctcgctgctcttcatcaactccaccatcagctacatcgaggaggccaacgccgggaacgccgcggcggcgctcatggccgggctggcgcccaagaccaagctgctgagggacggcaggtgggaggagcaggacgcgtcgatcctggtgcccggtgacatcatcagcatcaagctcggcgacatcatccccgccgacgcgaggctgctcgagggggacccgctcaagatcgaccagtcggcgctcaccggtgagtcgctccccgtgaacaagcaccctgggcaggaggtcttctcgggctccaccgtcaagcagggggagatcgaggccgtcgtcatcgccaccggcgtgcgcaccttcttcggcaaggcggcgcacctcgtcgacagcaccaacaacgtcggccacttccagcaggtgctcacggccatcggcaacttctgcatcatctccatcgctgccggcatgctggtcgaggtcattgtcatgtacccgatccagcaccgcgcgtaccgcgacggcatcgacaacctcctcgtcctgctcatcggcggcatccccatcgccatgcccaccgtgctctcggtcaccatggccatcggttcccaccgcctgtcgcagcagggggccatcacgaagcgcatgacggccatcgaggagatggccggcatggacatgctctgtagcgacaagaccggcaccctcaccctcaacaagctcaccgtcgacaagtccctcatcgaggtgtactccaagggcgtcgacagggacatggtgctcctctacgccgcgagggcctcccgcgtcgagaaccaggacgccattgacacctgcatcgtcaacatgctcgccgaccccaaggaggcccgcgctggcatccaggaggtccacttcctccccttcaacccggtcgagaagcgcacggccatcacctacatcgacggcaacggcgactggcacagggtcagcaagggcgctcccgagcagatcatcgagctctgcaacatgggcgccgaggccgagaagaaggtccatgccttgatcgacgggtacgccgaccgcggcctccggtcgctcggcgtgtcgtaccagcaggtgccggagaagagcaaggagagcgccggcgacccgtggcagttcattggcctcctgcccctgttcgacccgccgaggcacgacagcgcggagaccatccgccgcgcgctccacctgggcgtcaacgtgaagatgatcaccggcgctgtacctccaagtaagcatcatcagccaggcgctcatcttcgtgacgcggtcccggagctggtcgttcgtggagcggccgggcttcctcctgctcttcgccttcttcgccgcccagctggtggcgacgtgcatcgcggtgtacgccgactgggacttctgccgcatccaggggatcggctgggcgtggggcggcgccatctggatgttcagcatcgtcacctacatcccgctcgacgtgctcaagttcatgatccgcgccgcgctcagagacaaggccacgggcaacaacgtccacaacaagtgatacgtttatctgggtgcttgtcgcggacggcgtttaggaacaaggactgcggcaagggccggcgatcgcgaggcacagtgggcggtagagcagagacactccacgggcctcaaccagctcgccaccacctcctcctccgaccttctaggcagcaaggactagcatgcagtccgagctcaccgaggaggcccgcaaaggtcgcaagatatacgtagctacagtcttctccggcgactagcccaccatctctagcgccgctgatgcggctgatctcgctggtctccagagaccgacggcgtccagcggtggccggaggagtcctgtgttcttcgtttccttaggtgtacttatgtgggttttggggtggcaagagagttttttttttgtgaactctggtgtatcggatcaagtgaatatgtacctacatgttgtgttcttaattctgcattgtacagctatacactatacaagggtacgggaatgctgaggtgtaacttccatgcaatatacttagttgtattcatct

SEQ ID NO: 14085 - DNA, 943 bp, Zea mays
  Clone ID: LIB148-025-F11_FLI
gctctcagttcatcaacttgttgaaaacgctgatgagtgtatggtcctcgacaacgaagctctctacgacatctgcttccgcactctgaagcttgctacacccacttttggtgacctgaaccatctcatctctgcaaccatgagtggtgttacctgctgcctgcggttcccaggccagctgaactcggaccttcggaagcttgcggtcaacctgatccccttcccccgcctccatttcttcatggtcggcttcgcgccgctgacgtcaagggggtcccagcagtaccgcgccctgaccgtcccggagctgacccagcagatgtgggacgcgaagaacatgatgtgcgcggccgacccgcggcacgggcgctacctgacggcgtcggccatgttccgcgggaagatgagcaccaaggaggtggacgagcagatgctgaacgtgcagaacaagaactcgtcctacttcgtggagtggattccgaacaacgtgaagtcgagcgtgtgcgacatcccccccacgggcctggcgatggcgtccacgttcgtcggcaactccacctcgatccaggagatgttccggcgcgtcagtgagcagttcacggccatgttccggcgcaaggccttcctgcactggtacaccggggagggcatggacgagatggagttcactgaggccgagagcaacatgaacgacctggtggccgagtaccagcagtaccaggacgcgacggcggaagaggaggaggagtacgaggaggagggagatgaggtggctgcctgatccaccggcacattgtggggttgtgcacattgtggggttgtgttattactgttgctcttcatctggtgtttaaaatgttactgtgatgctgctgcgaaactgacgtaagttttaactgtggaattgattacttctagatcgtggatttgtcgatctgatatt

SEQ ID NO: 14086 - DNA, 1205 bp, Zea mays
  Clone ID: LIB148-025-F2_FLI
gcggccgcggcgcgccgcagggcgctgcctcccctcgccgggcgcgccctgccgttctcgccgctcaccaccgccagggccccgcgccgccgcgggctcggtaccgtcacgtgcttcgtgccgcaggacacagagcacccggcggcggcaccggccccggtcgctcccgtgccggagacggcgctggacgaggaggccagggccgcggcggcgcggcgcgtcgcggagaggaaggcgcggaagcggtccgagcggcgcacctacctggtggccgccgtgatgtccagcctcggggtcacgtccatggccgtcgccgccgtgtactatcgcttcagctggcaaatggagggcggcgcggtgccggtgagcgagatgttcggcacgtttgcgctctccgtcggcgcggcggtcgggatggagttttgggcgcggtgggcgcaccgggcgctgtggcacgcctccctgtggcacatgcacgagtcgcaccaccggccgcgcgagggcccattcgagctcaacgacgtgttcgccatcgtcaacgccgtgccggccatctccctcctcgcctacggcttcttccaccgcggcctcgtgcccggcctatgcttcggcgcgggcctcgggattacgctgttcggcatggcctacatgttcgtccacgacggcctggtccaccgccgctttccggtcggccccatcgccaacgtgccctacttccgccgagtggctgccgctcacaagatacaccacatggacaagtttgagggcgtcccgtatgggctcttcctgggaccaaaggagctggaggaggtcggtggcctggacgagctggaaaaggagctcgcgcgaatcggccggaccatctgatggattcgtccggattccggcgcggcgatctccgctccgctccgtgattccggcgcagcctcattgtcggtggggagcccacgaccagaacctccagaagaccagaagggatttggtttggatgcgcgagcgtagatcttgacctgcatttcggatggtctgtggagggctggaggcacagctcgtacctggagatgtctggtgccatggaattacttttcttttcttttttttcctgacattttcttatggctaggattctgtatataacttgtagagacatgttatgaaccaccagctcaatgaagctaaaaattcggtggttggaaacagcgctg

SEQ ID NO: 14087 - DNA, 744 bp, Zea mays
  Clone ID: LIB148-025-G11_FLI
cttctgttggtggcagccctcactctttagacggtgaggaggagcacaattctgatcagcatctggcagcaggtgtcactgagaggttaatagacctgttggctcagcagcaagaggagcttcgtgcgctgcaaaggaaacacaaggcggacatagaggagatgctgaaaatcgtacctgcggaggatcgggaagagaccttaactctatgccgcttgaaggcggaacagaaaaacagagccgccgaaccttagataaactgtctcatgtgcatgttcctctgtgtgctgttagatttatacatactcacaccaaggagttgttgtttacactttacagccgttgttgtgcaaaagttggacatctgttgtgcagaagataagtctgaagcctttttcattgttcttttttgacataatggagaagctgggggagtgcttgtctggaggacctccaattcagtgaccgagcactaaatagtaatcaggttctttttgacataatggagaaggttggtttttgacggcaaagatgaagtttctgcccaccaaatgaaatctgcagatgccactttgatgccgctgcgtgcctgaattaacggttcataaggagtgcctcccttcctttttcttttgttttcttttttgtttcttctgtactttgacttgccaaggatatacatcagtgtttgagctgttccaaacttgcaatgacagactttaaagtgcaattattttccggatc

SEQ ID NO: 14088 - DNA, 783 bp, Zea mays
  Clone ID: LIB148-025-G3_FLI
cgctgctatgttcctcggcgacagcgacggggaaggcttgagcctcgtcctgtacttcagggtgtccgaatgctacgacaaggaggtttccgaacatttcaaggagtctatgatgaggtttttcgaggacgaaaccgagaaggtgaaagggttcacgtcagaatccactgtgagctacagagatcggctgaagatcatggccggcctggtcaacccggacgacctccagctgggctctacggagaggaagctcgtccaggcgtacaacgagaagccagtcctctcgcggccccagcacagcttctacgagggagaggactaccttgaggtggaccttgacatccaccggttcagctacattgctaggaaggggctggactcgttcagggcacgcctcaagaacggcatcctcgatctggggttaacgatccaggcccagaagcagtcggagctccctgagcaggtcctctgctgcgtcaggttgaacaagatcgatttcactgaccaagaagttccaacaatagtcaccgttgatgacacctgacgcatttgatcaaaatggtcatcagacgtgcgagctattattaactgctgcaaggctagatccatgggattcagaggcgacacaagaactgatgactccacgccttggtttctgcctaatatgttcgccgatctgcctacttttaagcacgggctttttcttgtcttccctgtaactataatataataatgtatattatatacaagacgatacaaccctgcgggtgttggtcatgttcc

SEQ ID NO: 14089 - DNA, 507 bp, Zea mays
  Clone ID: LIB148-025-H9_FLI
gaagctcgatcgggaggctaccgttgccgctgacacgggttaaccagtgttgagatccgcactgcagcagagcttttggtgaccctacttgctacttccacttgcactcgccggattgatgaagctcctgcatgcattgcatgcggagtcttcaaggggatttcagctggcactcatgcattcaagtaaaggctccaattcgagataccggtgcgtttcaataagcaggttcaacagtatctttcgttaaaaaaaacagctctgcttttcgggcggctgctatgtcgcactgcacagtgtggcgtagcgcagcgatggcaagctaatgcctaagaaaaaaacatacgtgcatatagaaaccactgatattagtgtagacgctgacaacctacggagaaatttgtaatggcagttcagggatgtaaatctttttacgaggcaacaggtcacagttcttattgtctggtagtgatagcagtgtgcgcatttcaatatattctctgatgg

SEQ ID NO: 14090 - DNA, 659 bp, Zea mays
  Clone ID: LIB148-026-E1_FLI
ccgctgcggggctctgcctcgctgacatcggtgacatgatgacccgcgagttcacggctcagcaggatgtgctgagcacactcgaggcgctatgcaagcaagcgcgcgactccgtcctcctcctcccacgcctgccctccttccgacacccctcgaccgacggcgacggcgtcgacgagggtacagccgtctccggcgggcggaagcacgtgtcgttcggcgacctgagcttcgcggagtgggcgtcgttcctggagaggttcgagcagctgctgccggcggcgctagaggccaagaagcgcgctgggctacggacgtcgtcgtcgttctgacttctgagtttctgaccgaagctgaccgtaccacgtactagtcaaccaccaccaccatcaccgtttgcatgcatgcgtgcgtgcgtgcgcgcttgcgtggacgcagtatttgtacacgtgtgcatgccagcttgacgggtaactgacgtgtatgtagctactagctcggatctggatgtcttttgtgtctacgtagggtacgacgaggagacgatactgtaaggtggcatgcatgctctagggagctgttctggaacacccttccaaagacgctgacgtgtcgagcaatgccatccgatactatggacagcaagtcagcaacgagcc

SEQ ID NO: 14091 - DNA, 1596 bp, Zea mays
  Clone ID: LIB148-026-F11_FLI
caccggtctaatgacgcgcagcgatttctgaccatcccctgacggtttgcggtggccgtccaaatccaatcccaggcgaccatgatctgcgtggacaactcggagtggatgaggaatggggactatcccccatcgcggttcgcggcgcaggcccacgccttcgccgtcctctccggcgccaagacggaggcgaacctggagagcacggtggggctggtggccatggcgggcaagggcgtcagcgtgctcgtcccgccaaccaacgacttcggcaaggtcctgtcaggcatgaacgggctggaaattggtggtgaagcaaacttgactgctgcgatccaggtcgctcaatttgcactcaagaatcggcagaacaagcagctgcggcagagaataattgtttttgttggcagcccagtaatagatgagaagaactggctagaagtgatagggaaaaatctgaagaagaacaacgttgctcttgatgttgttaacttcggtgaatctgataacgaaaagcctgagaaactagaagctcttgttgctgcagtcaatagtggtggcaacagtcatataattcatatccctgcaggacgtgacctttctgatgccctattcagttcaccaataatattatcggaagaccgaggaagtgattctgctgctgctgctcgtggagcatcgggttttgaatttgacgtggacccaaacgtggacccagagctggcgctagtacttctgatctctatggaagaagagagattaaggcaagaagctgctgcaaaaaaggccagggaagaatcgtcgaaaactgagaatgaaggccaatcttcaacctccaatggtgacattgttatggctgacgcagaacctgaaccaaattcatatactgaagataaaggacttcattgtaaggatgagggccagctattggaaaaagctcgtaaaatccgtatagaagattatattagctttgaagaactgtttgatggtgtcacaagtgatacgatgtcagcttttcaggaagaagaaacttgcactcagtctgatgcgggtaaagattttggccatcaaccatttgagccatcactttctgatgttgaattacttaacgatctatctaacaaggttgcgttagagtgggaggaactattcattgacccaagcaagggccacaaggtttttattttgcctcgctcgatgaaaaaggatatttgttctcttgctgaagtctattaaatttggactgccaaagaagcgacacaagaagtataaaaggcgtcatcatcagaagaaaccaaaaaagaagcgtgagaagaaggaagacgaggctgagggggacaaactgtaagtacccgacgtccgacgatcgcctggacttctccattcttggtatattgtgaaatggaagtgagaaaaagtggtggtagctttagtgtcagcttagacttgatattctcaaaaattggtcaaaagggatattgtgtttgtgaatctgagtgtttgttgagggactaagagtttcagtatagccaatgattgcgaggagatggtggtctctgtttgcaccgaagcgattatattacattgttgtacacc

SEQ ID NO: 14092 - DNA, 889 bp, Zea mays
  Clone ID: LIB148-027-D10_FLI
tgccgtcctgagcctccgtttgcggtgcgacagctcctccaggaccggcccccgcgcgcgtgccgtacgtgccagggacgacgccgggcggccgatggagttcacgtcgtcctacttccacgccttcggcaaccccgacctcgcggcggtggtctccggcgacggcggcagcgcgcaggcccaccggccgcgccgctccaccgacggcgcgaaggcggaggacggcaggagccccaccaccacaacggcgaggcgcgcgccgtccatgttctgcgtccccgacacggaggcggaggagcccaacggcttcctggacgagtgcaccctctgccgcaaggcgctctgcggcgacatcttcatgtacagaggggacacgccattctgcagcgacgattgcaggagggagcagatcgacatggaccgcataaggcaccggaggaagaagcagcaggccctcatagcgcagcagcagcagcagcagcaggcggcggcagcggcggcgatggcgcagagggaccgacgtacccagcggcagcttcagccacagcactagacggagctcacggaagcttcatatacaccggttccgggctcgtcccaagtcccaacgtacccagcagggatggcggatggattcttgcacgttcctagtactaggcaaggattctcctcgcaaggaccaagtagccacgacctttctttgcgtttgtatcgtccgacgcgaaacaacgtagtgagcggaggttttccgaggctattgcaatgactaaatgagcaatgcaagccttactcgttttttgttttgattattcctgattaaaactggggccgtcggagacgctatgggccagtttggcaacccagtttctctaagtgatttttatttttc

SEQ ID NO: 14093 - DNA, 1846 bp, Zea mays
  Clone ID: LIB148-028-D7_FLI
cgaccaaccggatccccgtgagagtccccacccacaccccgagggcggcgtcgggtcgtcggggacagctgatttcacacgacgagccggcgagccggccggcatttcgtcgtcggatggcgccggcctcctcctcgtccgccggcgtcgcgtgcctcgtcctgctcctgctcctgctcctcgccggcgcctccgcggcgcacggctcgttccaggctaggcgtgctctgtcagatgaccatgggagcggtatagtggcgcgatggcggaggttgctcgccgacgctgcgactccagcgaacaactctcttgtgctggctgcggcgaggactcaccggagcgaccccttcgccaaccttaccgcgtacagcggcggctggaacattagcgacgagcactactgggcttccgtgacgtacaccgcggtgcccctcttcctcatggccgtgctgtggttcgtcggcttcggcatcgtgatgctcgtcatctcctgctgctgctgctgcttctgccggggcaagaacgacgcctactcgccggggtgctacctcagctccctggtgctcctcatcatcttcaccatggccacaatcgccgggtgcctgatcttgcacggcggcagcgacctgttccacgggagcaccatcaggaccgtcgagtacgtcttcgggcagggcaacctgacggtggaccacctgaggaacttcgccgacagcttggcggcggcgaaggacatcacgatcaaccagatcttcctcccggccgatgtccagcagaagatcgacgtcgtcgaggagaagctcaactcctccgcgggcgtcttctccactcgcctgcaggagaactccaggaagatcaagggagtgctgaaccacatggagcacgaactgtttgctgttgcagctgttatggctggcctatcaatactcggattcttgttctccgtactggggttgcggtttcttgtctccctactggtgatcgctgcttggatccttctcaccaataccatcatcagttctggtcttttcctcctcttgcacaacgtggtggcggacacgtgcgtcgcgatgggcgattgggtggcgcacccgcaggcgcacacggcgctggacgacatcctcccgtgcgtggacgtggccacggcgaacgagtcgctgtaccggagccaggaggtgacgtcgcagctggtggcgctggtgaacaacgtcgtcgtcaacatctctaaccggaacttcccgccggggctccgcccgctctacttcaaccagtcggggccgctcatgcccgtgctctgcaacccgttcaacccggacatgagcccccgccggtgcgcgcccggcgaggtcgacttcggcagcgcggcgcgggagtggaagcggttcgagtgccagaccacggggccgccggggtcggagctgtgcgccacgccggggcgcgtgacgcccgcggcgtacggccagatgacggcggcgacgagcgtcagcaaggggctctacgagttcagcccgttcctggtgcagctgcaggactgctccttcgtgcgagagacattcacgtccatcaccaactataactgccccggcctcgagcagtacagccgggacgtctacgtcggcctggtcgtcatctctgccggcgtcatgctgtccgtcgtcttctggatggttcacacacggcaccgacggcggcgcgccatgcgcaagcagctgtgactgagatcttgatggcgcgccaggccacgccacgattgagctttagctgttacaaccgtggtccacgcatccgtttcaaatttgtacaatactcactcggttctaaaattaatcgttgtcgtttaatttct

SEQ ID NO: 14094 - DNA, 720 bp, Zea mays
  Clone ID: LIB148-028-E1_FLI
tcgtcatcgtcgtgggccttcatttctcctagaaggtcgagaggagaagaaggcgagacgtgcagtccgtcgggctccgatcgagaacagggaagcaagaggctgctagagatcgagctcatcaaccaatcaagtcgtacgtcgtcagcatcacgcgaccggatggcgcgcgccgcgtccagctatgtatccaggagggggctctccgcagcgatgacggtggcggaggactccgtgaagaaggtggaggacaaggcggtgaagctgggaactgtggccaaggacatcgccagcgccatggccaccacgacggaggagaagacggcgttctgggaacctgaccccgagaccggatactaccgtccggtcaccggcacgaaggaggtggacgccgccgacctgcgcgccgagatgctcaagcggaggattctgcaggacgactgatgcatgcagcatgcactagctgcccctgttcgatcgccaagatcacaccacgacgaagatactgtacctagtagtacgtacgtacgtgtacacctgattatccgaagaagatggccagccgattattaaccattggctatcttcgatcggggccaatttcagaaggaatttcctttactttctgtagcaaatgatcgggttcctgcacagttcatcaggaattccattgtatgctcgtgttggtatatatacgtacgatggggtaccattctggtc

SEQ ID NO: 14095 - DNA, 1412 bp, Zea mays
  Clone ID: LIB148-028-E5_FLI
cgagccgcagaagtgcaagtggacgaagaaggcgcggaagaaaaagaagacgaagaatgagcagaacgggctggcagccctagtggaggagatctcgctctcgaacagtcccaagcacagggcagcagcaggggagatactgcggatcggcaaccacaacatacccagcagggtgtttacgttccgtgaactggtggacgccaccaactctttctgcccagaaaacctgctgggcgagggcggcttcgggagggtgtacaagggatgcattccagacaccatggaagtcatagcggttaagcagctcgacaaagatgggctgcaaggtaaccgtgagttcctcgtcgaggtgctgatgcttagcctgctgcaccatccaaacctagtcaccttggtcgggtacagcacagactgtgaccagaggatcctagtgtacgagtacatgtcactcggttcactgcaagaccatctcctcgatctcagtccgaaatcccagccactttcctggcacacacggatgaagatcgcagtgggtgcagctagaggcatcgagtacttgcacgaggtagccaacccgccagtgatctaccgcgatctcaaggcatccaacatcctcttggacgcaagcttcaacgcgaagctgtcggacttcggtctggccaagcttggtccgagcggcgacaacacccatgtcagcacaagggtgatgggcacgtacggctactgcgctccagagtacgccatgactggcaagctgaccaagacatctgacatctatagctttggcgtggttctcttggagctcatcactgggaggcgagcgatcgacaccacgaaaccaactcgggagcagatccttgttcactgggcagcaccattcttcagggataagaggaagtttgtgaagatggccgacccattgcttgacatgaagtttcctctgaaaggtctgtaccaagcactcgcgatctcatccatgtgcttgcaagaagaagcaagcagtaggccgctgatcagcgatgtcgtgaccgcccttacatttcttgctgatccaaactatgaccctccggatgacatcaaggatcctctgcccataacagttccaaacctagacatggaaacaactggccaaaacggaacagaaggaggtaaagaacaattgcagcaaaacgaaggagaaagccgccattccacaaaaaacgaagaagaaggtagctgaaatgtggctttctctggaattacgaaatgttaaatcaagccagagctagctccttgaatgaaactaacaggtggacgtggtttggttaggtgtaatcaatttctcaacattcttgaaaccggtgtatgtcatataggcaaagatgtaatatcagctcattttcttgaatgaaactagcgtgtgcagtttggtt

SEQ ID NO: 14096 - DNA, 538 bp, Zea mays
  Clone ID: LIB148-028-F2_FLI
tcgtcgcggtactgcccggcactgggaacgcggtggggaagaaggttgacgccgtcgtccacactctcagctaaccagtgcctgggccgcggttggccacggtgggcgaccctggtggttcaccggtgcactgcgaatctaggcgggtcttcctggggctcgatctgggtctcatggttggctaatttctcaccggagcatttgggggacgggccgtgcgcctccaatttctcgccgtcgacgtgttctccgccgcgggactacagcgtgccatgggcgggactcctgggagcttaatccgcgcgcgaggtcacgagtcacctgaagatcatcctggtacctggaatctcaagtcccaggtcaagagcaggtaccacaggatgaggcgcgtggaggatgctgtgatgagttcgtgagtggtctaggtcgtcgtctcccagtcaactttgggttgctggatcgtttcctcatatgatgtaattatttaattattttgtatagaactcctgttatatagtaaagatgtgacattcgatcc

SEQ ID NO: 14097 - DNA, 1264 bp, Zea mays
  Clone ID: LIB148-028-G10_FLI
ggccgacggtctcggtctcgcaggggcagggctgggcggtcgacggaggccaattctccaacttcctccctccgtcgatcatccagcaccagcaggagaatcccgtcgaatccccctctcaaccaagggcgcgcgcgcgtgcgtatgcctcctccagatccaaagcaacagacagcgagggggcaccggggtccgccgcatgtttgcgatttatggaggatcatgctttcttgcttactacattagctcctgacgcgccgccctcccctcgcgttcattgatttctgttataattactaccgagctactatctccacattattattggtaaagaaagaaagggcgcctcctctaatttgatgggcattccgtttccttctcaacttcaacgccaacaacagttgatgctactatggttggaaatcgggcatggttcggagggcttttcagcggctcaggcaaaaggcgacaagtcagtgcagagaagatagtgcttgatctaacccctgtacaggaacagagactgcaaagtctgaaggaaaggctaaatgtaccttacgacgaaactcggacggatcatcaagattcgcttagggctctatggaatgcctcctttcccgatacagagctcactagcttagtttcggaacagtggaaagacatggggtggcagggcgtcaacccagcaactgatttcaggggctgtggatttgtttcgcttgagaaccttttgttttttgcaagaacgtatccggcttctttcaagagactgatgctgaagcagcaaggaatgcgaactacgtgggagtacccctttgcggtcgcaggtgtaaacatctcatacatgctgattcaactgttggagctcaactcagtgcgcccgaagtctttgccagggattaacttcatcaaagtgttgacagaacacgaggatgcattcgacgtgctgtactgcatagcgttcgagatgatggacgcccagtggctagcaatgcgagcctcgtacatgcagttcaaagaggtgctggaggccacaaggcagcagctcgagagggagctctccctggaggatctcaatagcatccatgacctccctgcctgcaaccttttgtacaaatagtactaatggtagttagattactgtgatacagtcaaaaggaaatttgtatgatgatcaggttgcatgtaaccagaatcatcaatcagcctgtaaaaagagaatatgtgaaaattgtattaagctgaactgactactgttgaggtc

SEQ ID NO: 14098 - DNA, 585 bp, Zea mays
  Clone ID: LIB148-028-G3_FLI
aagaacatgatgtgcgcggccgacccgcggcacgggcgctacctgacggcgtcggccatgttccgcgggaagatgagcaccaaggaggtggacgagcagatgctgaacgtgcagaacaagaactcgtcctacttcgtggagtggattccgaacaacgtgaagtcgagcgtgtgcgacatcccccccacgggcctggcgatggcgtccacgttcgtcggcaactccacctcgatccaggagatgttccggcgcgtcagtgagcagttcacggccatgttccggcgcaaggccttcctgcactggtacaccggggagggcatggacgagatggagttcactgaggccgagagcaacatgaacgacctggtggccgagtaccagcagtaccaggacgcgacggcggaagaggaggaggagtacgaggaggagggagatgaggtggctgcctgatccaccggcacattgtggggttgtgcacattgtggggttgtgttattactgttgctcttcatctggtgtttaaaatgttactgtgatgctgctgcgaaactgacgtaagttttaactgtggaattgattacttct

SEQ ID NO: 14099 - DNA, 538 bp, Zea mays
  Clone ID: LIB148-029-A10_FLI
cacaccttgagacctgcgttgtcacccacccatcgaggttggggccgccagcaggttcagccgttcctgttcttgataaaacgagagaaggatggcagtgtttcagggagctgtcctattcttgtttctcctcctcgtcgcagcagaggtgggaaccatcgatgccaaaatgggagtagccatgcccatgcatgccttgataatggagaaagcgaaacagcaggagacggagaagaaggaggagaaaagcacggagaaggaagagagtcaatgcttatcgccgagtctccagttcgagggcttctgcttcaacagcgacagatgcgccgaggtgtgcatgaaggagagctttcccggtggcgagtgcaagcgggacgtggccatgcgcaagtgcttctgcaagaagccttgctagttcatcggtcttgctaattgttgatgggtgcttcattaatttgatttgatgggtctcatggctacgagaaacaaaactacttttgataaaatgcagggcatgaaaagcgtttctgcagtcctt

SEQ ID NO: 14100 - DNA, 1414 bp, Zea mays
  Clone ID: LIB148-029-A3_FLI
cgttcatcagcagtgcggcgatgaaggcagccgtggccgctctgctggtgttcgccgcggtgtcgcctgccgcgcgcgcggtggcggcggaggcggaggcgaaggcgaaggctgtgggaggcgcgccgtcggtgcccgctggctcgctggacatcgcgcagctgggcgccaagggcgacggcaagtcggacagcaccccgatggtgctcaaggcgtggaagcacgcgtgcgaggcgacggggcagcagaagatcgtcatccccaagggcaactacctgacgggcgcgctggacctggtgggcccctgcaagtcctccatcatcatccgcctcgacggcaacctgctcggcaccggcgacctcaacgcgtacaagaggaactggatcgagatccagaacgtcgacaacctgtccatcaacggccacggcaccatcgacgggcagggagccctggtgtggaacaagaacgagtgccagcgttcctacaactgcaaaatcctccccaacagcctggtgctggacttcgtgacgaacgcccagatccgcggcatcacgctgctgaacagcaagttcttccacatgaacatcttcgggagcaagaacgtggtgatcgacaaggtgacgatcaaggcccccggcaacagccccaacacggacggcatccacatcggcgactcgagcaacgtgaccatcagcggcaccaccatcgccgtcggcgacgactgcgtctccatcggccccgggagcaagaccatccgcgtgaagggcgtcaagtgcggcccgggccacggcatcagcgtcggcagcctggggcggtacaaggacgagaaggacgtggaggacgtgaaggtgacggggtgcacgctcgccggcaccaccaacggcctgcgcatcaagtcgtacgaggactccaagtcgtcgctcaaggccaccaagttcctgtaccaggacgtcaccatggacaacgtctcctaccccatcatcatagaccagaagtactgccccaacaacatctgcgtcaagtccggcgcctccaaggtggccgtcaacgacgtcgtcttcaagaacatccacggcacctccaacacgccggaggccatcacgctcaactgcgccaacaacctgccctgccagggcgtgcagctcatcaacgtcgacatcaagtacaacaggtccgacaacaagaccatgtccgtctgcaagaacgccatcggcaagtccattggcatggcgaaggagctcgcctgcgtctgaacctacttgcatccatcactcactcttcgtcacctctctctttctcactctcgccagtctttttttaggcctctggcaatctgcgaactttcttattcattctactagtgtggatctataattccattcaaaatatatacatgatctaaatttcatgccac

SEQ ID NO: 14101 - DNA, 1286 bp, Zea mays
  Clone ID: LIB148-029-F9_FLI
cgtgagctcgcctcctgaagcagagaagtcatccccgccactggcaccgatcagctcaccgccatcagagcccaagtcaccgtcgtcacctccaatggtagagaaaacttctccaccaccggcaacggttagctcaccaccacctacgcctaagtcgtcacctccacctgctcctgtgagctcaccacctccagtggtgaagtcttctccaccaccggcaccagtcagctcaccaccaccgacacctaagccattacctccacctgctcctgtgagctcaccacctccggtggtgaagtcttctccaccgccgacaccagtcagctcaccaccaccgacacctaagccattgcctccacctgctcctgtgagctcaccacctccagtggtgaaatcttctccaccaccggcaccagtcagcttaccaccaccgacgcctaagccatctccaccacctactcctgtgagctcaccacctccagtagtaaagtcttctccaccaccaacactagtcagctcaccaccaccagcacctaagtcattacctccacctactcccgtgagctcgccgcctccagaagtgaagtcctctcctccaccaaccccagttagctcaccaccaccagcgccgaagtcgtcacctccacctactccagtgagctcgccacctccagaactgaagtcctctccaccaccagccccagttagctcaccaccatcagcgccaaagtcgtcacctccacctgctcctgtaagcttgccacctcctgaagtaaagtcttccccaccaccagcaccgattagctctccaccacctccggccaagtcaccacctccaccggcccctgtgagctcacctcctccccctgtgaagtctccacctccaccagcaccggtcagttcgccaccacctccaatgaagtccccaccgccgccagcaccaattagctctccgccaccagcaccagtgaagccaccatcgctaccaccaccagccccggtaagctcacctcctcctgcggtcacctctgccccaccaaagaaagaagaagattcaacggcaccaccggcagaagccctacctccaccttcattcaacgacatcatccttccacctatcatggccaacaaatacgcatctccgcctcctcctctattccaaggatattaagctctatggagagatggtcgaccaagaatgaattgaacaacaatatataaggtcgcatgcgcaaccaaacagctacatgtacattgcaggcgtgtgtgaaattgtttatttattt

SEQ ID NO: 14102 - DNA, 953 bp, Zea mays
  Clone ID: LIB148-030-A12_FLI
cgaccgcatctcgcgctcggtgcgccaggagctggaccagccgctcaactacgcgcgcgtctacctcgccgacacgctgccgcgcgacgtgcgccgcgtcacgtacctcgactccgacgtggtcgtggtggacgacgtccggacgctggcgtccgtggacctcgcgggccacgtggtggcggcgcccgagtactgccacgccaacttcagcaactacttcacggacgccttctggtcgcacccggcgctcaacggcaccttccacgggcgccgcccatgctacttcaacacgggcgtcatggtcatggacgtcgacaagtggcgcgccggcgggtacacgcgccgggtggaggagtggatggccgtgcagaagcggcggcggatctaccacctcggctcgctgccgccgttcctgctcgtcttcgccggccacatccgggcggtggaccaccggtggaaccagcacgggctcggcggcgacaacgtcgagggccgctgccggggtctccatccgggccctatcagcctccttcactggagcggcaagggcaagccgtggctccgcctcgacgcccgccggccgtgctctgtggactacctatgggcgccctacgacctctaccgttactcgtcgccggtgatcgacgagtggtgactggtgagccgtgacgtggtgtgagcatgcaccacctgaggagctactagcaaatggtaggacagttcgatcttgcagaggggaagaggcatcacaatgatgcatgcatgcatggctatctcttgatcttttaatttatataatactgtgcaattcaccctcttaattttgtatatatagatctatagatcctgttgtaaatttgtacagattattattagtatgcatggtggggaggctcatgctgacaaatgtatgtactattgtactgtatatctcgagttcatggtaatacaac

SEQ ID NO: 14103 - DNA, 805 bp, Zea mays
  Clone ID: LIB148-030-B1_FLI
ttcaggaacccctacgactgaagccggaaacccactctcttgcctcctcctcctccttagggaggggtggcagagcttcagcgacggacgaggaggacgtgccggtgcagcagcggttcatctggtcagggaagagaaagatgcggcgcctttttcacgactccatcatctctcttctggattactctcagtgctgcagcgtaaactcgcgcgcagttccctgtaaaagctggagcttttctgagcgtgtaggtgcgttggtggaacttgggcccccagtcccccacccaagatctcacctatctgcactgggctggccggctgggcccgccgccaaccaccgtgcttccgccattgcgtcgccgcataaccttggctaagcgtgaactttgtcacaacaaccacgtttggcgtttccatgcttgtcctgggttcctggcaatccctgtattaatccgtctgccattgcattatcttgcactgactgatcttttccaaccgaaggatgtggtggtcggtagagctaaaagttaagttggaccctgtcgagccgagacactccgggacctcgggttcatcgtgtttcaggtaattttttttcggggccaacacgatatggaataatttcgggctaagtcgccatgcccagaagctaagactagtccagtccaaacacggaacggcatgaaaaaaaaacctgtatatatctagaaaaatacatcatcacattattcataactttgttatagattaaaaaaaaaatcaaatgagaaaagagacatcaatgtttaaccattttgttatc

SEQ ID NO: 14104 - DNA, 782 bp, Zea mays
  Clone ID: LIB148-030-B6_FLI
gttccgccgctcctgcagcctctcgtggacgacgcgggtggccatcgcgctcgacgtcgccaggggcctcgccttcctccacgggtccgaccgccccatcatctaccgggacttcaagagctccaacatcttgctcgacgcgaaattcaacgccaagctgtcggacttcgggctcgccaaggaagggccgatgggcggtgagacgcacgtgtccaccagggtcatgggcacctacggctacgccgcgccggagtacgtagccaccgggcacctgacggtgatgagcgacgtgtacggcttcggcgtggtgctgctggagatgctggtgggacggcgcgcgctggagccgagccgggcggggggccgcgacggcagcctggtggactgggcgcggcccatccttatccggcccaaaaagttggagcggatcctggaccggcggatgggcgaggtctgctcggagatgggcctgcagcgcgtggcccgcctcgcgtacgactgcctcagccagaaccccaaggtccggccctccatggccagggtcgtcaccacgctcgaggcagtcctcgccgccggtgccggtgccgccgacgccccgccgcggtgagaccggaggttgatgtaggtagtagggtcggcatacggattaattaggtgcgtacgggtatatgcttgggcggaggaggcatgtttaatttggtgtaatcatttgatcgaatcgattattcatggagtttaaatatattaaatttgtaaaagaatagaaaaacaattctgcagct

SEQ ID NO: 14105 - DNA, 1396 bp, Zea mays
  Clone ID: LIB148-030-B7_FLI
gccccagcccagcgatcgccggagcccgggcctccccaccgctcgcgccggcggtcgccgatcatggccaccacccccgccgaggatccggagcctgggctacctcctcccaaggctctctgcgagcagccgcggcggcggcgcccgtgcgtcctccttagcttctcggcagcgcgcgaccgcttcctccggggccggttcctctcggcgggcctgcgccccttctccgtccgcctcccctcgccggccggcaccagcaccgtcgtccacctctgggcgccgccgcggtccgcgcggcggcccgtgctcctcctccacggcttcggcgcgtcggcgacgtggcagtgggccccgtacctccgcagcctcctcgcggccggcctcgaccccatcgtcccggacctcctcttcttcggcgcctcctcgtccacggtccccgaccgctccgacaccttccaggccaggaccgtgaaggccgccatggacggcatgggcgtgcgccgcttcgccgtggtcggcgtcagctacggcggcttcgtcgcgtaccggctggcggccatgtacccggaggccgtggagcgggtggtcctcgtgtcgtcgggcgtgtgcctggaggagggggacctcgccgcgggcctgttccccgtggccgacgtcggggaggcggccgagctgctcgtcccccgccggccggcggaggtgcgccggctcgtcaagctcaccttcgtccggccgccgcccatcatgccctcctgcttcctcaaggattacatcaatgtgatgggctcagaccaccttgaggagaaggccgagcttctacacgctctcatcaacgataggaaactgtcagatcttccaaagataaaccagccaacgctgatcatttggggggagcaggatcaggtcttcccaatggagctggcgcataggttggagaggcatcttggggagagttctagattagtagtcgtaaaaaacgctgggcacgcggccaatctagagaagtccaaggaggtgtgcaagagcatcattgactattttcaggaaccgggttcaagtgattgagttggggggaaaggaggtgaagccacaatgtgacggttggaaattctgagctaggacatcgtcctgtgattggcccgcagttttgccgtttccttggcaacttgtaattgtaacaaaagaacctttgtaatcacacggaccatacaagtctcctgtaaattgtctgagggctttctgcgctcaaagaaacacactcctgagctgtgaaattgaagaaggtagaaggctgaggtcctgttcccttgtccagccaatgccaaatgccactggaaaacggcctccaccgcaccaatctcgtcggtttttaatgccattttgatcatatcaattt

SEQ ID NO: 14106 - DNA, 1313 bp, Zea mays
  Clone ID: LIB148-030-D2_FLI
ccgcggtccaaaatccaaaccctgcgagtgtatagaagaagaaccccccaccccatcgcaacccgcaatggtcgcggcggaagatccggaacacttcttcgccgcctcgccgccgctgcgcgacgctgccgttgtcgccgccagcctgcaggagttcgtcgcgcgcaattcgcacgcatcatcagacggcgtcgggcggcggcgcatcgtctgcgtcacgtcgggcgggaccacggtgccgctggagcagcgatgcgtgcgctacatcgacaacttcagctccggccaccgcggcgccgcgtccaccgagtatttcttaaaggctggctatgcggtcattttcgtccatcggcgagggagttgccagcctttctccaggttcctgcctgacgactcgtttctccagttctttgatgtcacaacagattcgaaggttcaagtggccgagtcccaagcaacggtggtaaagagagcaattggggattatcgcaaggctactgaaggaggctctctgctgaaactcccattcaccacgatatttgagtatcttcagttactgaagatggttgctacatccatgagctgtgtgggtctccacgggatgttctatctcgctgcagctgtgtctgacttctatgttccatgggatagcatggcaaaacataagatccagtcagccggaggcccactggatatgaagctcagccaggttccaaaaatgctccccgttctgcggaaccattgggcccccttggccttctgcgtatctttcaagctggagacggatccagacattctagttcagaaagcagagacggctctgaacaagtacaggatggacgttgttgtggccaatctgcttgcaacgtacaaggaggaggtcgtcatcatctcgaatggcaaaagcaacaccattcgaaggtgcagcaaaggcgaggatctggaggagcatatcatcaagctcctagagaagagccactccaagtatatttacagcagcacggaagggtgcagtaagaacgactacgaaaagcttataccgttaggcatcaaaagtctggcttaagggaaacattgattggttctggagctcaaattaatagggaagccccatcagcactcttgagaaattaaagctctacatgcagtgtgtacatttgctggtaatgtatatgtaagcaggactaataggattgttctgttctcacacacgcacacaaacacgccaccaaaaaagatggtccaaagttgtatgtatcgtttgctattcacctgttaattaatggctttgtaatcagaaatgattattgttc

SEQ ID NO: 14107 - DNA, 1455 bp, Zea mays
  Clone ID: LIB148-030-D5_FLI
gcgagtcgctcaacgaccctaacaccaccatgggcgacctggtcccgctggtgcgcgacgtgtccgatggcctgtgcgtcaacgggaacgtgctgaaggcacaaaacgtctccggaaagatcatcatctgcgaagccggcggcgatgtcagcaccgcgaaggccaagatgctaaagggcatcggcgtggtcggaatgatcgtggtgaccccggagttgttcggtccggtaatcatcccgaggccgcacgccatcccgacggtgcaagtctctaacgcggcggggcagaagatcaaggcctacatccacaaggcgcggggcccgacggcgacgttcgtcttcaaaggggcagcgttcaacaccccaaggtcgccgatggtggcgcccttctcctcgcggggcccgaacaggaggagccgtgggattctgaaacccgacatcatcggccccggggtgaacatcatcgccggcgtgccctcgatcgaggacgtggacctgctgcgcaacgcggaggtgcccaggttcgacatcaagtccggcacgtccatggccgcgccgcacctgagcgggatcgccgcgctgatcaagcacgcgcacccgacctggtcgcccgcggtcatcaaatcggccctgatgacgacggcggagcctaacgacaacctccggaagccgatccaggacgtcaacggcaggccggcgaacttggtcgccattggcgccggccacgtgaacccgaagaaggccatggaccctggcctcgtgtacaacatgacggccatgggctacgtgccgtacctgtgcgggctcaactacacggacgacaaggtgagcacgatcatctacccggagccgccggtgtcgtgcgccaagctgtcaaggctcgaacaggacgacctcaactacccgtccatcaccgtcatcctcaaccagccgcccttcaccgcgaaggccaaccgctccgtcacgaacgtcggcgcggccagctcgacgtacaccgtggaggtgaacgtgccggcgtcggtgacagtggaggtgaacccgccgaagctgactttcaaggcgctggaagaggtcctgaactactctgtcacaatcaagtcggccaacggccaggcgcttaccggccctgtcgagggggagctcaagtggttgtccggcaagtacgtcgtgcgcagcccgatcctcgtcactaacgaatccgggccctcgccggcggagacacgtaaaccgtaaccctcgatagcagctggcaaatgcctacttattacgtacatggtaacgattagtttgccatatgagccagcgcttgaaatcgatgggattgtgagcttcattcacttttgattcggtagactaaattaggcatgcagatgcagagcaaatccctccatttgtggtggaagtgagagatacatatataattacctccttgtttttttatatatttattattaag

SEQ ID NO: 14108 - DNA, 658 bp, Zea mays
  Clone ID: LIB148-030-E4_FLI
accaaacatggcatgtttccttgagttccttattatgcatagaaaataaaataaaataaaataaaaacatggcatcaggcttcttcctggattggccaaatggtcacagtgccatgccatgcaaacggcggtagaagctagctagccagaggaaagacgatgcatccgtacgtatatcttgttgtttgtctgaagctatagctcggccttgatgcttctagttggaatctgcgcagagagccctttgatttgatgatgacgtactgatcgtgtttcactctcgtggttgtatacttgtattccatgaaggtttttggaggccctgcactactactcggcgatcttcgactcgctggacgcgacgttcccggcggactcggcgcagcggatgaaggtggagcagtgcctcctggcgccggagatccgcaacgtggtggcgtgcgagggcgccgagcgggtggcgcggcacgagcggctggatcggtggaggcgcatcatggaaggccgtggatttgagcctgtgccgctcagcccggccgccgttgcccagagccaggtcttgctgggcctctacggcgccggcgacggctaccggctcaccgaggacaggggctgcctcctcctcggctggcaggaccgcgccaccatcgcggcctcc

SEQ ID NO: 14109 - DNA, 458 bp, Zea mays
  Clone ID: LIB148-030-G11_FLI
ccgagctcatgcggccctgccacttcacgtacctgcgcatgggcgccgagttcttctcccccgaccacttcccgcagttcatggagttcgtgcgaagcgtcgtgtgcggcgagtgggacgaggacgacggccccgccgacgaggagcgtggcatgactgtgtcaggcaataccagatccagggaggccaaggcggtttgaagcttcaactcatcgccgcccccgccatgtctcagtcagctgtctcgttttatttttgaagtgccaaaatacttgcaaatttccgctgctactagatttagctgagaagaacgagatgatccaggtattagtggatcaggagttgcaaatgtgggatcccacatgcattttttcttttgccgatgtttcgtcgtcttcattgttgttaattttttttgtttcatcttgagaccatttatattatactctctcttttct

SEQ ID NO: 14110 - DNA, 1167 bp, Zea mays
  Clone ID: LIB148-031-D7_FLI
tttccggcgttgcgccaccgttcccgcgtgttgcgttgattcctcgggtcgaaccaacgcgcggcgcggggtcccggtcgcggccatggcgcagctgccgcccaagatccccaccgtggcgccggcgtggccggagttcgggggcgggcaccagcagcagcgcagcccctccgtgggcacgttcctcgccgccgcgcccatgcagccgtcgtgggtggacgagttcctcgacttctccgccgccaagcgcggcgcgcaccgccgctccgtcagcgactccgtggccttcctcgagcccgagcccggccccggcgacggcaatgccggggcgcatgacttcgaccgcctcgacgacgatcagctcctgtccatgttctccgacgacctccaaccgccgccgccgcagccgcagacgcaggccgcgcccgcgccggtggcgagctcgtcgtcgccgtccgaccacaacagcatcaacgacgagaagacggataggggcgacgccgaggaggcacagagcaagtgccacggcgccgccgcggccaccgcggtggatcctaagcgcgtcaagaggatcctggcgaaccggcagtccgcgcagcggtcgcgcgtgcgcaagctgcagtacatctcggagctggagcgcagcgtcacgtcgctccagacggaggtgtcggcgctgtccccgcgcgtggcgttcctcgaccaccagcgctcgctgctgacgctggggaacagccacctgaggcagcggatcgcggcgctcgcgcaggacaagatcttcaaagatgctcatcaggaggcactgaggaaggagatcgagaggctgaggcaaatctaccagcagcagagcctgaagagcggcagggagcccgacgcggccccgtcggtccgcgacgacaaggacatgatcggcagcgaggggaccgccgcgcccggcccgccctcgtgatgaggaggaggtggtggggcgacacgtccagacatccgagtcggtcgctgtagtcggggatggccctgtcgcccgccctgcagcccatcacagcgaggttgccgctgccgctgctaggattggtgtgtgtgtgccgtgtgcgtgtccgtgtgtgcattctttgggggtgtgtaacgtgatgtgatgtaaagagaagaggaactgcatcggttcggttt

SEQ ID NO: 14111 - DNA, 1408 bp, Zea mays
  Clone ID: LIB148-031-F11_FLI
ccaacgaaggcaaggcaagccaggccagcggcgggggagagagaggaggcagaaggagattctagggagttaagggaggcgaccgccatgggggactccagcgactccgtgtcggtcgacgtcgagcggatcttctttggcggcaaggggcatcgagtgaggacgaggcacggccctctatcggtttctgtatacggagacgaggacaagcccgcgctcgtaacttatccggatttagccttgaatcacatgtcttgcttccaaggattgttcttctgtccagaggccgcgtcgttgttgcttcacaatttctgtgtgtaccacatcacacctcaagggcacgagttaggagcggctccgatttcagctgatgtgcatgtgccgtctgtcgatgaccttgcagatcaggtcgctgatgtcctcgattttttcagtttgggttctgtcatgtgcttgggtgtcaccgctggtgcctatgttctcaccctctttgcgacgaagtaccgggagagggttcttggcctaatgttggtttcacccgtatgcaaagccccctcttggagcgagtggttgtacaataaggtattgttaaacttgctttattactatgggacgcgtgggatagtcaaggaaagtttgcttcagcggtatttcagcatggacgtccgtggtaacggacaggatccagaatcagagattgtccaagcctgcagaagtttacttgacgagaggcagggaactaatgtctggcggttccttcaggcaattaataggcgacatgatctaacagaatcgttagagaagcttcagtgccaaacgctgatttttgttggggaaaactcacagttccatgctgacactgtccacatgaccacaaagctagaccggagatactgcgccctagttgaggttcaggcatgtggttcacttgtcacagaagagcaaccccatgcgatggtgatcccgatggagtacttccttatgggatacgggctttacaggccatcgcagcaggaaagcagcccccggagcacactgagcccgttctgcatctcgcccgagcttctgtcgccggagagcatgggagtgaagctgaagcccatcaagacgcgcatctcacgtaacgtttagtgtggggtggatgtcggttggccatggcatattggcatggcaaccacaactcatcaaagtgaaggactcccttgggctgagctgtgcaaccacgaagttttgatgcctttcaggcatctagcgtgagaagatttacagggtgaaggcaatttttgtcgatgcagggaggttgtagataatgagggggaatggttgtttgttcatatacatatatgtgtaagttagtacacatgtacacctaaacacggcatcgttccatacagtacagaatacagag

SEQ ID NO: 14112 - DNA, 999 bp, Zea mays
  Clone ID: LIB148-032-B1_FLI
gctggttcgtggatggctgcgccacgacctctcctgctgtcgctgctggtcgccgtgctagcggtggccgccgatgtcgccaacgccggccacgccaagcccctgacgcctggcgggcgtgtggtacacgacaaccacggcaagttcacggccgggccgtggaaacccgcccacgcgaccttctacggcgggcgggacgggtccggcaccacggcgggcgcgtgcgggtacaaggacacgcgcacgcaggggtacggcgtgcagacggtggccgtgagcacggtgctgttcggtgacggcacggcctgcggcgggtgctacgaggtgcggtgcgtggacagccctagcgggtgcaagcccgacgcggcggcactggtggtgacggtgaccgacctgtgcccgcccaaggaccagtggtgcaagccaccgcgggagcacttcgacctcagcatgcccgcgttcctccagatcgcgcaagagaaggccggcatcgtgccgatctcctaccgcagggtggcgtgcgtgaagcagggcggcatccggtacaccatcaccgggaacaagtacttcaacatggtgacgatcaccaatgtgggcggcgctggcgacatcgcggcggtgtcggtgaaggggagcaagcgcgtcaagtggacggagatgaagcgcaactgggggcaagtgtggcagaccggggaggacctcacctgcgagtcgctgacgttccgggtgatgaccagcgaccaccgcaaggccacctcatggcacgttctccccgctgactggaagttcggcgtcacgtaccaggcatccaagaacttctaagtagccactttccctcctcttcttcatcctgcatatgcccacaagcaaccatgcaaatgataacatgcatcatgcatgcatattcattctttcgctcatgcactccaatatggtgccggagttaaaaaaatgtaaatcaatgtgcaaactcaaatgacatcttaaccagttgtgatc

SEQ ID NO: 14113 - DNA, 894 bp, Zea mays
  Clone ID: LIB148-032-B4_FLI
ccaactcgggtgcagcatgctgctgatgacgccgatctgcagggccttccggtggccatcaagcagctggaccgcaatggcttccagggcaacaacgagttcatggtggaggtgctcatgctcagcatgctgcaccaccccaacctcgtcagcctcgtcggttactgcgccgagggcgagcagcgcctgctcgtctacgagtacatggcactagggtccctcgaggaccacctgttattgctgcgtgacgatggccatggcagccctttgccctggcgcacgaggatgaagatcgcgctcggcgcggcgcggggcttagagtacctgcacgaaagcgctgtcatctaccgggacctcaagtcctccaacatcctcctcgaccaagactacgcgcccaagctctctgacttcggcctcgccaagctcctccccgccccgcgcaccaccgactcctcctcctcctcctcaagcagcagcagcagcggcggcggcaaggtgatgggcacgtatgggtactgtgcgccggagtacttgcggacagggaagctcagcgtcaagtcggacgtctatagctttggggtgctactgctggagctcatcaccggccgtcgagccatcgacgccagccggccggatggcgagcaaagcctggtgggatgggcggcagggatgtttggtgactccacgaggttccatgagttgctggaccctcggctggtgatggcgattcgaggacggcctacagcatcacagctgaagcaggccgtgggtgtggcgtcgatgtgcttgcaggaacaccacgccctacgtcccgtcatggccgacgtcgtcgtggccctttccttcatcgctaatgattcccctgcttctcccccctgctagctcagctcgatc

SEQ ID NO: 14114 - DNA, 1346 bp, Zea mays
  Clone ID: LIB148-032-B6_FLI
ggaaaccagagctcctgactgttcctctctccctcctcacgggcgggctccgtctgttccgtccatccaccgccccggtcgtctcccggccagatccctctcctgcaaggtttctttgcggtatggtcggttctctgtggtttctcttctgaatgtgctggtgcggtgatgttgttttgatttgtgttcgctttggcggatctggtcgcgcacagagtggccggagaagatgatgggcgggttcctctccagggtcctcctgctggcttttggctatgcctatcctgcctatgaatgctacaagaccgttgaactgaacaaaccacagattgagcagctcatattttggtgtcagtattggattttagttgccctgttgacagttttggagagatttggagattttacaatatcatggctaccgttttactcagaagcaaaggtgttgttctttgtatatttgtggtaccctaagacaaagggaactacgtatgtttatggaactttctttaagccatatatttctcagcatgagaatgaaatcgaccgaaatcttcttgagctcagagctcgagccaccgatatggttgtcctttacttccataaggctgcttcggtagggcaaaatactttctttgacgttttaaaatatgttgctgcccagtccccttctcggaaatcaaggctgcaccctcatcaggaaccacagcagcagcaaccacaagtgcaggtggagctgcagcagccgcaaccacaaaaacaagcagcacctgttatgcgcagaggagcatctattgctgctcggcaagcagcaatggcacagcaatctctggagactatacccgttccatcttcacccaagatcaagcgtcaaacatcagggagacctggttcggtggcatccacaaagcctgcagcagctgcatccacaccaaaacctggcggtagcccaaagaaaggtgaggtcaaacctgctgtcgacccagttcaaactccagccacaagtgcagattcaccaaaatccgagcctagtgccccaccactttctgagaccgaagaagtagacaacatggcaatcgatgaggtcagtggtgatgctgcagagggcgcggaagagcttgaccctgcgctcgaggagacgctgatggaggagacgatccgtgtgacgcgcgccaagctaaggaggcgcaccgccaccgaggattctgctgggaattagctgcatgccgttgttttccctgcacattgtattgatctttttccgagttttaggctcacatgttgtttgctggaatggagatatgttgttgttcacttggttcttgtgacacagagttaattatctt

SEQ ID NO: 14115 - DNA, 1142 bp, Zea mays
  Clone ID: LIB148-032-D1_FLI
cgccggccgcccgcggtcaccctcgcgctctcccgtcacgccggatcggacggaccccggccccctccttcccaactccaacgttggcaagagaggagggcgttcctaaccaccataacctgcagcatggcccgcctgcccaccagcagcggcatggcagcactgctcctcctcgtcgccttcgtcgtcctcccctccgccgccctgtcctcctcgtcctcgcttctgcactcacctcctgagagtgatgagacaagcggcggcagcgagcagcaagccccgccggaagacgagaacaaggagaaagagcggcagctggccaaggagaaggcgtacgcggcggagaaggtcgtccagcaggagatgctcaagtacgccaaggagaagggtctggtgtccccgaccaacggcacggggtggtacaggggcatcgcccgggagttcgtggacgcccacaacgagctccgcgcgcgctacggcgtgccgcccatgaagtgggacaaccagctggcgcggcaggcgcggcgctggtccaacgccatgcgcaaggactgccagatcctccacagcggccacgagtacggcgagagcgtgttcaggagctacgacgactggaacgccaccgccagggaggccgtcttctggtggggcaaggaggaggccatctacgacaaggagaaggagaagtgcaagtacggcaaggtcttcaaggagtgcggccacttcgcgctcatggtcggcaagaggagcaccaaggtcggctgcgcacgagccgagtgcttcaagggcggcgtcttcatcacctgcaactactatgcaacggacctggacaagaacaagaacaaaacaccaaacaataactgactccatccacccatctgttcgttcctatctacgtacgtacgtagtagcgctgacttatttactgagtgatgattggattgttaattaattactactgaagcaattgcctgattccgaggttggagatgatgatgatgaagaagacgacgactgctacgtacgagaggatcctcctccctcttcttcttttttgttttttaattttgttcttccaattttgagcccaatcagtcaagcagattgtatctatatctatatatatacacacgatcgagtac

SEQ ID NO: 14116 - DNA, 661 bp, Zea mays
  Clone ID: LIB148-032-D6_FLI
gatttggtggtacacgggggcacggggcagatctcttgggtcatcctctacgcgagcgggccgcttctcccatccagccgcgcgcggcgtcgccggaaccggagaagggaggggaaggagcgcgagatggacaaggccaataagctcagcaccggagcgggggagaaggcgaccaagagcaggagccacgggtccacggcgctgttcgtcgcggtggactacgcgttcctgctcgtcttcgccggcttcctcgcctacctcgtcgggtcgcggatcctcccctccgccgccggctccgcctagaccggcccgcgttcgtggatctctcttctttcttccacgtttttttggagtcgatggctgcgggagcaccgggatcttgccgggtggttctcgtctcgatctgatgccgctcccgcgatgtaatctggcgacaatttgacgagaagagaagtagcggcgtgtttcttggcaactcgcctggtaatgtgacgcatctttccttattctgttgctattgctactagtactatccctgctcgtgtcgtgtgtgctgagagtctgagattgcttgggactttgaatgcggcgtttatgacgcgatctgtgatgtctgcttgctactgacgccagcttaaagtaaacccatcagctttatctc

SEQ ID NO: 14117 - DNA, 431 bp, Zea mays
  Clone ID: LIB148-032-E12_FLI
cgccggcgtgctgcggctggccatgggcgccgtgcgcaccaaggccgccgaggccaaggccgcggcgggcgcgctcgccaacgacccccggacgcagccgctggcgcgcggcccgctgcacgactgcgtcgagtcgttcgacgacatcgcctacagcctcgaccaggccgccaagtccctcgccgccggcgaccgcgacaccaccggcaccatgctcgacaccgtgcgcaccgacgtggacacctgcgaccagggcttcgaggagcgcgaggagctcacgccggtcatggccaagcacgacgccgagctcgccaagctctccagcaactgcctcgccatcgccaccgccgccggcttgcgctagatcgcctgtgcatgtgctagctcctaggcaacaacaacaataatatatataccgccaccttataatt

SEQ ID NO: 14118 - DNA, 1903 bp, Zea mays
  Clone ID: LIB148-032-E3_FLI
ggcgatgataaggagtcactcagctgaattacttcgggatggcgtatcactggagcaaataggtcttgatttttctccagaactcactgaaacaactgctccagattccatccggatgcttgttcaaacagttctctcagataagaaaccagaagaaattcaatcagttgtagaatcactcttgagcaaagtaattaatgaacttgagcaccgtattgcaagccagagtgaattggtgaaagaaactatggataccaacggctgtaactcagttttgagaatggagtctccctgtaacaccaatgacagtaaatcattatccagagtggaccctccacaagtggagttgacttcctgcagtgatctggagaaggtgaaagaaactatggataccaatggctgtaactcagttttgagaatggagtctccctgtaacaccaatgacagtaaatcattatccagagtggaccctccacaagtggagttgacttcctgcagtgatctggagaaggccactgaaaatattaagatggacgaagttgatgagaatgcgttgagtctgacagaagatgtaagcacattagtacatgcaccactaagcaatgataatgtaaataaaaatatgccaaagccagtgagaaattttgatcgagaggagaaacagatccaggatttgaaaagtaacatgtccacagttaagtgttgcatggagcagttaaaactgctgtactctgaagaccttaaaaagcttggtaatcagttgcgtattgtttctcatgcggcttctggatatcgtaagtttgttcaggaaaaccgcaagctttacaaccaaatacaagaccttacagccaagtcaaacgaggaaggaggtgaaggaggagaagaagttagagagctcaaagaacagattgcttgcctcagggcagcattagctaggaaagatggaggtcaagagagcattcgaagcactcaatcaagcccagacatatatagaatgagaacgggcaatggattacctgcgttgaggcacccaatagtagatggaagtatagagaacgactcggcattgggagatttcgctgagcactcgccattcgggagcagcaattcgctgccagagttgggaccagatggcacacaagatctagccttctaccaaagaagcagccctgaacagcaatggagctggtccgggtctgttgcaacagaggattccgatgacttcgaggttgcaacgaattgctcgtcagatctggattgcgtgagaccatctagtgccccaaaagcttctggtttaacaaacggagggggctcagctgcaagaaagtcccaactgaagggtgcaaaaagttcagacatcagaggagggaatcctgcaaaaaagtcatcgcccttacagaaaaagctgagtgctccctcaccaacggtaactaagaagagcggaactgaaggaaagaaaactccaaatggaaaaacaggagccaagaagtaagcaactcagttgaaacttcgttttgttgggaccaacttcaccatggccggggacagataaacatgttgatcctatctactgggtgatacattggtgttttgacacacggatatgtcagtcctattggttgagagagcatgctggatcttcggccatatgctgtaaatcgcttgttaatttttgttctactagtacacgaagaaatcaaggaaaaaaaaccttgactacgggaagaaaatcacggccacaggggtattttaacctccttcctaatgcgcatatatctatcgaagttgagtaaactttgatataatgtattcatgggtcacgtccaaccaaccctgtgattggttgcttgtaaatttttgtggccttaatcatggcttcaatgatgtccttcgttaaatgtgc

SEQ ID NO: 14119 - DNA, 1942 bp, Zea mays
  Clone ID: LIB148-032-E5_FLI
cgacaagaaagaagagtactatctcagctactggattgggaaggatagcttggtggacgatcaagtgtcggcatctcaaataatcaatacaatgtggaattcattgaaaggacggccagttctgggccgtatataccaagggaaggagccaccacaatttgttgctcttttccagcccatggttatcttgaagggtggaatcggatctggatacaagaagctcatagaagaaaaaggtgctatgggtgagacttatactactgaaggcatagctctaattcgagtatctgagacatctatctacaacaacaagactcttcaagtagatgcggtagcaacgtctttaagctcaacggagtctttcgtactgcaatctggaaatgctatgtttacatggtttggcaattctagcacatatgagcaacagcagtgggcagcaaaagttgctgaatttttgaagcctggcgttgcagtgaagcactgcaaggaggggacagagagttctgctttctggtttgctcttggagggaaacagagttatacaaataaaaacactcctcaggatattattactagagagcctcacttgtatgcattctcattcaagaacgggagactggaggttactgagatcttcaacttttctcaagatgatttgttaactgaagacatgatggtacttgacacacatggtgaagttttcatttggattggtcagtatgtggaatcaaaagagaaacagaaggcatttgacattggccagaaatacgtggagcatgcaaattctattgaagatctttctccacatgtaccactatataaagtcatggaagggaatgagccatgcttcttcaagacgtacttttcttgggataacacaaaatctttggttcatggaaattccttccagaagaaactctcgctgctttttggattgcgttctgagggtgcacctaggagctctggtaatggtgggccaactcagagggcatctgcattagcagctctatcatccgcattcaatccatcatctcaacaaaggctgtctaatgagaggcctaaaagcacaggcgatggacccacgcaacgtgcctcagcactggctgccttatctaatgcattcaacccatccttaaaacccaaaacatcacctccatctcgctcaggtcgaggttctcaaagagcagctgctgtagctgctctatcctctgtgctgactgctgagcaatctggatcttcagaatttctacgatccaaagctagcaacacagcatataagactgatgtcgaccggattgtcataactccagctggcccatcaggcccatcttctcctcagtctgaagctggggagtccaatgtgtttcaccaggaaaaagatgctgcagcagatggggcaccgcctgacactgatggagcagtggctgaggccggagaggaagaaacaacggaaaatgttggtgaagcgacatttagctatgaccgcttgatatccaaatccaccgatccagttcgtgggatagattacaaacgcagagaggcatacttatcagatagtgaattccaaactgtttttggcatgaccaaggatgcattctaccgacagccaaattggaagcaagaactacagaagcgaaaagcagatcttttctaaagagaacaagccttgttaccagtggtctgctacagtatgcaatcctcttgtcgtgaatggtcggtcccatgagagttggtgtattaatatattgttggtcgtttctgaggacggtctactggtggctttgcacggttgtttcttttttggcaaccaattttataggtcaattcttttatttgtatatggcctgggttgtgctgcttgcgaggtcctaagatgcttctttgttcttctttgtgaatgtccatatgtgtatatcattttctactcgccagtttgttacgt

SEQ ID NO: 14120 - DNA, 751 bp, Zea mays
  Clone ID: LIB148-032-E9_FLI
aagaccctaagaaatctaagtattcagatacactgcatcggttttggaagaaagagcatgattaggggtgttaaaagtttatggagctgtcagaattacatgatggctttattgttcaggattctcttaccatcaaagcccaagttcaagtcattagaagatagaccgtccatttcgttgccttgatggtcagtaccgaagggaactaattagggtgtatctatcaaatgtggaacaaatttatcggtgttttattgatgaaaaagaaggacgttcagcaggctgattgaggataaactcgggtggtccagtttcagtggattctggctagccatttttcatctttgattttatctgaacagagacttgaactcgctatcaactttcagtagacctgctaaggagcgatctccgtccaattatcagccagtgaatttatgccctgtaccatgaatagagatagtcaagaaattagaccatttcaagttcagcgagagggactatatggcactggaggcgtctttcttagagtgattgaaaatacaatctacctcaaaactaataacatcgtcagagggaggaagatcagcttgcgtattggtgaagagaggatccttggttgaaagtgatgtttctccatatctttataaggttaaggaagagcagttggggttcttgtgaaacgtagattgtatgaggtctataaatttttatgctctatcattacttgaatgaatcatgtatcactggc

SEQ ID NO: 14121 - DNA, 942 bp, Zea mays
  Clone ID: LIB148-033-A11_FLI
gaggattgtatgggcgttgggcaatgccggcagcaccatgcatggatgagaagtaggcagcaagcgggagacagatctcggcaaggctgaaaaattcaaagtgaggggaaagcaaatggccgtgcttaattattcaaaggctagtttcttgcctgttcaggtttaccactctagtttcgctgatgatgatgggatcacaaaagcttgcagctgtcctttgcttccactgaaaactcatatcaagggcccggcaccagcctctgaccctgataaagcggacattgttgatgaagccataactttctttcgagccaatgttttcttcaaaaatttccatgtgaaaagctcagcagacaagttattgatctatctgacgttttatatcaatattgccttaaaaagactagaaggttgtcggacactagctgttgggactaaagcaatcattaatctaggattggagaaagttcctgtacctggggaaccagggtttcctttccctggacttttcactcttccccagtcccaggaggaagcagaattgttgaggaattatttgaagcagataagggaggaaacaagtggaagattgctcaactgtgcatacagagctaatggctttccaaacaagtggtggttggcttttgctaagaggaagttcatgaacattgtcatcctttagacttgggctttttgtaccaactggttcaagctgttttttcactcatgatcgtgtgaagtatccacacacaacaaagatagttatcctacatcccaaagtaacaagccaaagacttcgatgataggatagatgaatgacataagataaattatttgttcccaatttgcgatgtataaccgtgggaacagtaattatcatgttgtattgccttttgtaattctcaccctgctatatcagagagacgaaacctgatacggggt

SEQ ID NO: 14122 - DNA, 659 bp, Zea mays
  Clone ID: LIB148-033-B9_FLI
ctttgcagcagccattactatgtagagagcgcagagggccgtcacctggtccgctcgccgttgtgtccattcggggcaaacacagagacctcgggagcctgccgcacctccatcgagcggaacggaagaatggtgggagaacagagaaactccaccgccatggcccggcgccgcgcctcctctggtgcactggtaccgctgccatgtgccgtgcagtgcgttggtgggatcctgtcgtcgtggtgggaatccagcggccctgggtaattcgggtgtgcgcccacatttggcctcggtgaccagctacaggattccgccgacatctccagtgcaaatcatgtggtcattccgggtggattgatgccgggggaccctgggattgttcaccggaaaatctacacagcggcaaagcgactctgagcggtgaccggagtgattacgccatcccatttggtaagaagcttacctgtcaattctatttttcctccgcaacgcatagatcgtctcggtgtgggggttttaggctcggaatctaggcaggaggtggtgtgtggcatggcgctgtaacacccatgtgtttatattctgctcgacaacgagtatggatttaagcgcataatatcagtggataaaatagatactaaattttaatcatcttc

SEQ ID NO: 14123 - DNA, 1012 bp, Zea mays
  Clone ID: LIB148-033-C11_FLI
aaccatagcatcaatcatgtctggtcgttcgtggacaataatggcgcctctcctggcgtcgatgctgctcgtcgggctcgccgtgggctccgaggaggaggaggacggcggcggcaaaaagaagccccacgtcaaccacggcaagtttaaggcggagccgtggacggacgggcacgcgacgtactacggcgggcgcgacgggttaactgacaccacggacggcggcgcgtgcggctacaagggcgagctggggaaagactacggcaccctgacggcggccgtgggcccgtcgctgtacaccaacggcaccgggtgcggcgcgtgctatgagctcaagggccccaagggcaccgtggtggtgacggccaccaacgaggccccgccgccggtgagcgggcagaagggcgagcacttcgacctcaccataccggcgttcctcaagatcgccgaggagaaggccggcatcgtgcccatcacctaccgcaaggtggcgtgcgagaggaaaggcggcatccggtacacgatcacggggaaccagcactacagcgaggtgaaggtgaccaacgtgggcggcgccggggacgtggtggcgctgtgggtgaagggcaacaagcgcgtcaagtggacgccgatgaagcgcagctggggccagctctggaccacggaggtcgacctcaccggcgagtcgctgacgttccgcgtcatgaccgccgaccaccgcaaggctacctcctggcacgtcacgccccgcgactggcagttcggcaaaacgtaccaggccaccaagaacttctagggtcggatcggggagctgagccgcgcccttctttatatgtatatatatgcatgaagcggattatattggactgttgtactgtgtactaccttgtttattccatgattaacatattgttatattgactgggttgtttgtactgaaaaaaaaacacgaacgaaacctccgtcgtcgctggatcggagtcaataaggccttgttcgtttctgtcggatt

SEQ ID NO: 14124 - DNA, 1402 bp, Zea mays
  Clone ID: LIB148-033-D3_FLI
tccccgcgccgatggatctccgcctcgcccactaggcctccggcgcgaccgggggtgggcagggggatggggctcctcgggcggaggacgttgctgcggctcctcgccctcgcttccgcggccgtcgccgtcgccgtcaccgtggaagcctacgagggcgacgctgatccgctctacagagcttgtgtggaaggatgccaaaagacaggctccctgaaggagacttctattaaacattgtatggtgccaaccgatggccaacctgttgacaagtcatggtacacgcatgagccactgtacttgcaatggaaggactggaactgcaagagtgaatgcagataccactgtatgatggaaagggagaatgaaagggcaaagcttggcctccagcctgttaagtatcatggaaaatggcctttgaagcgtgcctctgtgtttcaggaacctttatctgcagctctctctgcgcttactcttgttgtgcaatttaatgggtggctatcatttttcctcttgctttattataaacttcctctgcggccagaaactcacaagacatactatgaatacactggcttgtggcacatctatgggctccttgccatgaattcatggttctggagtgccatatatcacagttgtgacacaatttggacagaaaaactatatttttcatcagatgctgcctttctggggtattccctcattttggcgatactgcggactttaaatttaagagacgaagcatctagagttatggttgccgctcctattctagcatttgtgacaacccacattctgtacctcaacttctacgaacttgacaaaggcctgaacatgaaggtttgtactgtgataatcattgctcagtgtctcctatgggcactgtgggctgtcatgactcggcatccttcacggctgaagatcatatttgttgccatcggaggtgcggctgcggtacttctggaagcttctgacattcctccgcgatggggatatgtggatggccgtgctatatgccttgctgtggctatccccctttcgtacctttggtggagctttgccaaggaagatgcggagatgcgaacgtcagcaatcctgaagaaggcacgttaacaagtcgcctgtgtgataatttcatgcctgcgcccagccattgtaaagataaaagtttcacttgtaatcttaggtaactactaacttagcatgtgaattaccgtcttatttttgttccacgatgttcttgtcccagttcagaaggccatgttgtttaaggggccacttctattctttaatttatacagcaactgccacttggtaggctcgtgctcatcaactataatctcagaagattgttaccatgggttatcagtgagtggctatcataataatgtcttttttt

SEQ ID NO: 14125 - DNA, 2288 bp, Zea mays
  Clone ID: LIB148-033-D8_FLI
cgaggttctctccgacaatgggtcctctcctccgcgccgccgcgctctccgtcgcgctcctcgccctcgccgccgtgggcgaggcgcacagcgccaccgaattcctcaacatcttcaaaccgcggaatgagcacgactacttccacaacgcgaaccaggaggaggatgtgatgccccgggccagcgaccagcagaacctcataacggcgccggtgaccaagagcggcctcatgaaggtgccgccccggtccgcgcccaccgcggtggcgcaggacacggtggtgctccccgtggacagcgccgcggggttccccggcgcttggtccatcatcagcgagaacgcgggcgtgtccgcgatgcacctggtgatcatgcggagcgacaaggccatcatgttcgacacggtcaccacggggccgtcgctgctgcggctgcccaaggggaactgccgcctcgatctccgcagcaagcaggtcggcgccaaggactgcgccgcgcacgccgtcgagtttgattacgcgacaggcggggtcagggccctcaaggtcttgacggacgtgtggtgctcatcgggcgcgctcgacgccgagggcaacctggtgcagaccggcggctacttcgaaggggagaaggttgtgaggtacctgagcccatgcggcaactgcgactggagggagttcccggggagcctggccgaaggaagatggtacgggacgcagcagctgctcccggacggccgctccatcgtgctcggtggccggcgtgcgttcagctacgaattcgttccggcggaagggcagtcgaatgcccaagccattcccctccagatactccgtgacaccaccgacgacgtggagaacaacctgtacccgttcgtccacctccttcccgacgggactctgttcatcttcgccaacgaccgctccatcctgttcgaccccaggaacggccaggtcgtccgcgagttccccgtcctcccaggcgggggtcggaactaccctgcctccggcatgtcggcgctcctgcccctcgacctccgccgcggcgacgtcctcagtcccgaggtcatcgtctgcggcggctcccccaagaacgccttcacgctcggcgagtccaacacgttcccgcccgccctcaaggactgcgcgcgcatcaaccccttgaagcccgacgctcggtgggcgctggaccagatgcccgtggcccgcaccatgggcgacctgctgatcctgcccaccggcgacctgctcattctgaacggcgcggccaagggctgctccggctggggcttcgggcggcagcccgtgctgagcccgctcctgtactctccgcgccaggcgcggggctcgcggttccgggcgctggcgccgaccaccatcccgcgcatgtaccacgccaccagcgctgtgctgcccgacgccaccgtgctcgtggccggcagcaacaccaactcggcctacaacttcagcggcgtcgacttccagaccgaggtgcgcgtcgagcgcttcaccccgccgtacctcgccccggagcgcgcggccaaccgccccgctatcgacgtggccaccgtccccggggacggcatggcgtacggggccaagttcacgttccagttctcgacgcccgtgcaggccgtggccgagcccgacctgaaggtgaccatgtacgcaccaccgttcacgacgcacggctactccatgaaccagcgcctgctggtgctgtccgtcaccgcgttcgcggccaacgggcagaggtacacgataacggtcgacgctccgggaaagcctgagctcgcgccgccgggatactacctgttgtacgtcatagcgaaaggcgtgccgagcaaggccgcgtgggtgaaggtacacaaatgagaacgaaggcggctcggagacgaatgccagtcgcgtttggcacgacaatacacaagtgtccaccggagtagctggacctctcgcaaccgcacggtaggaggacgtgcggcggtggctgcgcctgtgcatcggatttcgtttgttttctccatgaattttgcatcgcgtgttagtgctccctaatatttggggcaaaacatatgtttagtagagggatatgggtcgactcagattaagtaattagcgagccaaatgtggtatcgtcgtccggttattggtaatgtatctgctgtggtataaatgtatctgctgttggtatacattatgaaatcacattttaattttctatgtagagaccgacgggccattttatcctcttgtacatcacatgtgtgaaatgaaagtgtgggttct

SEQ ID NO: 14126 - DNA, 1241 bp, Zea mays
  Clone ID: LIB148-034-C5_FLI
cgccaggatgctggcggaggcgagcatggcgaccaagtgccccgaggggaaagtgccgctcatctccatcaacgccctgcaccagctgcacatcttcatcttcttcctcgccgtcttccacgtctcctacagcgcaatcaccatggcgctcggcagggccaagatacgtgcatggaaagagtgggagaaagaagctgcaggacaagactacgagttctcacatgacccgacgcggttcaggttcacccacgagacttccttcgtgaggcagcatatgaatgtgctgaacaagttcccagcatcattctacatcagcaacttcttccggcagttcttcaggtccgtgaggcaggcagactactgcgcgctgcgccacagctttgtcaacgtccatctggcccctggcagcaagtttgatttccagaagtacatcaagcggtctctggaggatgacttcaaggtgatcgtggggatcagtcctcctctgtgggcttctgctctcatcttcctcttcctcaacgtcaatggatggcacaccatgctctggatctccatcatgccggtggtgatcatcctgtcggtggggacgaagctgcagggcatcatctgccgcatggcgatcgacatcacggagcgccacgccgtcatccagggcatcccgatggtgcaagtcagcgactcctacttctggttcgcacgccccaccttcgtgctcttcctcatccacttcaccctcttccagaatggcttccagatcatctacttcctctggattctgtatgagtacggcatggactcgtgcttcaacgactccgaagagttcgtctttgcacgactctgccttggcgtggttgtccaggtgctgtgcagctacgtgacgctcccgctgtacgcgctcgtctcccaaatgggctccaccatgaagcagtccatcttcgacgagcagacctccaaggcgctcaagaactggcgcgccggcgccaagaagaaggctcccaccggcggctccaagcacggcggtggtggctcccccaccgccggcggcagccccaccaaggccgacggcgacgcgtagagaggaacacgctaactttaatttctgtgtgcttaattgcctaggctcgttaagtcagaacatgcatgcatgtaacaccactgctggttttcatatagtgtcgacagatggtcaacgtactttttgcgatcccacttgtattttttttttacaatgaagcacccgt

SEQ ID NO: 14127 - DNA, 2190 bp, Zea mays
  Clone ID: LIB148-034-D5_FLI
catgatgccttcttccctccctcattctcgctcgcccccattccaccttcgacgacccctttctccttctccctcctcaatcacctgcagcgaaaaggaaaagggtgtcagaccgtaactaagagctatttagcaataatacatacatagctataccctctttaggtcaagagggtggagttctccttattcggaggaagagctccatcctcattctacaagaccaaaccaataaatggcctctagcccacagtcctcgccatcatcctccaagaagtcgccgccaccacaagaagcatcagctttggcgccaaaatcatcttcaaagtcaccctcgccaccaaagggtgaatcaaattcatctcccagtcccccatcgaaatcgtccctgtcaccaccgccacgaccaaagaaaagtgctagtacatctagctctaaagatgggaagacgaagaagtcgtcttcatcgtcttcatcgtcggataatacagccgctgtgatcaccggcgtggtgcttggggtggtgggcttcgctctgctcttgtccatcgtggcgtgcgtgtgctgcgccaagaagaagaagaaacgtccgcccccaatgaacatgcccttctacaccgacgagaaaggcaatgtgtattaccccaacgctggtctgccgcctatgtggcagcaatatggcagcaacggcagcatccctccgccgggatggcaccatcacggcggcgggaacccgctgtcgccatcgctgggctcgatggcggcgcccctgagcggcgagatgtactcgtccggcccccacgggcctcccctccccccaccttcgccgaacgtggcgctggggttctccaagagctccttctcgtacgaggagctagcggcagcgacgtcgggcttctcgtcggcgaacctgctggggcagggcgggttcgggtacgtgtacaagggcgtgctcgccggcagcgggaaggaggtggcggtgaagcagctcaagtccgggagcgggcagggggagcgcgagttccaggcggaggtggagatcatcagccgcgtgcaccaccgtcacctggtgtcgctcgtgggctactgcatcgcgggcaaccagcgcatgctcgtctacgagttcgtggccaacaacacgctggagcaccatctgtacgccaaggacggccctgtcatggactggagcacccgcatgaagatcgcgctcggctccgccaagggcctcgcctacctccacgaggactgccatcctcggatcatccaccgcgacatcaaggccgccaacatcctgctggacaacaacttcgaggccatggtggcggacttcgggctggccaagctcacgacggacaccaacacgcacgtctccacgcgcgtcatgggcaccttcggctacctggcgccggagtacgcgtccagcggcaagctcacggacaggtcggacgtcttctccttcggcgtcatgctgctggagctactcacggggcgccgccccatcgataccaccaactacatggaggacagcctcgtggactgggcgcgcccgctgctgagcgccgcgctggcgggggagacgggcttcgccgagctcgtcgacccccgtctgggaggcgagtactccgtcgtcgaggtggagcgcttggcggcctgcgccgccgccagcacccgccactcggccaagcgccgccccaagatgagccagatcgtgcgcgcgctggagggcgacgcatcgctggaggatctgcaccaggacggcggcaagcccgggcagagcgtgctcttctccggcggtggctccgacaacatctcccgcctaaggcagctcgccttcgacagcggcgactactcggactacagcaccgactcctccaccggtggtggtggccgaccgccgcgcaggccatgatgatttatcaacttgacaacttattactagcacaaattgaagctacagtctatacacacatgcaaattagattgagcgagggagatcgagagagagctcttaactaatttgagggcgatctatagttaagctatggcagcaagtggcgatcgatgtggagatccatggttcatgtaattatattattgctgtgcttgtgatatacacatgcatggatttttactggactggatcctcgatggttatacgtacgtacgtacgcaggatcaaaggcggaactc

SEQ ID NO: 14128 - DNA, 1017 bp, Zea mays
  Clone ID: LIB148-034-E3_FLI
gcgcgcgcacgcacgtatggtcgaacaatattaggagagaagctgagagaccggttcctgaccttccaaaaaagaagtaggcataagatagatctctccgcctcttctcgcccaaccccctccaacaagtaacattgaccgcaaacggatcatcgtccgctgcggtcaatgtaattaattaagcttctgaatcatacatagcttggcaaatgcctgagggctagctagctagacaaggtccattgagctagcccctttgggaagaagggagaggaatggcgctggtggcccgttgagcgaggaagaggctattgagaacccgttaacaagaattgccagcagcatctggacaatcttgttaacagagttccaaaggttcaattccaagcagatacaatttccgagttggatcgagaagagtgcgtgcatccgatccgtccgtccacgttcgtggttcgtataagctaggtttcatcaaccatgggcacaaagatgaagaagggcatcctgaagccgttccgctatatctcgaacatgatggacggtaaggagcctgaaatgcaaattgggctccccacggatgtaaaacatgtggcacacatcggttgggatggtcctggatccacgaacagcggcagcagcaacaataataatgccggaggagctcctagctggatgaaggattaccactcggcgccgctcgactcgtcctcctttaggagcgagagtgggggcacggctgctgcgaatccctgggcttctcaagagatagtcatggacggagcaagcatcggagagacctccttcagggacacgaaaagcgaggcgggcgggggcgacgactccccgccgtcccccgccacgcgccggacgagacgacagcaccgctctcgcggctcggccacctcctccatggacgacaccaccggcggcgagggcggcgccgaggagaaggagaagaggaaggagaagggcaagaagggcgcccgcaagaaccgcaagaaggacaagccggcc

SEQ ID NO: 14129 - DNA, 643 bp, Zea mays
  Clone ID: LIB148-034-F1_FLI
gcgggacggggtcgtcccgcttgcagggcgtgaagcgccgtttcccgagaagacgggctcaaggacagcgtggtggtctccggcgaaggagcgggcgcgaagggacaagggggcgtggacaagctccggtgaggacggcgctgaatcgaccttcgacccttggctcggggaaacgcgagcacgcagcgactcggggaagcgctggggatcggaagcgcggaccggcacggggaatgtcgagcgaccggcgacgacggggaggccccagcgaccgggtgggctgtgggcggcggcgaatctacccgccgaggtcgcgataaacaatgttatgtgcaaggataatattcttactaagagctgatttggtgattaggtatcccaaggggatccatgggggaggaatcccttccaattcaattttgaaaagtaagaggatttcttcccctagggatccccgatcaccaaattagtcctaagagcatctctaacgatgcctcaaactagtgcctcaaattaaaatatagggctctacacaggaaaaactactccaacagtgctctatttcataaaattttgtcaaaaaactatagggcaccctctcaagtgactcaaatatactacaccgtagtgggctgccctattt

SEQ ID NO: 14130 - DNA, 752 bp, Zea mays
  Clone ID: LIB148-034-F12_FLI
ttcggtgcctttttctagcggggaggaggcaggcggcgcaatctggcaccggccatcacgttccctccggccgcttccccctccctgccctccctttccccagatccgaagccattaaaaccagcggatctcacctcggggcgcgtccgcggcatctgggcaagcgagtggtagagccagcagccatgagatggtatgcatcggtagcctcctgagggcgctggtcctgagtgcggcggcgtctgcgggcaggcgccgggggcccaggatcctgtgtggccacgaggcggatgtacgcgtgactcctcggcacggacacggctggcgcggattccgggcagtcacgggaaggatgatgctggactcctctgactgtgcctctgctgccgccgccgcggagacggggcaggtgcagccgcagcgccgcgcggtgggggccgtgcccctggcgcacgacggcggctacgccagcggcggatgggagaggtaatgtatgtgcgtgtggtttgagaggcttcaagtaatgtaacctgtcggcacttgcatgtcgtggtgcggaacggggcatgtgaaccggttagaatgctgcatttgtgtgcagttttgcattgtgttttgtgttgcctgcagtataagggactaattggcctgaacactgaaacatgcaaatgccccttgtgctttttgttacttactacagatgtgccacattttactattccataccacacattagaactaaaaagatattc

SEQ ID NO: 14131 - DNA, 921 bp, Zea mays
  Clone ID: LIB148-035-A9_FLI
ggcgggtggtcggcgtctcactatccaccaccgcgccgctccggtttaatttctcctcgaccggccagcgcaattctgtggctcgatcgatcggtcggtcgtaaggcaagtgagcaagctatatatatatataggagattcttcgagcgagctagtagcgagatgggttccgccgtcctcttttactgcatctgcatcgccgtcgtcgtcgcattgtcgtcgtccatggtcgccgtcggggccgccgccccgggggaaacccccaagttcatctcggcgagcgcccttgagtgctccgctaacgtaacggaaatagcaaaggcgcgcaagctgatcgatgtccatggccacgggctgtgcccggtgcggttcgaccacacgcgcgggatcagcgcggtggccagcagctgcaaggaccgcccgctgccgtcgccggagcgctgctgcggggcgctcaaggcctacgcgtgcccctacagcgagctcatcaacgacaacgccaacaacggctgcgccagcgagatgttctacgtcatcatgacacgcggcaggctgcggccgggcctcttctcgcagctgtgcgtcgaaggcccgctgggcctccagtgctgatcaacactggcctgctgccgcccaccgcccggaatctatctatctatctatctccttggaaacatatatcagacgatgccccagcgcgtgccgctgatttgatgcaagtatgcggttttcatttgtaaatcggagtcgatccatactaagcgatacaggaacaccctgtatcaattttcacttgtgatgaaattgcacatgtactcatttgttgtacacacatacacacacagaaaaaaaaacgttagaatataagaggatatatgtttgtcaatcgaccgttagacaaaatgaatactcagattcctc

SEQ ID NO: 14132 - DNA, 1345 bp, Zea mays
  Clone ID: LIB148-035-B4_FLI
gcggccgccggcgtcatgcgcaccatcatggaagttgtcctgcattgccacaagcatggcgtcatgcaccgggacctcaagcctgagaacttcctgtatgccaacacatctgagacctcccctctcaaggtcatcgactttggcctctctgtgtgcttcaaaccaggtgacaggttcagtgagatcgttggatccccctactacatggctcctgaagtcctcaagaggaactatggtaaagaaatagatatatggagtgcaggagtcatactctacatcttgctatgtggcgtcccaccattctgggcagagactgatgagggcatagcgcaggctataatccggtccaacatcgacttccagagagagccatggccaaaggtgtcggaaaatgcgaaggatcttgtgaggaagatgcttgacccgagcccctactctcggctgactgcccagcaggttctagaacatccttggatacagaacgccagtgcagctcccaacatcccactcggagaagcagtgaggtccaggctgaagcaattcactgtcatgaacaagttcaagaagaaggccctgcttgtggttgcagagtacctaccagccgaagagctggaagcaatcagggagttgtttcacatgctggacaccaacaaggatgggcacctgacaatcgaagagctcaggaagggactgcgactgataggacacaacgtccatgacacagatgtggatatgctcatggaagctgcagacatggacggcaatgggaccctggactgcaaggagttcgtgacagtctccattcatctgaagaagatccgtagcgaggaccacctgcccaaggtgttcagctacttcgacaagaacgggagcgggtacatcgagatcgaggagttgaaggaggccctctctccgagaggtgaccagaaggcaatcgacgacataatcctagatgtcgacaaggacaaggacgggaagataagctacgaggagttcgagctgatgatgaaagctggaatggactggaggaacacgtcgcggcagtactcgagagcggtttacaacaccctcagccgcaagatgttcaaggatgtctccctgaagcttgacgctaacaatggcccacttgctgcagcagccgtcgttgtcaaagaacaagcggttgactgagtcatgtcgtctctactacctgcaaactcaactaaaacagagaatgcgagaactgtacccagttttcagtgttttgtgtataggtcgccacattttggcaagcaaatgtatcagggcgggtcaattgacttagtttcaggtgcaaaatgccaatgctctccgagaactacacgct

SEQ ID NO: 14133 - DNA, 634 bp, Zea mays
  Clone ID: LIB148-035-C6_FLI
cacgtacgtacgcatcttctggctcacgacgatagccgaggaattcgaaggaccgaacgagaagctcctgcgtggtgtcaacgtctaccctaccgtaccagctagccaccacacgcgtagcgcgggaaatgccggcggcggcggccatgacgacgaggcgggtggtgctggaggtgctacggtcggcctcccgcgacgccttccaggtggccttctccttcgcggcgaggccgcccgtgtccaccatgctcaagccggccatcaccaagcccctctaccaccaccaccacgacaacgactaatctggcgcagatctacagcacggccgtcggcatgccttcacagcccggtgggtgtgacgactattgatgacgtactaccacatttcgtcgctcctattctagtaagcaacgcaaaagaaaatgttgtaagattgagcctgagagcttgagtcaccaatgtaaattgtatacgactgactatatatagagcatgctctgtaaccatatatattgcccgggccccccttgccctcgcaatctatgctctacagcaatggatctttattccttgtgttagaacataatataagtgaattgtccacctcctcctatcagcttaaggttttggattg

SEQ ID NO: 14134 - DNA, 525 bp, Zea mays
  Clone ID: LIB148-035-G3_FLI
catggccatggccacccgtccaaggccgccccgcccgcgcaccaagtttcctcgtggtccgagcgcgttctcaaacggaaaacccgcactcccgtgtctcgtcgtcccgtgcgtgccgctgacttctcggcttggccgggcgggacacgcccacggcatcgcgatggctgcgcgcggccactgcacgcgcacacggcggcgtcccgcccggcggtttccccaggcccagggcatccacgaggagaggacaagcgcgcggcgcggtcgagctgttgaaacgccggccgaggttgattttctcgtgcgatggacacgacacggtgttgacgacgacacggtgttgacgtggccggcgccgttgacgcgttgcggttgcgcggaggaaagagatcgcgcgctagctagctctgaaaagtcactagcgttcaggagcaccaggcaggtcttgttcttttacacacacaatccaactttggattaacacggtttgaaactaaatttatgtcacaatatatattccaaaat

SEQ ID NO: 14135 - DNA, 845 bp, Zea mays
  Clone ID: LIB148-035-H2_FLI
ctccgatccgttgacggtcaggcccttctgctgggtcgtcctgctgcatgcgtcgccgtggtcggggacacagaggaggagatcgagggagatggagtgcctgctggggctgctcaaggttagggtggtgcgaggagtgcacctggccatctgcgaccccctcacccacagcagcgacccctacgtcgtcctccgccacggacagcagaaagtcaagtcaagtataaaataccgcacgatcaatccggaatggaacgaggaactcaccctgtccatcacaaacatgatgaacccggtcaagattgaactcttcgaccatgacacgttcaccaaggacgacagcatgggcaacgccgagttctccatcctcaacttcgtggagatcgccaagcaggacctgagcgacgtccccgacggcacggtgatgaagacgatccacacggagaagggcagctgcctcgccaccgacagccacatcacgtgcaaggacggcaaggtctcccaggacatcctgctcaggctcagggacaccgagaccggcgacctcgtcctgcgcctgacctgggtcaacatccccggcgtcgcgcggtgaatcatcccctcgatcggcggggacggggccagggcatgaggcggcggcgacccgaccgacgcctgcccagctgattatacatccgtttacctggtattggcataaggagacccttggatgcgtgtaatgtttgtttgcagttctgataaggtgtgcaagaaggctcatgctactgggagcaatgcttctgcgggttttttatccacaaattacatttgttctcgttgatcacatttccataaaaccatttatc

SEQ ID NO: 14136 - DNA, 1283 bp, Zea mays
  Clone ID: LIB148-036-A10_FLI
gtttaccattcctccccaaaacacatcctgcgatcctcgaagcctccgccgagcatcgatcatgtcggcctactgcggcaagtacgcggatgagctcatcaagaatgctgcctacatcggcacccctggcaagggtatccttgctgctgatgagtcaactggcaccattggcaagcgcctttccagcatcaatgtcgagaacgtggaggagaaccggcgggctctccgtgagctcctgttctgctgccctggtgccctccagtacatcagcggtgtgatcctcttcgaggagaccctctaccagaagaccaaggatggcaagccttttgtcgatgtcctcaaggagggaggcgtcctccctggcatcaaggtcgacaagggcaccattgaggttgttggcaccgacaaggagaccaccacccagggccacgatgacctcggcaagcgctgcgctaagtactacgaggccggtgcccgctttgccaagtggcgtgctgttctcaagattggccccaacgagccgtcacagcttgccattgacctgaatgctcagggtctggctcgctacgccatcatctgccaggagaacggtctggtgccaattgttgagcctgagatccttgttgatggccctcatgacattgatcgctgcgcttacgtcactgagacagtccttgctgcctgctacaaggctctcaacgagcaccatgtcctcctggagggtaccctcctgaagcccaacatggtgactcctggctccgactctaagaaggtgacacctgaggtgatcgcccagtacaccgtccgtaccctccagaggaccgtccctgctgctgtgcctgctgttgtcttcctctccggtggacagagcgaggaggaggccaccctgaatctcaatgccatgaacaagctcagcaccaagaagccatgggccctgtccttctccttcggccgtgccctccaggcgagcaccctcaaggcctgggctggcaaggtggagaacgtggagaaggctagagcggccttcctcgccaggtgcaaggccaactccgaggctaccctcggcacctacaagggtgatgctgccgccgacaccgagagccttcacgtcaaggactacaagtactgagttgcttctctttgcgatcccgttgttttggaactcctgcctgcgagtaggttgctgagtgttgtttgcttgttagagcttttatattcggacatgaaaaaaacatgcttcctatgtggatgatggttatctttatattcgtatattaactact

SEQ ID NO: 14137 - DNA, 701 bp, Zea mays
  Clone ID: LIB148-036-A5_FLI
aagcccaattagaacatgttgtttcatcagaagaactccgtggaggaaaataatgggagacatcgaagaaggttagtttgttacatggtgtggccagtcgagagtgtctctcccgacctatgccgctatgccaactgtagagaattcaagtgtcgtctccttgctcgatcacacactgatcatcaggtatcatcagccaataattatattagttggcacgcgcatgcacggacagtcggtcagctttgctgcgcctgcttctccttcctggcctcctcgacgtccttcttcttcgcctccaccgtcgtcgtggtctcggcggcggtggcgaccttttcctctgcattggcggctgccgctggcttctcctcctcgacgacggtcttctccacggcttcctcctccttgtgatcgggctcggcgacggccgcctctggagcgaccacctcattagccttctgatgctcaacgtcggccgccgcagccggctcctccaccaccaccttctcagctacctgttcatcagccgcaacctcaacggagattggagtggcctcgggcgcaaccttgggtgtggagacggcggcctcagctggggcctgcccctcaagcgtcttgggcttggttgcgcaggcgcccatggctgatgtggcggttgcggcggctgagttgttggccggcgggggaggaggaggtgcttg

SEQ ID NO: 14138 - DNA, 752 bp, Zea mays
  Clone ID: LIB148-036-A6_FLI
atagagcaaacatctgaatctgattatctgaatgcacttcacaccacactagcatagtatcatccttcgccggttttgacgcggtgacgcctacacgtacacctaatctcgggctgtcaagtatccgaggcgtgcaaggcgggcccgggggcgtcgtgctgcggctggtgcatggcgaacgagcttgaccgcgacacgggccgggagtagctggatcggcggaagctggcggcggcgatgtcgtcgtcgtcggggtcggcgcactccgcctcccgctcccccgggatcctgcacttctccccgaggatgatgcccttcttccacagcgtgtcctccgactccaccttgtgatggtggtggtccttgtgctcccgccggctcagccgcagcttgtccgggatattcaggctcagcttcttgctcacgttgatggacagccgccgcctcgacgtcgacgacggcagcgccaccggctcgatggcgccgtgcatcgccagctccggcgacagcctcaccacctcctcctctaccgctgcctcctccgcgccagcctcctggctgccgctaccaccggagatggaggaggccgtcccagccgggtccgcgttggtggccgcctttggcttgcggtcgcacgccgagcacatggacgacgcgagcgcgacggtggcggccacgcacgccaccaagaaggaaaacgtgacggcgtcgtggccgaagggtagctcgccgtccgctgtcaccggcggcgg

SEQ ID NO: 14139 - DNA, 791 bp, Zea mays
  Clone ID: LIB148-036-B7_FLI
ggaagcgggaatttgagggatgctgtccgattgccaccaggggaggatctcaatgaatggctagctgttaacactgttgatttcttcaaccaggtgaacatcctgtatggtactctaatggagttctgcacaccagctacatgcccaacaatgtcagctggaccaaagtttgagtatagatgggccgatggggtgcagatcaagaaaccaattgaggtttcagcaccaaagtatgttgagtacttgatggattggatcgaagctcagcttgatgacgaatccatcttccctcagaaactcggaaccccttttccacaaaatttcaaggaagttgtgaagacaatctttaagcgacttttccgtgtttatgctcatatttaccactcacattttcaaaagattgtcagccttaaggaggaagcacatcttaacacttgcttcaagcattttacattgttcacttgggaattcacgttgattgacaaggctgagcttgcaccacttattgatctaattgaatccattgtttcagtttgttgacatgacatcaatgattatttggatcattttcttatttttggagagcaaggagttacaactaagtgtccagtatgagggtgagactaagaatggtcaaaagtttttttttgttatcttttaggtgtctgtctctacaatgggacttgtgcatgtttgtcttatgaagtcctgaagaaactatttagggctcaatgagataatgttgtgtatccttctcttgaatgactccataagttctgtttgcaacaagc

SEQ ID NO: 14140 - DNA, 910 bp, Zea mays
  Clone ID: LIB148-036-D12_FLI
tcgagagcgagggaaggaagctcgtctccggcacgatccccgacgccgggaccatccacgcgcacggctcggagaccgtcaccatccccttcctgctggtctacgacgacatcaggagcacgtacagggagatcgagcccgggagcgtcatcccctacaaggtcagggtggtcctccacgtggacattcccgtggtcgggagggtctcgctcccgctggagaaggacggcgagatcccggtgccgtacaggcccgacgtcagcgtcgacaggatcaagttcgagcagttctccttcgaggagtccaccgcgacgcttcacctgagcctggacaacaggaacgccttcgacctggggctcaactccatggactacgaggtgtggctcggcggcgtgagcatcgcgtccgctgagctcagggaggctacggatatcaagagacgggaagtgaccaccatgaacttgcctatcagcttcaggcctaaggatttcggctctgctatgtgggatatgatcagggggaagggcactggttacaccatcaagggacacatcgatgtcgacactccgtttgggcacatgaaaataccaataagcaaagaaggggggacaacccgtctcaagaagggggatgatgacgacgacgatgacgacgacaaggactagaaacgaagggatgagctatttagctttcctgaagcagataacaaatatgaaatatttccctgccagtttagtttgctacatatttaatttaagctatcctaccagcttataatctctagttagctttacttcctccactatttggtacatctgtttatctttatttcttatcttggaattcatttatatccttcatagtgcttctttaatctgtgtatgaccatatatagtcatgcatcaaggac

SEQ ID NO: 14141 - DNA, 1397 bp, Zea mays
  Clone ID: LIB148-036-D5_FLI
gggagaccgtcctcgaccgcattgaccccgccgtggcacggcctcgaggccggcgacgacgcaggcgcgaggcgccggagggtccggccatgacgtcgtccgtgcggcagtggtggcgccgcgccgccgctgcgctcaaggacaggaggagcctgctcctggcgcgcctgcgcccgcgccgggccgggtcgtcgtcgtggcaccaccgggagctggaggcggccgtgatccgcgcgacgagccacgaggaccggtggatggactaccggagcgccgcgcgggtgttcgcgtgggcgcgctcgtcgcccacgttcatccggcccgtcatgtgggcgctggcgcgccgcgcgcggcggacgcggtgctgggtcgtggcgctcaagtcgctcatgatcgcgcacggcatcctcctccgctcgggccgcgcgccgcgcgccggccgcgtccccttcgagctcgctgacttccgagaccggtcctcgtcggcggcggccaggtccctggccttctccgcctttgtgcgcgcttacttccggtttctggactaccgctccctcttcgccgcgcaggaggacaccgacggcgatgacgacgccgaaaggtgctcggatccccagacggcctgtcttgatcggatagcgaagaaacagttcatgctcgagctgctcctacaaatccgcccgtacggcgacggcatggaggtgccgctggtcctcgaggccatggattgcgtcctcatcgagatcttccaggtgtacggcgagatatgcaccggcatcgcgcggttcctcatcagcggcgttcagggcggaccggcgatgctgacgacccgcaaggaggtcatggcggcaggggtgaaggtgctctggcgggcggcggagcagagcgctcagctctcgtcctacttcgacctgtgccgcgagctcggcgtggccaacgcgcgcaagctcccgacatcattagttcgcttgaaagacgacgacgtccgggacctcgagcggatcctcatgagtgagagtgacatccagaacgaaagcggtgaggaggcggaggcggaggcagaggcagaggcagaggcggcggcggacgtgaaggacgcggggtcaacgtcgacgaacactgcggtggtgatggcaacaacggaatgggtgacattcgacgaggagagaccaagcgctggcgttgtcgcctaccacggcgggggtcacgtctctaatcactggaaccccttcgtcgctgcgccgttagacggtagggaaggcggaaacctgatcgagcttttctagttttctaaccgaacgcaatattgttgggttaaaccataaccttttgctcttttgcgcccgcccgattgtacactatgctctttgtaaatagtaacgtgactcgtttggtcc

SEQ ID NO: 14142 - DNA, 301 bp, Zea mays
  Clone ID: LIB148-036-F6_FLI
gtcaactgcggcctcagcttcggggactggatggcgcccgacaagcccaacccaaacgagctcaccggcgccatcgtcggcgggcccgacaagaacgacggcttcgtggacaagcgcggcaactcctcctacaccgagccctgcacctacatcaactccctcgccatcggcccgctcgccgcgctcgccgtccgaggcgtgcagctcgtcgccacgcagtgatctatccccatgcgtgcgtgtgtgtcccgctgtttcgtttcttccctgacatgatatgatttctactccgttactgatg

SEQ ID NO: 14143 - DNA, 786 bp, Zea mays
  Clone ID: LIB148-036-F8_FLI
cggccatgcatgggtcaacgatcgagatcgacccggggcacgacggcggccgacggcggcgaggagggagacgatcgatccaagaggaggtgtatccgtgcgtacgtgtgtgcagcgagcagctagggcatatgcattatttcagaagagaactagctactccgatcaagatgagcgacgaaggattgtacgtatattgctgagaggagatcgaagagacggtgatgagttggcggaagatcgatgcatgcgtggatgatcatcacagccaatcgtacgtgtgtaaaaggtcggccggaggggaataatcgtgcatgagacacctctctcgctcgctcttcctctcctacgtcttaattcattgggttcgtcgatccgagatcctacgtacgtcgtcgtttttgtattgtatatattataggtcatcatctcgtgggggtcatcagatctggcgggttggtggtgtgttgtaatttgtaaagagatcgattaggggtgatgcggtggaggggatactacacactaacaaaaccgagttgtatactgtactactaaactagagatggtaatggtgacgtgattcccgatttcctggaatttttaggatggagatggaaaagtttcttcccctataggatgtaaacgggaaaaaaaatctccaccgacgggtaaacgaggacgggaatggtgaaacattccctattcccgtggagacccgttaaacttaaatttgatgatgttttcatgtaacggttaatgataaaaataaataattaccttatcaag

SEQ ID NO: 14144 - DNA, 1569 bp, Zea mays
  Clone ID: LIB148-036-F9_FLI
ctcggccgcggcgccatgggcaccgtgttcctcgtcgcggaggggccctcggccttgcgccccagccgctacgccctcaaggtcttcgacaagcgctccgccgcccgcagcaggaagcctgacgccgaccgccgcgcgcggtgggagatcagcgtgctctcccgccttgcgcacccgcacctcccctcgctcctcggcttcaccgagacggacgaccttctcgcgtgggccgtcccctactgctccggcggcgacctcaacgagctccgctactcgctccccgaccgcatcttctcccccgcggccatccgcttctacattgccgagatcgtctccgcggtcgccgagctccacgccgcgggcgtcgtgtaccgcgacctcaagcccgagaacgtgctcctccgcgccgacggccacgtcacgctcaccgacttcgacctgtcccgcctcctccaccacagcaggtcgtccgcggagtcgtcgtcgcccccgcggccagcttcgtcccgcggccaccacaaccgccggtcgcgcgtccccgcgcggagcgactcggttctcagccagcaggtcaagtcgtactccaactccaacaactccaggccccctcaccagccctggtccgcggcgtcgtcgccgcggcagcagctccagagcctggtccgctacatcatggggagcggcgacggggccggggtgggcaggaagagcaagtcggcgcgggtgtcgccgctgagccggaagcccgcgagcttcggcggcagctcctccgccgccgcgtggggcaagtcctactccttcgtcggcacggaggagtacgtggcgccagagatggtgcgcggcgagggccacggcttcgccgtcgactggtgggccgtcggcgtgctcgcctacgagatggcgttcgggcggacgccgttcaagggccagaaccgcaaggagacgttccggaacgtgctgcagcaggagctcgagttcccgggggacacccggtggcggacgccggagctcgcggatctcatctcgggcctgctggagcgggacccgaggaggaggctcgggtacgccggcggcgccgacgaggtccgggcccacccgttcttcgccggcgtcgcgtgggacatgctcacggaggtgtccaggccgccttacatcccgccgccggccgacgaggacctcgcggacgtcgaagggttcgacgtgaggggccacttcaaggaccttcaccagccgccgcctcccaagtccgcgtcggagtcgtcctcgtccgagttctcgacggagttctgactgtgagctcgggctagcttcttttgcgctttggtcctcggtagattactatattgtaaccagagggtcgagggtgtctgtactgtacatacatggagacggggatggtgctgtaaattcgacgtagagttggtgtggttgtgcaaacattttgggaagcgcgagggctcgccggcgcactgtgctcgaggcattttcttcgtgtaatttttttccgcttggcttgcaagcgatcacctgactaccgaagaaaaggaaaaggataacttgaatcggcgc

SEQ ID NO: 14145 - DNA, 1014 bp, Zea mays
  Clone ID: LIB148-036-H6_FLI
caacaagcaggttctcggcgcgctgccgttgccgctgccgtacaccatcacagccttccagctcgcgttcggctccctgctcatcttcctcatgtgggccaccaggctccacccggcgcccaggctctccgctgcgcagctgggcaagatcgcgccgctggccgtggggcacatgctgggcacggtgttcaccaacatgagcctgggcaaggtcgccgtctccttcacgcacaccatcaaggcctccgagcccttcttcaccgtcgtcctctccgccctcttcctcggcgaggttccttcccttccggtgctgggctcgctcgtgccgatcgttggcggcgtcgccttggcgtcattcaccgaagtttctttcaactggaccgggttttggagcgccatggcgtccaatctgaccaaccaatcgaggaacgtcctcagcaagaaactccttgccggtgacaaggatgttatggatgacataaatctcttctcggtgatcactgtgctgtcgtttctgctgtcctgccctctgatgatctttgccgaaggcatcaagttcaccccaggatacctccagagcacgggcctgaacctccaagagctgtgcgtgagagcagcgctcgcaggtctgtgcttccatggctatcagaagctctcgtacttgatcttgtcgagagtgtcgccagtgacacactccgtcgccaactgcgtaaagcgtgtggttgtgatcgtctcctccgttctgttcttcagcacacctatttcgcctgtcaatgcactaggaactggtgctgcattagcaggtgttttcctttactcgaggttgacaagaaccaagaagccaaaggatgcataagcaaggataaaacagattacaggtttttgaggtatagagattagatcgagagatatcaatgagcataatgaactaacatagtttccgcctagttgtacacttgtaccacagggcacagccgactgcaagattcatgaatgaatatatattctcgagcc

SEQ ID NO: 14146 - DNA, 1455 bp, Zea mays
  Clone ID: LIB148-037-A10_FLI
cgaagatggcgttcatcagcaatatcgcagtgaaggcggcggccgtggccgcgctgctgctggtcgcagcggtgtcgcctgccgcgcgcgcggcggcggtggcggtggcgggaggggcgccgtcggtgccggcgggtccgctggacatcgcgcagctgggcgccaagggcgacggcaagtcggacagcaccccgatgatcctcaaggcgtggaagaacgcgtgcgaggcgacgggggtacagaagatcgtcatcccgccgggcaactacctgacgggcgggctggagctgaagggcccctgcaagtcctccatcatcatccgtctcgacggcaacctgctcggcaccggcgacctcagcgcgtaccaaaggaactggatcgagatcgagaacgtcgagaacctgtccatcaacggccacggcaccatcgacgggcagggagccctggtgtggagcaagaaccagtgccagcattcttacaattgcaagatcctcccgaatagcttggtgctggattttgtgacgaacgtccagatccgcggcatcacgctgctcaacagcaagttcttccacctcaacatcttcgagtgcaagaacgtgctgatcgacaaagtgacggtcaaggcccccggcgacagccccaacacggacggcatccacatcggcgactccagcaacgtgaccatcagcagcaccaccatcggcgtcggcgacgactgcatctccatcggccccgggagcaagatgatccgcatccatggcgtcaagtgcggcccaggccacggcatcagcgtcggcagcctggggcgctacaaggacgagaaggacgtggaagacgtgcaggtgacggggtgcacgatcgccggcaccacgaacggcctgcgcatcaagtcgtacgaggactccaagtcgtcgctcaaggccagcaagttcctgtacgagggcatcaccatggacaatgtctcctaccccatcatcatcgaccagaagtactgccccaacaacatctgcgtcaagtccggcgcctccaaggtggccgtcaacgacgtcgtcttcaagaacatccacggcacctccaacacgccggaggccatcacgctcaactgcgccaacaacctgccatgccagggcgtgcagctcgtcaacgtcgacatcaagtacaatggatccggcaacaagaccatggccgtctgcaagaatgccatcggcaagtccatcggcttggcaaaggagctggcgtgcatttgaaccaattgactaacatgcatatattatgtactaggtttgtgcccgtgcgttgacacggaagttaaaaattagtataaaacaaagatacataacgataaatatcactatgacattcaaaatccatgtggcaaaatatcactgtaaccatctatgattgtgcattgcgacgccacacaaattattcgataaaatattagcaattgggaat

SEQ ID NO: 14147 - DNA, 1573 bp, Zea mays
  Clone ID: LIB148-037-B10_FLI
ggacacaactcgtatctgaccggtaatcaactcagcagtgactgcagtgatgttcccatcatcaaggcacttcaattaggtgttcgtgtaattgaattggacatatggccaaattcttgtaaagatgacattgatgttctccatggaaggacactcactgccccagtatcacttatcaaatgcttgagatccatcaaagaatatgcttttgttgcatctccctatcctgttattataactctagaagaccaccttacacctgatcttcaggagagagtagctaagatggtccttgaagtgtttggagacatcctgtattaccctgaatcgaaacatcttcaagaatttccttcacctgaagctctaaaggggcgtgtcatgctgtcaacaaaacccccaaaggagtatctcgaagcaaagggtgacaccatgaaggagaaagaaattgaggcccggattaaaaggggagaaagggaagcagcagcatggggagtagaagttccagatattcaggatgagatgcaagtcgccgacaaggatgaagatgagctattataccgcgaaagaggtgcagatggcgatgatgggaaggaaacaaagcatgttgcagcagagtacaaacacctcatcactatcaaggcaggaaagccaaagggtcctctcgtggatgccataaagaacgatccagacaaagttaggcgactcagtttgagcgagcaagagcttgcaaaagttgcagcacatcatggtcccaacattgtgagtttcacgcatagaaatatgctgagaatatacccaaagggaacccgcttcaattcatccaactataatccatttcttggctgggtgcatggtgctcaaatggtggcattcaatatgcagggatatggaagagcactttggttaatgcatggtttttataaagccaatggcggttgcggttacgtgaaaaaaccagatttcttgatgcaaacttgtccagatggaaaggtgtttgattcgaaggcagatttgccggtgaaggcaacattgaaggtcaaggtgtacatgggggaaggttggcaaaaggacttcaagcagacacatttcgactcatactcacctccagatttttatgtaaaggttggcatcgccggagttccattagactcggtgatgagaaagacgaaagccgtggaggacagctgggtgccggtgtgggaggaagagttcgccttcccgctgaccgtacctgagatcgcggtactccgcgtggaggtgcacgagcaggacgtgaacgaagacgacttcggcgggcagacggcgctgcctgtggcggagctgcggccagggatccgcgccgtgccgctgttcgatcacaaggggctcaagttcaagagcgtcaaggtcctcatgagcttcgaattcgcttagcgtcccgcagcgtaaatcgattatgctgccatgtgcgtcgatcgatgtttgtttgcaataggaatcgacttttttttccctctgttattaggagtcccatgccgggtttttttttttgtacagatgcatttccgctaactatgtacaaacgggtcacctg

SEQ ID NO: 14148 - DNA, 807 bp, Zea mays
  Clone ID: LIB148-037-B11_FLI
ggcaaaagcagccatggcgaactcgtcgtccggccttgcggtgaacgacgagtgcaaggtgaagttccgggagctgaagtcgcggcggagcttccggttcatcgtgttcaggatcgacgacacggacatggagatcaaggtggaccgcctcggcggaccgaaccagggctacggcgacttcaccgacagcctccccgccaacgagtgccgctacgcgatctacgacctcgacttcaccaccatcgagaactgccagaagagcaagatcttcttcttctcctggtcccctgacactgcacgcaccaggagcaagatgctgtacgccagctccaaggacaggttcaggagggagctggacggcatccagtgcgagatccaggccaccgaccccagcgagatgagcctcgacatcgtcaggagccggaccaactgaccgtcatcgtccatcaacgaccaagcaacaacacatccacactatatactcaattcacattgcatgcatcgttattattacatcatttatttcagaccccccgcccactgctaaccgtagtccataagagattcatcatccgtggactatgctcgatctcttccgtacgatacaattctcaaatatttctatttatttcctaagtgaattattatatatgtactatttcattccaggttcattttacttgtgaccattcttcagttcttttttctgtaaggatcggtatatcggagcatatgtgcatggctatgccagttgttgggcgtaagaatgtatttttttctgtaatatagaaaaaaactattttaagc

SEQ ID NO: 14149 - DNA, 1764 bp, Zea mays
  Clone ID: LIB148-037-F5_FLI
ccggatcgcacaacaggaacatcagcagcagggaggacgccacctcaggagcggcagccacacggccgagatgcacgagtccctttccaatggagccggcggcaccccgccccttcccaacggtcgggcagcggctgccggggcggcgcggtcgcgcctgggccgcgacgggccgccctccgagctggacgtgatgaaggagaagttctccaagctcctgttaggcgaggacatgtccggcaccggcaagggcgtgccgtccgcgctcgcgctgtccaacgccatcaccaaccttgcggcgtccgtcttcggcgagcagcgcaagctggagcccatggcgcccgacaccaaggagcgctggaagagggaggtcggatggctgctctccgtcaccgacctcatcgtcgagttcgtgcccacgcgccagaccgcggagaacggaactacgatggagatcatgtccacggcgcagcggcgcgacctcgccatgaacatccccgcgctacggaagctcgacgccatgctcatcggctacatggacaacttcgtggaccagaccgagttctggtacgagaagggtggggacaacaagcgcgacgacgacaagtggtggatgccgacggtgaaggtgccgtcggaggggctgtcggacgtgacccgcaagtggctgcagtaccagaaggagtgcgtcaaccaggtgctcaaggcggccatggccattaacgcgcaggtgctcgtggagatggagatcccggagatctacattgagtcgctgccaaagaaagggaagacgagcctgggcgacgccatctaccggagcatcaccgaggaaacgttcgacccgctggagttcttggccgggatggacctttcgacggagcacaaggtgctggacctcaagaaccgcatcgaggcctccaccgtgatctggaagcgcaagatgcagaccaaggactccaagtcctcgtggagctccatcgtcagcttcgagaagcgcgagcagttcgaggagcgcgccgagaccatcctccacctgctcaagctccagttccccggcacgccgcagtcgcagctcgacatctccaagatacagtacaacagggacgtcgggtacgccctcctggagagctactcgcgcgtgctcgagagcctggcgtacagcgtcatgtcccgcatcgaggacgtgctgagcgcggacgcggcggcgcagaacctgacggcgagcgaggcggcgcggcgagcgctggagtcgacgtcggcggagctgcccgcggcgcggaagctggacgccaaggaggagctggagaagctgaacgaggccccggcgtcgatgacgctgttcgacttcatgggctggcacttcgaccaggacgagctgatgaagcgcagggaggacggcacactggacgcggacggggaggccatgctcctcaagaaggcgcctagcatggcccccaagaagttctcctacgtcgacagcctctcctccggcggcatgaggagcccctccgcgcgccactgatagtgcgacaccatccactgaccggccgacgtgctaacagcagctcagtcatctacgatccgacaccatggatcgtcgatcgttcagcagcacaagagacgacaatggagacgacagctcctcgggtccggtccgatcgattcttgcttacgtgtacatagctgaggcgcaggcgcagcacctacttacccattaacgtcattgccagtgagagtttcatcataattttatttttattaaac

SEQ ID NO: 14150 - DNA, 824 bp, Zea mays
  Clone ID: LIB148-038-D9_FLI
gttgtttgtggttgtggccaatccttctcctatctcgtcccggagtcccgggggaaattttgccccagaaacactagcgcgtcggatcacaagcaagggcgaaaattttctgtggctccagcggctgaaggacgctgcggcacccatgtcggacgacactggtggccgcgctctacccaagttcggcgagtgggacgtgaacaacccggcgtccgcggacgggttcacggtcatcttcagcaaggccagggacgagaagaaagctcccccgacccaaggccacatcaggaacaacaggtcggtgtcggctgacagcaaggactccagggccgagaagatgacctcctacaacgccaggaccaacgcgtcgaagaaatggttctgctgtgtctcgcccagccccacacaatcttgaggaagctaacgacagagaaatggtccattgcatcgctgcggctggcagaccggccgcgagtgaactctccggatacttgccagtgacagtgtatagccgccgttgcaaatgacagtgtatagcgttcttagctgcctgtgcataccgtcagttcaggttgatgtctgcttgtaatttttcttttctcgcctcttctctacggtgtgtaacccttcctcagcgttaatcctcctgctgcattttgctgtaacttgggcgagggtggatttgtttcggctctgaccaaaaccaggtcacagcgaattctcagattgctgcagtgaccgccaccaacctgacaaacaaaaatgctgcgacgttttcagagctgtagaggatgttctcatggaaatacgttatatattcatat

SEQ ID NO: 14151 - DNA, 544 bp, Zea mays
  Clone ID: LIB148-038-E9_FLI
aaagccacaacacatacaggaaagcaagcaagaatcatcggaataatggcccgtgcatgcgtgttcctcgtcgtgctcctcctggccgccatcgcggtggcaccgttcgcgggcgccgcacgcgtggacgttgtggagggtaggtccatggcatccgccgatgcaccggaggcggcggccgatgctcccgctcctagccccgactccgcctcatccccagactcgtcatcggaggcgccctctagcagcagttcctccgactagacgcaaaaacctcttcattctctggaataactaacagtatatacgttgcaccctgatgatatagaaacatgtacgtgcatcagtgtatggaatgcgagtggcaaacacatggaatgtgcttgcctaattattgtttatttctttatttattatatgtctctctcgtttgttttttatttttcttaatgcaagtaatataatttgttatacccaatatatatagacaatgtgtgctatgcgctttaattctatggtgacgatggcaccgttttctcagttc

SEQ ID NO: 14152 - DNA, 1105 bp, Zea mays
  Clone ID: LIB148-038-F12_FLI
cgaccatggagaaaaccggcctagcttgaccgcttgcaattcaaggaggctagctagatagcatgtatataagcccgtgcgcgtggtgcctttcctctcatcaccatcgcctggaaccacagaccacaaaggaggggacacacacacacacacaccgtctccgcccgcccgccgcgacgcgccatggctatggctcgctccgtcgcgcacctcttctttcccatcctccttatctccaccgcgcccgccgtgcgggccatcaccgacgccgccggcggccccggatacctccaggaggcgtgcaacaagacgctgttccccaaggtgtgcatgcacgcgctcaaggacaacccagagtgccaggcggagacggcggtcacgccgcgccggctggccgagctgctcgtgtacgtgtcggccgaggtgggcatgaccgtggccgcgttcgcgcaccacgagctcaacgccatcaaggacgacgacgtcctgtacaagtgcatcgacacctgctccgaggacatcgaggaagccgtggcgcacctcagcgccctctcccgcgacttctccgacgccaggttcctcgaggtcaagtcctggctcacctccacgctcggcggcaccgccacctgcgaggacgcctgcaaggacgcccccgtcagcgacatcaagaacgtctgcataaccaagagcttcgagtttgagaagctgctgcgcgtcacgctggacctcatcaccgaggcttccggctccatgtcggccgaggtcgcactgccgccgtcggatgcgtcggcgccgtccggagggtacggctcgtcggctggcgcccccgcctacggcgccccgtctcctgatgccccagcttatggcgccagcgtaccagcgccagcgccgacctcggggcagagcactgcttcgactgcatgagtgatgatatcgtggcggcacacacgcatcttggtcactcctatgctatgcatgcatgcttcgaattaccgaccgaaaagtctggttcctcggccaatttttcgttcctggtcagctaggggaaccatttctcggcccggtatcacattttaaaaatatgaaagtcaaattttttttgttc

SEQ ID NO: 14153 - DNA, 963 bp, Zea mays
  Clone ID: LIB148-038-F8_FLI
gttcgacatcaagtccggcacgtccatggccgcgccgcacctgagcgggatcgccgcgctgatcaagcacgcgcacccgacctggtcgcccgcggtcatcaaatcggccctgatgacgacggcggagcctaacgacaacctccggaagccgatccaggacgtcaacggcaggccggcgaacttggtcgccattggcgccggccacgtgaacccgaagaaggccatggaccctggcctcgtgtacaacatgacggccatgggctacgtgccgtacctgtgcgggctcaactacacggacgacaaggtgagcacgatcatctacccggagccgccggtgtcgtgcgccaagctgtcaaggctcgaacaggacgacctcaactacccgtccatcaccgtcatcctcaaccagccgcccttcaccgcgaaggccaaccgctccgtcacgaacgtcggcgcggccagctcgacgtacaccgtggaggtgaacgtgccggcgtcggtgacagtggaggtgaacccgccgaagctgactttcaaggcgctggaagaggtcctgaactactctgtcacaatcaagtcggccaacggccaggcgcttaccggccctgtcgagggggagctcaagtggttgtccggcaagtacgtcgtgcgcagcccgatcctcgtcactaacgaatccgggccctcgccggcggagacacgtaaaccgtaaccctcgatagcagctggcaaatgcctacttattacgtacatggtaacgattagtttgccatatgagccagcgcttgaaatcgatgggattgtgagcttcattcacttttgattcggtagactaaattaggcatgcagatgcagagcaaatccctccatttgtggtggaagtgagagatacatatataattacctccttgtttttttatatatttattattaagaaattcctgacgaatttattacaagttt

SEQ ID NO: 14154 - DNA, 1796 bp, Zea mays
  Clone ID: LIB148-038-H6_FLI
atcgatgcgctcgtcggggccggcgggcaaagccaccagtggtcagagatctagctatggcgccggcgcttctgctgctgcgacttctggcattgattgcgacggcaagggaggcctgcgcggcgagggcgttcgccgcggcgtccaacgcgacggcgcatggggcgacggtggtggccgggaagctgaacgtgcacctggtgccgcactcgcatgacgacgtcgggtggctcaagaccgtcgaccagtactatgtcggatccaacaacagcatccagggcgcgtgcgtgatgaacaccctcgactccgtggtcgacgcgctcgccagggaccccgcccgcaagttcgtcgtcgtcgagcaggcttttttccaaaggtggtgggcagagaaaatcccaaacattcaggcagtagtccgcaagctcgtggattcgggtcagctagagttcataaatggtggatggtgcatgcatgatgaagctgctgtccattatattgacatgattgatcagaccacgcttggtcaccggatgatcaagaaacaattcaacaagactccaagagctggctggcaaatcgatccttttggacattctgcagttcaagcttatttgcttggagcagagcttggcttcgattctttgcattttgcaagaatcgattaccaagataaggaaaagcgtaaagctggcaaaggcttagaggttatatggcgcggctcaagaactttcggttcatcttcacagatatttacaaatgtatttcctgtcgattatagccctccagatggctttggctttgaagttttagatgaaaatatcttgcctgtccaggatgacatgctgatgtttgactataatgttgaagaacgagttaatgattttgttgctgcagccatagaacaggcaaattttacgcgtacaaaccacataatgtggaccatgggagatgattttagttatcagtatgcagaatcttggttccggaatatggacaaacttatctatcacgtgaacaaggatggccgagtgcatgcgctgtattctaccccatccatttacacagatgcaaaacatttttcaaatgtatcttggccagtaaaatatgacgattatttcccctatgctgattcgaaaaattcatattggactgggtactatacaagtcgtccaactttcaagcgatatgttcgagtgcttagtggttattacctggctgcacgtcaaatagaatttttagtgggtaggagtttcttagggatgttcacgaccagcttggaagacccaatggcaattgcccagcatcatgatgcagtctcaggtacagcaaaacaacacacgacagatgactactcgaaacgccttgctcttggagcatctaaggttgagaaaggagtcaatgttgctctgacctgtttactaagttccaacggaacatgtgcgccttcagtacaaaaatttagtcagatttacctgaccacactgtttctcttattgacaattcaagtgcccacttctcaatataagctactgcccttcaactgaggaaacagtttcaggggcaaagaatttagttgtagttgtttacaatcctcttggaagggaacgtagtgacttcatacagattcctgtaagcgcctaacaacttcataaaatgtgttaagttggttgcaccaaccagtttaacccaaaagcttaacctggtgagaagaggtgggcaatccacttatattccaacaaaatgtaacactcaatgacaacttcactcggtataataaccattggtcataatctatt

SEQ ID NO: 14155 - DNA, 391 bp, Zea mays
  Clone ID: LIB148-038-H7_FLI
ccttctgcaacgccaacccggggctcatgaaggacgtcgcaaaggtcttctgatccattacatcttcgtccatacgatacaatcgatgatgaacctgcttatatacacacacatgtaccattcagctccaacatatgatttcgatcagcttgcctgcctcgcctggcttaatgctgtccttcgccttcctataagcactaagctattattaggattttgttttatttaacttttttttgtctccaatctaatatatgtggacgttcttttttattcattttccccctattttggttcgatcggataagtatttctatgtaattaattcattcattggagataagcgatccatctccttataattcgtaaacgaagtactgtatttcaaggg

SEQ ID NO: 14156 - DNA, 406 bp, Zea mays
  Clone ID: LIB148-039-A5_FLI
gcctccgctggtgtggaacgcgacgctggccaggttctcgcagcagtacgcggagacgctcaagggcaactgccagcagatccactcgtcgtcgccgtacggggagaacctgatggagggcaccccggggctgacctggaagatcaccgtggacggctggagcgaggagaagaagaactaccactacaactcagacacctgcgaccccggcaagatgtgcggccactacaaggccgtcgtctggaagaccaccaccagcgtcggctgcggacgcatcaagtgcaacagcggcgacaccatcatcatgtgcagctactggccgccggggaactacgacggcgttaagccatactaaaatatatatcgacccattgcatatatatgttgcagagctttttattttggc

SEQ ID NO: 14157 - DNA, 1172 bp, Zea mays
  Clone ID: LIB148-039-B2_FLI
atcacttacccctcattgcaaaggtggaagtgtttcagcatgctttgcaaaatactgagggaaatgaccttgcgaaggttctgtggctgaagagtcgaacttcggaagtatggcttgagcgccgcacaaactacgctagaagcctggctgttatgagcatggttgggtatttgcttggtttaggagatcggcatccaagcaaccttatgttagatcgctatagtggaaaaatattacacatcgacttcggagattgctttgaggcttcaatgaatcgagaaaagttccctgaaaaagtaccattccgtttgactcgaatgcttgtgaaagctatggaagttagcggtattgagggtacattccgaacaacttgtgaaaatgtgatgcaagtccttcgcacaaacagagacagcgttatggccatgatggaggcatttgtacatgacccgttaatcaattggcgtctgttcaatttcaatgaggttcctcaagtgtcgaactatggtaatgttcatgctcacacggttgtcagtagtgaagaagcagtggctaaccgagagctcatgcaacctcagcgaggagcacgtgagagggaactgctacaggctgtcaatcaactcggtgatgccaatgaggttttgaatgagcgtgctgtagctgtgatggcacggatgagtgacaaactaacagggcgtgacttctcttctgggtcagctttggctggagcaggtagctctatccaacatggcagtgagcatttggcttcaggagatgcccgggatgcccaacctggtctctcagtgaaggttcaggttcagaagctcatactccaagcgacttcacacgaaaatttgtgccaaaactatgtcgggtggtgtccgttctggtgagctctcttggaaacagtagcagtttataacatgtaaatattgtgaataccgtgtgcatagaagtttcgtggtgacagtttgtatgtgcagctttgtaattagcagaacttcaagatgccttggaccatccttttgtcagtttcttagaccgtgtttagcagttcacccttatggccatccaaaacactgtttttgtactatagattgtattgtttgtagattgtactgttcgcagggtggatttttgaatatgagtataagaatgtgtaagctgttgaagat

SEQ ID NO: 14158 - DNA, 660 bp, Zea mays
  Clone ID: LIB148-039-B9_FLI
ggcaagcgatcgtcggagcagagagagacttcctcgcctccatcccatcccgccgccgccgtctctacggtcgctaataagccgccgcatccagggatggagatgaagaagatcgcctgcgccgtcctcgtcgccgcctcggccaccgtggcgctggccgcggaggcgccggctccgtctcccaccagcggctcctccgcggtcgcacccgccatcgtcggggccgccgtggcctccttcttcgcgtactacattcactgagccgccggacgaggagccggagccggagggaagagaccaaggtggggggagagacttggctgcgctgcgctgctctgctgctcccgcgcattcccgatgcgtgggcgtgctctgattgggcacggcggtggcagtggcacaccttcgtcttccttttgtttgttttttttccttcctctttctacttgattttcatttaacgaattggtatcgctgatgcaccagtttaatttggtgccctgttatttgttctttccctcgagtgagggatcgacacctgtaccattgcttgccatttgtctggaccagttcaacaattcgatttaaccatcacgtatatgtgtgctttggataaacattattacattaccctcatggtgaggggattgccggtttgtt

SEQ ID NO: 14159 - DNA, 1680 bp, Zea mays
  Clone ID: LIB148-039-C7_FLI
cgctcaccgccgtcctaccttcatatacctagcagtgtctctgcatagaaagataaaaggtaggaggaggcgcagtgcgtggtgggattatttgtgaggagatattggagttattatatatatatatataggtagacgatagatagacagctagatctatataaccatggtggatgggttccgatggatcagaccgggctctttcgtcctgtacttggtcttcttcttcctgtccgcagccctgtcggaggccaatatcggcgacttcgatgaatactggcagcagcgcaagctcatggccgacgccgcggctgaggccacgtacaagcatgacccggtcgaggtcgccaaccaacttaaccgtgcagtccacagatccgtcgagaaggaggacattggcacgaggcgggagatgatggggacgacgacgaggaagtctaagttcagcgggccgtgcagggcgacgaacccgatcgaccggtgctggcggtgccggcaggactgggcgacggaccggaagcgcctggcgcggtgcgccaaggggttcgggcgcaacaccaccggcgggctggccggcaagttctacgtggtgacggacggcaccgacgacgacgtggtgaacccgcgccccggcacgctccggtggggcgtcatccagatcgagccgctgtggatcaccttcgccaagaccatgatcatcacgcttaaggaggagctcatcatccgcggcgacaagaccattgacggccgcggcgtgcaggtgcgcatcaccaacggcgcgcagctcacgttgcagttcgtcaacaacgtcatcatccacaacatccacatcaacgacatcgtctcctccaacaaggacggcggctacgtccgcgactcgccggaccacttcggctggcgcaccgtctccgacggcgacggcatcaccgtcttcggctccaccaacgtgtggctggaccacctctccctctccaactgccaggacggcctcatcgacgtcatcgccaagtccaccggcgtcaccatctccaactgccacctcaccaaccacaacgatgtcatgctcttcagctccagcgacaagcatcccgaggaccagatcatgcagatcactgtcgccttcaaccacttcggcagaggcctcgtgcagaggatgccaaggtgccgctggggcttcttccacgtggtcaacaacgactacacgcactggctcatgtacgccatcggcggcagcaaggcccccaccatcatcagccagggcaaccgctacatcgcgccgcccaaccttgccgcgaagcaggtcaccaagcagcatgacacgccggagtcggtgtggaagaactgggtgtggcactccgagaacgacctcttcatggaaggcgcctacttcaccgtcaccggcggccagatcaacaggcagttcaacaagaaggacctcatcaagcccaggaacgggtcctacgtcaccaggctcacgcgctacgccggctccctcgcctgcacgcccggcaagccctgctagatcaagccaccagcgaggacggccgacgaccagaagcagaccatgcattcgccggctcgccatgtaagaaacaggggagttgaaagtgcgacacaccagagaacgtgtctgtgtatactgtgtaaaggtcctaaaggaaagagaagatgcacatattc

SEQ ID NO: 14160 - DNA, 696 bp, Zea mays
  Clone ID: LIB148-040-D5_FLI
ataaacatcatggggcaagcctcacggctcgtcctcctcgccgtcgtggcgctgctgtccgccggcctcctcccgcaggcgctgggtaagggtaggggaggcaggggacacggtggcgccgtcaacccgcaggtcgccggcatctgctctcgcaccccgttcccggaggtgtgcacgtccaccgccgggcggcacgcgtccaagtacccggtcatcgacaacctggccgtgctgaacatgcaggtggacgcgttcgccaagcgcaccgcgcaggcgcgcaagcacgtcgcgaggtcggcccgcaccatcccgccgcagcagacgcaggcgctcacgttctgcgacaccatgtacatgaacacgcaggacaccatcggcgcggcgcagcgggccatcacgttcaaggacaccggcaccgccaagatcatgctgcagctcgccgtccaggacttcgactcgtgcgaccgccccttcacccaggccggcgtccccaaccccatggggaagtttgacaaggagctcaaccagatggccagcaactgcatggctcttgcaaacatgatatgaaccacgcatgcaaccccagcgtgaggtgccatcgcatgcagggaatgcttgcattcatttttcatttaattaagaattcattgaaattatgagttatatatattgagtaactctatgtatttgttcctg

SEQ ID NO: 14161 - DNA, 726 bp, Zea mays
  Clone ID: LIB148-040-H1_FLI
gcccgttcaggatccacatcttcccgagcgagttcttggttgacctcttcctcttcggaccacctccaaggctcttggtgtagcttgccactctcaccaatcaagttttcatgtctgatctcgacattcagatcccaactgccttcgatcccttcgctgaggccaatgctggggactctggtgcggcagcagggtcaaaggactacgtacacgtgcgcatccagcagcgtaatggtcgcaagagcctgactaccgtccagggattgaagaaggagttcagctacagcaagatcctcaaagatctcaagaaagagttctgctgcaatggtacagtggtccaggacccagaacttggacaggtcattcagctccagggtgatcagaggaagaacgtctcgaatttcctcgtccaggccggcattgtgaagaaggagcacatcaagattcatggtttctgagcaaccgccgggtccatagcaaaccaaccctgcatgcagggccagcttattatatataatatctgaggtggagcatatctatctggctgtgtactacaagcaggcctagtacgccgcctgcgcgttcctcctattacacataacacatatagccccctccctgcgtgtatgcttgttgccgtcgtgtcgaatcttgtactacgaggctccgtcgaacctcgatggcttgcttctttatcagaacatgtttgaataaacgctatttggt

SEQ ID NO: 14162 - DNA, 278 bp, Zea mays
  Clone ID: LIB148-041-E5_FLI
cgtaatggttaaggctttcgagtagcacctccaggtcctgggttcgatccccctcgggggcgaatttatggcttggttaaaaaaatcccctcgttgtgccccacccgctcccgggttacgtcctgcgcgccaccctccggctgggccgttgcagagtgggcggtgacggcccgctagtgatggggggccaaggtttggggattttctcggccgggaccatgagggcggtctttccctccccggccgagttttatataaacaatttttaaaaaaaagac

SEQ ID NO: 14163 - DNA, 503 bp, Zea mays
  Clone ID: LIB148-041-E9_FLI
aggtaatggagtcgtcacgcatgttccagccggccatcatcctgcttctcctgctcattgtgaccaccgatgtggcgcaggcggcgagggaatgcgagaaggacagcgagcgattccttggggcatgcatggcgtcggacaactgcgccaacgtgtgccgcggtgagggcttctccggcggcaggtgcagcaccttccgccgccgctgcatctgcactaagccgtgctaaattaacctactcccggcagttcgatggtggacgtttattctatttattggcttacttgatttttttccccctaacaataagaaaacgcacgtgctggcatgtacgttgtgttgtatatgcttttcttgctggcttcatttgctgattactgatgagttgtaaggtccctgcacgatccatttcacatggatatgatgcttaattgtattcctgcttatatggtatgtatatttaattaattaatgatggaccatcgagtttattttgtacttt

SEQ ID NO: 14164 - DNA, 1137 bp, Zea mays
  Clone ID: LIB148-041-F4_FLI
cctctcctctgtccctctacggtgcttctgctcgccggcccaaaatcgcctcatcgaccacgcccccttccaggctcccgtctccatgggtctcctctcaaacaggattgggagggagagcctcaaggcgggggatcatatctactcctggagggcggcgtgggtctacgcgcatcacggaatatatgtgggcgatgataaggtgatccatttcacaagaggaagaggacaggaggtcggaacaggaactgtcgtcgatattattcttgtgagttccaccccaaaacgaagcaacacgccttgcccggtgtgcaccgacgaaaccagcgacagcagcacagagacgaacggcgtggtatcctcctgcctcagctgcttcctagctgggggtgctctctaccgtttcgagtacgcagtcaacccggcgctcttcctcgccaaagcgcgaggagggacgtgcacgctcgctccctctgaccctgacgacacggtggctcgccgcgccagatacctgctgagcaacggtttcaggtgctacaacctgttcaagagcaactgcgaggacttcgcgatatactgcaagactggccttcttgtcgctgagcagggcgttgtcgggcagagcgggcaggctatctccatcatcggtggacctctcgccgcggtggtctcgaccccattccgcttggttaccacgaacatctatgggatggcggtgatggccgtcggggtgtactgcgcgagcaggtatgcagctgatattggcaaccgccgtgatgtggtgaaaatggaagtcgaggacctgacggccggactggccagcggcaggatatgtgctgtggagaacatcgcccagctggtggctccggaggcagaaggcccggccgatgccacggccacggccacgctggctgcttaacggaccattgtgccattgttgctgtgagagagatgtgcgtcagccaacatgtgtgctattgctttggcttatttgtgttcagaatccacttaaactcggtcgaagtgagctttccgttcggcaacgtctgtactcttacgaatctcgatcgtgtatgtctttaagtattgtgttgtgtttcaaagataaaaaaaggtgacctttgtgtatgatttttt

SEQ ID NO: 14165 - DNA, 451 bp, Zea mays
  Clone ID: LIB148-042-A11_FLI
tggaacggcgacttcggcctcgagacgctcttctacgcggaggtggacaaccgcggcgacggcgccgacatgagcaagcgcgccaagtggggaggcatcaagaccgtcacctacgaggaggcgcagaaggagttcaccgtggagaccttcatccaggggcagcagttcatccccaagttcggggtgccgttcatcccgggattgctgccgcaggagcaaaaaggcaggacacactgatcatcttccagcctgcttcactcactcactactaccacctaacatcagttggactggacctgcacttcagcgagtcacccccggcccagcccactaatatgtccactgtactctagtattcgatttcccaatcttttttctcttctcttttgtcaattattaattatatacatcttttattattagtcctatatatatatacgttggcccaatt

SEQ ID NO: 14166 - DNA, 1235 bp, Zea mays
  Clone ID: LIB148-042-A4_FLI
ccaagggcgacacgctgtacaccggctcggacagcaagaacatccgcgtctggcgcaagcagaaggactcgggagggttcaagtcctcgagcggcctcgtgaaggcgatcgtcatgtccggcgagcgcatcttcacgggccaccaggacggcaagatcagggtgtggaaggtgtcggccaagaacggcatgcacaagcgcgtcggcagcctgccccgcctgcgcgacttcctgcgcggctcgctgaacccgtccaactacgtggaggtgcgcaagaaccggtcggcgctgtggatccggcacagcgacgccgtgtcgtgcctgagcccgacggacccggcgcaggggctgctctactccggctcgtgggaccgcaccttcaaggtgtggcgcatcagcgactccaagtgcctcgagtcggtggtggcgcacgacgacaacgtcaactccgtcgtggcggcgttcgacgggctggtgttcacgggctcggccgacggcacggtcaaggtgtggcggcgcgagcagcaggggaagggcaccaagcacacggccgtgcagacgctgctgaagcaggagcacgcggtgaacgcgctcgccgtgagcgccgtcgcgcccgtgctctactgcggctcctccgacggcctggtcaacttctgggagggcgaccgccacctcgtccacggcggcgtcatgcgcggccacaagaaggccgtgttctgcctcgccgcggccggcgcgctactgcttagcggctccgccgacaacaccatcttcgtgtggcgccgcgactgcggggtgcactcgtgcctctcggtcctcacgggccacaccgagcccatcaggtgcatcgccgtcgtcgaggacaacggcgagaacagcagcgagtccaacgccggtgactccgctgccggaggggggtcgtcggcgtcgcggtggatcgtgtacaccggcagcctcgacaagtcgatcaaggtgtggcgcgtgaccgacgaggcgccggacccgctgttccacggctccggcgatgcgccccagatattcgaccggtatcccggcgacgccttcgggaccagtggctcgacgacgtcgttccgctaagacgatttgtctgatcgatcacatgcagcgaaattacacgtcgtctcacttcacaagaaaacgtcttgggaggactaaattatactctaaatacatatacatataccacgtccatatatacactgttggaaatggctg

SEQ ID NO: 14167 - DNA, 798 bp, Zea mays
  Clone ID: LIB148-042-B4_FLI
gtcgtcgtctcactcaccccgccttcacgcctccctcaccaaataaggtcccgcccttttccgacattcacaggggggacaggaaatcagcggccatggcctcgattccggcgacgaccttcgccgtcatcttatccgtcctcttctgtgccgcggctggcaccgccgtcgacaacgacctccccgactacgtcatccagggccgcgtctattgcgacacctgccgcgccgggttcgtgaccaatgtcaccgagtacatcgcgggcgccaaggtgaggctggagtgcaagcacttcggcaccggcaagctcgagcgctccatcgacggggtgaccgacgggaacggcacgtacacgatcgagctcaaggacagccacgaggaggacatctgcgaggtggtcttggtggagagcccgcgcaaggactgcgaccaggtgcaggcggacagggaccgcgccggcgtcctgcttaccaggaacgtcggcatcagcgacaacctgcgccccgccaacccgctcggctacctcaaggacgtgccgctgcccatctgcgcctcgctgctcaaacagttggactcggacgacgacgacgatcagtaatagcacatcgacgacgacgatcgatatgtaatagcacgtcgtcgacgaccgaccgcagtcgtcgcagactggctggcactaaaccacaaatcctcttcacctggattacaaatatgtaactgagaaaggaaaggaaaacaaaaatgtaactgcgtggctgtaccaaattctgagtgctggattcttgctattgtcaccc

SEQ ID NO: 14168 - DNA, 2416 bp, Zea mays
  Clone ID: LIB148-042-C12_FLI
tcagcctccagctgcctccaccccacctccgtcactggtgaagttgtctcctccgcaggcaccagtggcatcaccaccgccacctgtgaagactacttctccaccggcccctattgcttcaccatctccaccaccaccagcgccagtggtctcaccaccaccgcccgtgaaatcacctcccccacccgcgccagtggcatcacctccaccacctgaaaaatcacctcctccgccagcaccggtggcctcaccaccaccgcctgtgaaatcacctcccccaccaacgctagtggcatcacctccacctcccgtgaaatcacctcctccaccggcaccagtggcatcaccaccgcctcctgtgaaatcacctcccccaccaacgccagtggcatcacctcctccgccagcaccagtggcatcttcacctccaccgatgaaatctccaccacccccgactcctgtgagctcacctcctcctccagagaagtcaccaccgccaccgcctcctgcgaaatcaaccccacctccagaggaatacccaacaccacccacttcggtgaagtcatcgccgcctccagaaaagtctctacctccacccacactgattccatctccgccaccacaagagaagcctactcctccatcaactccgtctaaaccaccttcatctccggagaagccttctccaccgaaagaaccagttagctcaccacctcaaacaccaaagtcttcacctccaccagctcctgtaagttcaccacctccaacaccagttagctcaccaccggcactagctccagtaagctcaccaccgtcggtgaagtcttctccaccaccagcgccactaagctcaccaccgcctgcacctcaagtgaagtcttctccacctccagtacaagtgagttcaccaccgccggcgcctaagtcatcacctccacttgctccagtgagttcaccacctcaagtagagaagacttctccaccaccagcaccactcagctcaccaccattggcgcccaagtcatcacctccacatgttgttgtgagctcaccacctccagtggtgaagtcctctccaccacctgcaccggttagctcgccaccattgacgcctaagccggcaagcccacctgcgcatgtgagctcaccacctgaagtggtgaagccatccacaccaccggcaccaacaacagtcatctcacctccatcagagcccaagtcatcaccgccacctactcccgtgagcttgccacctccaatagttaagtcctctccaccaccggcaatggttagctcaccaccgatgacgcctaagtcgtcacctccaccggttgttgtgagctcaccaccaccaacggtgaagtcttctccaccaccggcaccagtcagctcaccaccagcgacacctaagtcgtcacctccacctgctcctgtgaacttgccacctccagaagtaaagtcttctccaccacctacaccagttagctcgccaccgccagcgcctaagtcatcacctccacctgctcccatgagctcgccaccacctccagaggtgaagtctcctccaccaccagctccagttagctcgcctccacctccagtcaagtcgccacctccacccgcccctgtgagctcacctcctccccctgtgaagtctccaccaccaccagcaccggtcagctcgccaccacctccagtgaagtcaccgccacctccagcaccgatcagctcaccaccacctccagtgaagtcaccgccacctccagcaccagtgagctcaccaccacctccagtgaagtctcctccgccaccagcaccagttagctccccaccacccccaataaaatctcctcctccaccggcaccagttagctctcctccaccagcaccagtgaagccaccatcactaccaccaccggccccagtaagctcacctcctccggttgtcacccctgccccgccgaagaaagaagagcagtcattaccaccaccagcagaatcccaacctccaccatcattcaatgacatcatccttccacctatcatggccaacaagtacgcatctccgcctccccctcagttccaagggtattaagcgccacagagacatggttgatgaagcatgaagggaacagtctataaggtcacacgcgcagacaaactgctacatgtaaaacactgtaaacgtgtgtgaaattgttttttcttttgcacgtgcacgtgtgagtatattcttattcatacatatgtacggacgtgtgtatgtgtgaactaactacactacatgaggcggcaagttgtaagagagtgtgatttgtgtgccttatgtatcacttttttacatatagaaaaggaaacgacaatttccttaaaaatggggtacaagatgatggaacgaagttaagggattattatg

SEQ ID NO: 14169 - DNA, 758 bp, Zea mays
  Clone ID: LIB148-042-C7_FLI
gatggggtgcgcggcgtcagccgccgacggggccgagctccggcggcgggggtgggcgcgggcgggggagccggggcacagcgaggcgtccacctcgggtctgctggcgccgccgcaccagcaggaagggcaggaggccgagtcgtcgtccgggggcaggaggcgagggtgcaaggtggcgccggagcccaaggagctggaggaggggaccgccgcgctcccgtcgatgcccggctcgccgagcttcaggtactactgccagaagaagacggcggccgtcgataggatcgtggctgatgccatcgacgccgatgacaccgtcaggatcagagcgacggcgcgacagctgagcaataggagcgaaatcacggcaaacaaggcacaggactccaacgaggtctctcaacctaaagggggaaccaaatggcttaggttcagtggcttgtcgatcgtcgctgccgcttggcacaagcacaacttgttcagccgccaaagaagcaagccttcgccgcctcctgctgccacttcagatgcaagctcccaaccctgatcaggcagcgctgtatgggatcttctacattttactacgtctcagcttataaaaacacacacgcatggctcattcagtcatcgtttatgatgcatcgatgctggctttgcatcattaactgatatttttcagacttggttagtccctgtaagctaaagctgattctgtaaatggtgcaaattagtgttaagaaaggagggcaatctgg

SEQ ID NO: 14170 - DNA, 1747 bp, Zea mays
  Clone ID: LIB148-042-D11_FLI
acaacaagggcctggccttctcggaggcggagcgcgacgcgcactacctgcggggcctgctgccgcccgcgctggcgtcgcaggagctgcaggagaagaagctcatgcacaacctgcggcagtacgagcggccgttgcaccgctacatcgccatgatggacctgcaggagcgcaacgagaggctcttctacaagctcctcatcgacaacgtcgaggagctgctccccgtcgtctacacgcccaccgtcggggaggcctgccagaagtacggcagcatctaccgccggccgcaggggctctacatcagcctcaaggacaagggcaagatcctcgaggtgctcaagaactggcccgagaggagcatccaggtcatcgtcgtcaccgacggcgagcgcatcctcggcctcggggatctcggctgccaggggatggggattcccgttggcaagctctccctctacaccgccctcggaggtgtccgcccgtcagcttgcctgcccatcacaatcgacgtcggcaccaacaacgaggccttgctcaacgacgatttctacatcggcctccgccagaggcgtgccaccggcgaggagtaccatgaacttgtcgaggagttcatggccgccgtcaagcaaaactacggcgagaaggtcctcacccagttcgaagactttgcgaaccacaacgcttttgacctgctcgagaagtacagggagagccatctcgtcttcaacgacgatatccagggaacggcctccgtggtcctcgcaggcctcttggcggcgctcaaggtggtcggcgggacacttgcagaccacacctacctgttcctcggtgccggcgaggccgggactggcattgccgagctcattgctcttgagatgtcaaaacatactgggtccccgatcgaagagtgccggcccaagatctggctgatggactcgaggggcctgatcgtggcgtcgcggaaagagtcgctgcaggcgttcaagaagccgtgggcgcacgagcacggggcggtggagaccctgctggaggcggtgcggtccctgaagccgacggtgctgatcggcacgtcgggcaagggcggcaccttcaccaaggacgtggtggaggccatggcgtcccagaacgagaggccggtggtcttcgcgctgtccaacccgacgtcgcactcggagtgcacggcggagcaggcgtacacgtggaccgagggccgcgcggtgttcgccagcggcagccctttccccgcggtggagctggacggcagggcgctggtgccgggccagtccaacaacgcctacatcttcccgggcttcggcctcggcgtcgtcatctcgggcgccatccgcgtccgcgacgacatgctgctggccgcctcggaggcgctggcggagcaggtcaccgaggcgcactacgccaagggcctcatcttcccgcccttcaccaacatccgcgccatctccgcccgcatcgccgccaaggtggccgccaaggcctacgagctcggcctcgccagccgcctgccccgacccgacgacctcgtcaagtacgcggagagctgcatgtacacccccacctaccgcagctaccggtaaggacgacccttgcatggaccatggccggcgcttagaggagtgagttttacacgtacgtacgttgatttttttatgtactgtatttctgtgtacgggtacggcaaactacaccacacccacatatatacggaggtgaagttgattcttctgac

SEQ ID NO: 14171 - DNA, 494 bp, Zea mays
  Clone ID: LIB148-042-E3_FLI
caagcacagagacaccaagcgttgaactcgcctaagcagctaccaaccaaccctagaaagctagacaccgtacccatggctcgcgctagcgtcgtctttgtcattgctgctctcctcttcgtcgccatggtcgtagcaccgatggccgaggcaaagtctgccgatgcccctgtggctgacgcgccggccgatggacctagcgggccggctgctgcacctggcccccagggtgtcgaaggcctgtcaggcaatgaggatgacgatgatgactccaccaactgaggccacacatgtcggcccggttaaatttggaacaagacatggaagaaaaatgagagcaatgtctttaaaaccatgaatccataataatgtgtggtcatccatggatacatccttgctctccctctttttctttctgtttgattttcaatgtgttatcatgttgttagttaactgtatcgactcatggtatcaaggtctaaaaaattatcgtc

SEQ ID NO: 14172 - DNA, 1378 bp, Zea mays
  Clone ID: LIB148-042-G3_FLI
gcgcctcaggggaggcatgcagatcttcgtgaagaccctgaccggcaagactatcaccctcgaggtggagtcttcagacaccatcgacaacgtcaaggccaagatccaggacaaggagggcattcccccagaccagcagcggctcatctttgctggaaagcagcttgaggacgggcgcacgcttgccgactacaacatccagaaggagagcaccctccacttggtgctgcgcctcaggggaggcatgcagatcttcgtgaagaccctgaccggcaagactatcaccctcgaggtggagtcttcagacaccatcgacaatgtcaaggccaagatccaggacaaggagggcatcccaccggaccagcagcgtttgatcttcgctggcaagcagctggaggatggccgcacccttgcggattacaacatccagaaggagagcaccctccacctggtgctccgtctcaggggtggtatgcagatctttgtgaagacactcactggcaagacaatcacccttgaggtggagtcttcggataccattgacaatgtcaaggccaagatccaggacaaggagggcatcccacccgaccagcagcgcctcatcttcgccggcaagcagctggaggatggccgcaccctggcggattacaacatccagaaggagagcactctccacctggtgctccgcctcaggggtggcatgcagatttttgtgaagacattgactggcaagaccatcaccttggaggtggagagctctgacaccattgacaatgtgaaggccaagatccaggacaaggagggcattcccccagaccagcagcgtctgatctttgcgggcaagcagctggaggatggccgcactctcgcggactacaacatccagaaggagagcacccttcaccttgttctccgcctcagaggtggtatgcagatctttgtaaagaccctgactggaaaaaccataaccctggaggttgagagctcggacaccatcgacaatgtgaaggcgaagatccaggacaaggagggcatccccccggaccagcagcgtctgatcttcgccggcaaacagctggaggatggccgcaccctagcagactacaacatccaaaaggagagcaccctccaccttgtgctccgtctccgtggtggtcagtaagtcatgggtcgtttaagctgccgatgtgcctgcgtcgtctggtgccctctctccatatggaggttgtcaaagtatctgctgttcgtgtcatgagtcgtgtcagtgttggtttaataatggaccggttgtgttgtgtgtgcgtactacccagaactatgacaaatcatgaataagtttgatgtttgaaattaaagcctgtgctcattatgttctgtc

SEQ ID NO: 14173 - DNA, 556 bp, Zea mays
  Clone ID: LIB148-043-B6_FLI
aataatctcgaccaatggcggcaccaacggtggtgctcatcccgttctgcgtcaccggccacctgacgtccatgctccaagccggcaagcggatgctgatgagcggcggcggcgacctggccatgtcgctcaccgtgctcctcgcgccactgccgatggccaggttcgcgcacatcgtagagcgggaggccacctcgggctcggggttcgacatccgcttccaccgcctccctgacgtggagctccccgccttctccggcccggaggacatgatctccagtttcatccagctgcaggcgtccaacaccaaggcggccattgccggcctggcaagccccgtcgccgccgtcgtcatggactacttttgcaccacgctgttcgacgtcgcccgcgagttggcactgccggtgtacgtgtacttcacgtccccggcctccatgctcgcgctcatgctgcggttgccgacgctggaccgggaagttgccggggattttggggaggcggaaacggcgttcaacgtgcctggtatgccgccggtgccagcggctttcctgcc

SEQ ID NO: 14174 - DNA, 756 bp, Zea mays
  Clone ID: LIB148-043-D12_FLI
gcgcgaccacgagcagccgcaggacgcgcagtgccgccccgaggcgctggtgcagcaggtggccgccgcggcgcgggaggccggcgtgggcctggccggcgagaacgcgctgccgcgctacgacgacacggcgcacgaccaggtggtggccactgccgccgacagggccgccgaggaccgcatggtggccttcacgtacctgcgcatggggcccgacctgttccagcccgacaactggcgccgcttcgccgcgttcgtcaagcgcatgacggagccgggcgcgcgggaggcgtgccgggagcaggtggagcgggaggccgagggcgtcgcgcacgccacccagcccctcgtgcacgaggccgccgtcgcgctcaccaactgaccggaccggccggcgttccccgtcgactgtgttcgatcgctagacggggtggcacgctgcgacgactacctgtatggcgagtccctatacttactcatacataagctgcgccgccgtgtcgtcggtgcgtgcaccgcgcagtagtgtgcgtacagcggaagctgcgactgcgagcgaggtagggtgtggggtgggtgactgggtaccaggagtggggtacggtacgtaggtgccacgttggaggctttggcgtttgctcagagcctggcaggagatgggtttgatgttctgctgctgtgttactgtatcctacacctacagaatgtgctatgatttgtactgctataatttttaacgaagatacaaacttctac

SEQ ID NO: 14175 - DNA, 363 bp, Zea mays
  Clone ID: LIB148-043-D3_FLI
gaggaacggcgccatcatcctgtcggtgcggccgagcgccacgaactgcctcgccgacgagagccacgtgtgctggaggaacggcaagttcgcgcaggacatgatcctccggctcaggaacgtggagagcggggagattcagctgcagctgcagtggctcagcatccctcctgctgcagccagcaggtgaaggaaacgaagcaatcgcattttcaacctctttgtgaatgtcggattgtaacaacttaaaccagcaattaatggggtcagggtcagtcagggtagttcatgtgttgccctattaatgtacagttggggacagcatgaaattcaagccaagtcactcaagtgttgtaggatcct

SEQ ID NO: 14176 - DNA, 898 bp, Zea mays
  Clone ID: LIB148-043-E2_FLI
ccgcgaccttggtgtcctgcaggagcttcaggaacgtggagtacgtgggcgaggcgaatcagctccggtcggcgacgctactggtcgtccccgacaaacttgccaagcctctggcgtcgctgcccgccgataaggtgcggccggcggtggagaaccacgtccttctcagttacttcgaccccatcaagctggacgagatgaagacacgcaccgccatcctccccacgctgctctccgtcaccgacaagaaactcggcgtcctcaactacaccagggccgacgacgggcagatgtacttcggcgctcccggagccccctgcgtggccaagctcgtcaaggtcgtcgcagcgcggccgtactctgtgtccatcatggagatcagcgagcccattttgccggccgcgttgccctcccccgtcgcggcgcccggccgccgcggcaagggtggtaagcgcaagatcaagccatcagcggcaacccatgaggattccaacatgatcccgcgcaagcccgtcgaagcagtggtggtgggtaagggtaaggtggccaaggataccgtgtccgagtcacctgctccaagccccgcccccgtctccgccccttagttgcgtgttgggcgccgctgcccgccggcccccggccaccatgcgtcgtgtctgcgcgcgcacgcacgcattgaacgggagatagaatatggtatcgttcaatgcagattgccatgctatagctccagagtttatctacctggtagcaccatgacacgatggcccgttcgtattttctggcttgctcgtacttttcagttccatgggtttacaacaccttttactcccagcagaaaatacataatatgcatgtactcgactttttttctatagtaatataaacaaagtttcac

SEQ ID NO: 14177 - DNA, 1009 bp, Zea mays
  Clone ID: LIB148-043-F4_FLI
tgactaaaattccaagtttatgcttgggctaagtttatattgggtattttatacccatgggttaacatgtatgggtgaaagtggaacgttctaatacccgtttacccattgggtcaagatttttgaccaataaccgacccacggataaaatatttagcccacatacatactttaatggagtaaatattcatcaggtcgcgggtacccattgccatctctactgacgcatggtcaggccgcatggtggcacagaccgggtgcgacaacgacacggaccacggagatgactcgctcactcgcccctgctgccggtccgttgcgcgagaggcgacgcaccggcgatgacggtggcacaggtgagcgtggcgccgtgggtgggccgggcggggccgcggcatacagcgtgagcctctggtggacggcttcaacgtggcggtcgtggtgacaggctgccgccggagggcgggcggcggtgccccacgctgggatgcgccgtggacctcgctgccgactgccccgcgcgcccgagcgccatgaggaggatgcggcgctgttcaaggccgagtgcccagacacgaggaccaacgccacggacgtcgaggtgacgccgcaggaccgcgtcaagcccgttgagatcaaggttgtcttgtgccccaagcccgccaccatcgtcgcgggccacctctagcgcgccgcgccatgcatgcgtcgtcctggtgggcgcggcggtggtgtgccggtaccgcaaggaggaggcctggaacgagtcgacgtgcccggtgtgcctggccgacttcgacgacggcgaggtcgtgcgggtgctccccgagtgcatgcactacttccacgccgactgcatcgacacgtggctgcgcgggagcaccagctgcccgatgtgccgcgccgagaccacgcccacgcccacgcctagcccggcctccgtgcgccaccacctcgagctctccgtctccctcgaggagatcctcgtcgccacgtgagcagcgccccg

SEQ ID NO: 14178 - DNA, 1087 bp, Zea mays
  Clone ID: LIB148-043-H8_FLI
tctcctctccacctcatccgtatctccctccctcttctcggcggccgtggcggcgccggaggactatgcgcggcctccaccgctgcccgcaccagctcctcctggtctctccaccgccgcggtccgcccccgcgtgccgccagtcggccaccgcctcatcgcggggcctcaggagctccctcgccgtcttctccgcacccggggctcgggtagcggcggcggcgcgcgagcagaagtggggccacgtggagggtgatgaagacggtggagaggagggcctaggggaggcgctccacaggacgcgggagctcgtggagtgcgccatgttcgcggccgtcgctgggctggcctacttcctcagcaattccctcgccattgagaattatttcagttgctttttcccattgccgatagtcatttcctcattaagatggggactagaagccagcaggaaaaccgtggtggctactgttttactgctattcacattatctggccctgtaaaagcgtcaacttatctgctaatgcatggagtagttggtctcatcatgggtactgtttggagattggagaccaactggattgtctccatcatcctctgctccattgtccgtgccctgggagcttgtggttacgtgctagtgtcatcgtttctgataagagaaaatattctcgcgctgataacggttaacattcatgcttcgttgacatacatcctgacggcagctggcgtgaacacaattccttccatgggcacaatatatctactctttgggacactgcttctacttaattgtgggttcttcgtcttcctcctgcatgtgatgtatacggtattcctggcgaagcttgggataaagccgtcgctgaggtcaccaagatggctggacagagtgatgtgaaaattttaggagtagggcatcgtacgtagtgactgttcttcctgttctgctgttttagccttgctgtttgtcgcccctacctatactgggacctgtaaccatggggtgcatctgtgcatgcaaacgcgacaagcaaaattcgggattatcaatcaatcatctgtgctactcgtgctctgttgatg

SEQ ID NO: 14179 - DNA, 472 bp, Zea mays
  Clone ID: LIB148-044-A3_FLI
agagcgaaatgagctttgtatattccatggggcaagaagccaaacatgtacatgggcagggcatagaagcccttacacacagcgagaaaaataagctaagcaacatatacatctaacaaaaacgtccttgtgatgatgatcttcctcccatcctcgagttttttgtggtccgttttctgttcgtactacaacaaatcaacgagtgatttacagcagatgcccgaagatctagcgacctcctcccttaagaggactgacgtattcgtgtggcaaatatcaatgtatcacccgatagtatcaacatgtttatctgtccctaaccaaggtgaagttggtcacagcaaaaccaagtttcatctggattgcttacttcttggttcctgttttaccatttggagtcttccttccttcacctccgcccttcttgattagcgtcggtgagggtccactcggcttcttctgtaatggcgat

SEQ ID NO: 14180 - DNA, 643 bp, Zea mays
  Clone ID: LIB148-044-A7_FLI
cgctcttgcagaaacgaggaaagaaaacatgtcttctcgctgggttagggcggaggtgtacccgctgttcgcgacgacaggggtggcggtggggatctgcgtgatgcagctggtgcgcaacatcaccaccaacccggaggtgcgggtgaccaaggagaagcgggcggccggggtgctggacaaccacgacgaggggcggcgctactcgcagcacggcgtgcgcaggttctggctctccaagcgccgcgactacatgcaggccatggacaaggtgcccacggaccctaataagtagacgacgacgatataccccaatgcatggcaagaagatatatatatcagcacaacgcaactgcatgcgatgctgcttgttgctgcaattaatccactatactatatactataggagtattattgattccagttgcagcatgcatgatgatatatgtgtctctatatgcatgcgttggtatatacaattcagatatgcatggtatatataagtggtagtgcgcacgtacactacatgcagtcattaatttgtacgtcttcgcgtgcatttgggctgtcagcttattaattaaagttcatactctttattaaacggatctatatatatatatatacatgttcagcagtaacc

SEQ ID NO: 14181 - DNA, 571 bp, Zea mays
  Clone ID: LIB148-044-B12_FLI
ggctccccaaagatagcatagcagcagcactcacaatagcaaaaaccaccatccgtcgtcgccaaccgtagcaaggagccaaggacatcaccaccgcccagcaataatggcgcagagcatgaggattgtggcgctggccttggtggccctgctggtggtggcggcggcggcgcccgtggccaccgcgtacggctgctacgacgactgctacgagcgctgcgccaacggcaagaaagaccccgcctgcaccaagatgtgcaaccaggcgtgcggctccacggaccagggcgccggtgccgccggcgccgcgccggcttgatcgcccagcgcattcatcgcttcagctcgatataatcgctgctccgtcagcaacccacatatgattcgatcaatcttcctcctctaatttctcgaccccgtcgaatttttttcctttctattcttctactatactactattatctgtttgtcgcgttgatgtcatctcatacatcgatcgaggatcgactcatcgttttgtaattcctgcaatttgtaagtgtaatgacctctatgattcagtcttcctttt

SEQ ID NO: 14182 - DNA, 702 bp, Zea mays
  Clone ID: LIB148-044-C2_FLI
tccttgcacccctcccctccgtcaccccaccacatccggccagcccaacgaaaatgtcgcgcgccacagctgcggtcctcttctacatcctcgccgtcgctgccctcagcgcggccgaggcaccggcagagtcaccgaaggcaggcagtcctgccaaggcaccggccgagtcaccgaaggcaggcagtcctgcagctcctgccaaggcacccgagtctgctgccacgagaactgcccccgctaaggcacctcaagccgcctccacccccgccgttgccgctgccccatcgtcgtcgtcgtctaggaagtctggtccagctgccgcgccgaccaccgccgcctctacaccgtcttcttccacggacgaggagttgagcccttccccgtcggcatccaccgccgaggtggcgtcccctgccgctgatgggcctgctgagggaccggcggctgctgatgcctccggtgctgctacccttggaagcggagctgccatcgctggtgtcgccgctgctgtcgctaccatgatcttctactgagttcaccagggaccgtgtcgtcgagggtgggcacgtagttggctgtgcggtaattgctcgtctggtcgggagggaccaataacgcaagtgttgctttgctttgctcacttcgtttgctcttgtaactttatggggtcaaccgttatataactgaaacgatttgatt

SEQ ID NO: 14183 - DNA, 666 bp, Zea mays
  Clone ID: LIB148-044-C5_FLI
gattttggtgctgcttggtcaacaacattaaagttcaaggtcaatgaatcgtacagctgcagatatatgctaggtagtaacaaggctgatattcactcgaacaagctattcaattgtactgctgaggaaccttcgactggggagcttttcaaaaggatacttatactgttttcagagatgtatgtgtcagaagatttcagttcagggcgaatgcttgtatatgtggcagcaggtgttgtgctgggcatgctgagttcgatgttcattacggccttattcagaggtatgtatgggttgttgctcgctgccgccaggtgggctgtgaggaagcattgcatcagagtatttgccagccggttgaagcgtgcctgccttcttgtcgcctatgtatccgctgttggctggatcaccttgcagtacagcaaatttatcgggttgaaagaactcctgtcggattctgaagtcatggagaggttcttttaggctgtagatgtattcgccggtgtatattgtacttgtaataccattcggttatttaggaaggtttcttcttcttctttttgatgtgaaaccaatgctctgttgtacgagtatgtacatgccagttgccggctacactgctgctctgtcacaaacgtgttgttcatgccacattttatcagggac

SEQ ID NO: 14184 - DNA, 1054 bp, Zea mays
  Clone ID: LIB148-044-C8_FLI
ggcggttcctgagggctcctacgctggtagcacgcccatggggagcgactgctacggtggtgctccgtgggcagaagacgaggaggtgcgccgcctcagcgtgcggatgcaggcgttggaggcagaccgtgagtccatgaggcaagccatcatgtccatgggagccgagaaggcgcaggtgatgctgctcaaggagatcgcgcagaagctctgcaaggacacgacaccaccagttccagcggcagcagtggctcagcacagcttttacaaagggggcaacacacagccggccatgaccatcactgtgcgaccaccacggcacccggctttgcttatgcaaaggaaactggtgaagaagaagccatcactccttgctgcagtggtcaagtgggttacatcaatcatgtggtggcgaaggaaatcatcccgcgtcaagttccctattgggcagtgcggcaacaacgtggggctgcttctgctgctcgacaaggctcccagggcaggccacgggcaccagaggcctcccaagaggatctaaccaccaaatgagtcatctgtttgtgaagcaaacacatgactgggcttccgcattgttgttctcgcgttcttctattcaccgtgtctggtgatgtagctttcacatatggaaaccatttttttctcatgtaggatataccacctgagcattgtacgttgtgtgttcatgggacttcaatcaccagaagttgactcagatcttagaatcgatcatatggaattgacgttcatggcaattcgccgctgaatactgttgttgggtgtcatttgagcaccatattcaacttgtcagtaaatacatggtttacggtttcatgatggttttttttgggtggggtgggggattttgaataggcaattaccagggtagttcttggtttcatgattgtttgggggatgctgattttgaataggcaattaccagggtagtggaacttaggctatccgcaacggtgtcctctaaattttccctctatatgctacaatgcagtcacatcaacaagatttcttccccttt

SEQ ID NO: 14185 - DNA, 1074 bp, Zea mays
  Clone ID: LIB148-044-D12_FLI
caaccccgcacgcgacatcaatagtccctaccattcggcgaacgtacaaatcaaagtgcggcgtgcccgctcgcaaactttgagtacgtactgctactccggctcgtcctcctctcttctccatcgccgttggttctctcacgccacacggtcatccgatccctgtccaccgcgttgggagcggcgcagcccatggacgacaacgagagagagaaagagaatgagaatgagaaggagaagcactacgggactgacgtcgaggatgaagaagaggacgaggaaggtaacaagcgagtcgtggtgcttggcccccaggtccccctcaaggagcagctcgagctcgacaaggatgatgagagcctgaggaggtggaaggagcaactccttgggcaggtcgacacagagcagctgggagaaactgcggaaccagaggtcaaggtggtggacctgacgatcctgtcacctggcagaccggacctgatccttccgatcccgttccaggctgacgagaagggctatgcgtttgccctcaaggacggcagcccctacagcttccgcttctccttcatcgtctccaacaacatcgtgtcaggcctcaagtacaccaacactgtctggaaaactggagtcaaagtggagacccagaagatgatgctggggacgttcagcccccagctagagccctatgtctacgagggcgaagaagagaccacccctgctggcatttttgcgagaggttcttattctgccaaactaaagtttgttgatgatgatggcaagtgcttcctggagatgagttactactttgagattagaaaggagtggccaggaactcaatgatgtgtggaccagcatggctgactcgtcggagtatgttagagctcatagctaagccaagcacaagatgtggactcatcttcaagaatgattttcattcgctacttcatcgttaatcgcattttaatttgttttgaattgtcattgtacgtcgtttatgacataaaactgtttattcatcacatatataattcatgtatcgagatatatattcagatattttttttagtgttgttg

SEQ ID NO: 14186 - DNA, 663 bp, Zea mays
  Clone ID: LIB148-044-D7_FLI
tctccaccctccttccaagggccacgatgagggcgcctctcctctcctcgctcctcgtcctcgccgtcgtcgccaccgtgcctctactagtcccggcggtgtgcatctcgcggcacgacaagtccgagagcaaggctgacgaagaagctgctgctactaccgttgccgccgacgagcatggctctgtcaagaccatgtccctcgacgcatacgggccactggagatggccgccaagaagcccaaggagcaggtcctgaacgcgcaagctacgccggcgacgaccgctggcgctgacacatatgaccagaaacccgttggtgaaaaacaggctgaaacggccacggcctccgctgccgatgaacaacccgacaaatacgtggaagctctagttcctgacgagaaggcggaggaatttcccgataaatatgtggaagctctagttcctgacgacaaggtggaggtgaagaagaagaaggtaaagaaggaaaagaaggacgagtctgatgattctgatgtagctacgtcttataagaagaaggagaagtctgatgattctgaggtgtctacatcttataagaagaagaagaaatctgacgattctgatgaagatgcatctcttgataagaaagaaaagaaggcgaagtttgcagcatctgacaaaa

SEQ ID NO: 14187 - DNA, 936 bp, Zea mays
  Clone ID: LIB148-044-E1_FLI
gtaatcgaccccaccgggccaccgttccttgccaactgccaagcatcaccgcgaaatctaataactcgttgctcttcgtcttcgctccgcgatcgatccaggagggggaagcagaaggagggatggcggagaacccgcagctgtttgggaatgggatgccggtgccgttctacagtgagatgttcgtcctcgcccgggatggcgtcgagttccacgtcgacaagatcccatcagctcctggtggtcatgtgaaaacaaaaggcacaatttacctgtctaatataaggatggtgtttgttgccaacaagcatgttggcaacttctttgcttttgatatgccactgttgtttgtgcacggtcagaagttcaatcagccaatatttcactgcaacaacatctctggattcgttgagccagttgttccagacaaccagaacaggaccctgtactcaactcacaccttcaaggtcttgttcaaggacggcggctgtggtactttcgttcctctgttcctcaacctgactgcatctgtgcggcgctacaaccagtttgaaacccagtctgctgctagcatggcacctcgtgtggaccctctgcaagctgtgcagactcctgttgatgacatgatgcgtcatgcgtatgttgacccaaacgatcctaccaagatcttccttcagcaacctgcgccagaatcgcagctgaggaggaggaactaccacggcccagctgatgcaaattagcgcttggctggattggcagaactcatgctcaattaagtgctgtgtccattttagcatttcacctatccttgtcgtttaccacaactgacttccatattcgggtacccctgtttcctgtgaccttacatatataggacataatgttgcgagttctcgcaatatgtaatgtacataagtggcgtgttcatatattaac

SEQ ID NO: 14188 - DNA, 1092 bp, Zea mays
  Clone ID: LIB148-044-H11_FLI
caaacaggctcaggaggaggctctctcctgtcctacctgttcgctcccggctcccctccatctctttcgccacacgcgcgagagggaggagaggaaacagctagcagcgagcgaggaacgaagagggtgcttcgcacgtgcatgcgagatcgatcccgatcgtcggccggcgggaattgaactagcgacgacgtacgtgcgaccggggcgggcgttggattaattattccggcctgagcaatgggcaagatcgagtacggcgtggtggcgcgcggcgcggtggtgctggcggagcactacggcgcggcggcggcgggcggcaacgcgggcgccgtggcgcggcaggtcctggagcgcctccctggcggcggcgacgacgactgcaacgtgtcgtacacgcaggacctccacgtgttccacgtcaagcgcaccgacggcctcacggcgctctgcatggccgacgacgccgccgggcggcgtgtccccttcgcgttcctggaggacatccacgggaggttcgtcaaggcgtacggccgagcggcgctcaccgcgctggcgtacgccatgaacgacgagttctcccgcgttctggcccagcagatggactactactccaacgacgccagcgcggacaggataaatcgcatgaggggagagatggaccaggtccggagcgtgatgatggacaacatcgacagggtgctggagaggggtgaccgtctggaggtgctggtggacaagacggcaaccatgcaggggaacacggtgcgcttcaagcgccaagctcgccgcttcaggaacaccatgtggtggaggaacgtcaagctcacagctgcagtgatattcatcctcaccgtaatcgtgtacgtcctgctcgcctacatgtgtcgcggcttcaccataccgtcatgctttccgtaatctccatccgtcccggtgccagtgcggaccaccagccctagctctagctgcctcacaacttggttttccgggttctgtaacagcagcagcggtgctgcagttctctctcttgtacgagggaaacaacagctcattctcaagttctgcaacaaccagatctgattttttttt

SEQ ID NO: 14189 - DNA, 885 bp, Zea mays
  Clone ID: LIB148-045-B6_FLI
gctcagctacctgtacgacgagctgtgcatgctcacggtgccgcacggccacctcaagtcgtccaacatcctgctcgacggccactacgagccgctgctgacggactacgcgctggtgcctgtgatgaaccagtcgcacgccgcgcagctcatggtggccttcaagtccccggagcggaagcagttcggccgctcgtccaagaagagcgatgtctggtgcctcggcctgctcatcctcgagatgctcaccgggaagccgccgacctacgacctgcccaaggcggcgggggcggtgccgtcggccgaatcgttgtcgtcaccgcagaagccgggtccggcggcgggcaacggcacggacctggtgaccgtcgtggggtcgacgccggagggcgagtggctggacaccgtggtggacccggacctgaggggcgaggaggaggaggacaaggaggagatggtgaagctgataagggtcggcatggcgtgctgcgagagtaacgtggacagccggtgggagctcaagaccgccatcgacaagatcgaggagctcaaggcgaaggagcgccccgcccccgacgaggagcaggccttctactcgacggtgaacaacgaggacttcaacgacgttgccatcaactgaactgacgatcgacatggactgggaatagatttcatcgcacaccaccgacgacgaatttccaaacaactcaacagaaatctattacaaattaattaattaatatgtgaatggataatggaggatctattttgtgcaaattatcaagtgtaggggcacacaaaacgttcgttctttgaaattttcatcacacgagtgaactttgttttaaaaaaccataaatatatatgtgttctattgttaggtgg

SEQ ID NO: 14190 - DNA, 1096 bp, Zea mays
  Clone ID: LIB148-045-E9_FLI
tcccaatccgtggctagcggtcccctgtttcctgccgagctcgccggcgttccccttcctccgctgctgccagtggtggttggagatgacacatatgtttccaagggaaggtgcctcatctagctcaacctcaatgagcagccagaggagtgaaactcatgatgataggatgattgcaatggttctctccgaagaatatgccaagttagatggtgctatggccaagcgtcttactaatttaacatcaattcctcatgttccccgtattaacacatactttccaacatatagtgatgccactatggaccattatcgcctccttgataggctaaatgcatacggcttgtttgaggtgagagtatctggtgatggaaattgtcagtttcgtgcactctcagaccaactatatagatcacctgattatcacaagcatgttcgaaaggagattgtaaagcagctcaagaaatgtaacaccttatatgaaggttatgttccaatgaaatataaaaaatattgcaagaaaatgaagaagtctggtgaatggggtgaccatgtcacgctacaagcagctgctgacaagtttgctgcaaagatatgtctcctaacatcattcagagatacatgttttgttgaaattgttccgcaatatcaagctccacagagagagatttggctgagtttctggtccgaaattcactataactcactgtacgatgctcgagatctcccaagcaaatacaagcctaggaagaagcattggttgttgttttaatatccatgcgggagtttgcttcatactggtggaatcatattgtttgaccctttcgaccaccgtccgccaaatgatgcaccgtacagctacagcacgatccaggcatacaacagtaggtgtagagttacaatgctgaacctgagccttgtgaatagatgttcttaatacaggttgactgtaatgccctgtcttatttgttcactgtgtatattctttatttatacaactacatgttagctctattcaccagttcattattcccttcgtttttggaagaatccatcattgccttctgggcccaaatgtccattgccttttgctgac

SEQ ID NO: 14191 - DNA, 1154 bp, Zea mays
  Clone ID: LIB148-045-F10_FLI
gggaggggagcacccatcagccaagagctatccatacgcacagcgatgcaccagcacgagatactagccatcatgcgcctgtcgtccctcctcctcgtcgtggccgccctctcggcgcgcgccgcggcgcagcaggtgccgccggtgggcggcagcgctctgaagccggactactacagccagtcgtgcccgcgcgcggagaggatcatcgcggaggtgatgcagacgaagcagatggcgaacccgacgacggccgcgggcatgctgcgcgtcttcttccacgactgcttcgtcaccgggtgcgacgcgtcggtgctgatcgcgtccacccagttccagaagtcggagcacgacgcggagatcaaccactcgctccccggggacgccttcgacgccgtggtgcgcgccaagctggccctggagctggagtgccccggggtggtgtcctgcgccgacatcctcgcgctggcgtcgggggtgctggtcaccatgaccggcggcccccggtacccgatcccgctggggcgcaaggactcgctgtcgtcgtcgcccacagcgcccgacgtcgagctgccacacgccaacttcaccgtggaccgcctcatccagatgttcggcgccaaggggttcacggtgcaggagctggtggcgctgtccggcgcccacacgctgggcttctcccactgcaaggagttcgccgaccgcctctacaacttccgcagccagggcgggaagccggagccgttcgaccccagcatgaacccgtcctacgccagggggctgcaggacgtgtgcaaggactacctcaaggaccccaccatcgccgcgttcaacgacatcatgactcccggcaagttcgacaacatgtacttcgtcaacctggagcgcggcctcggactgctcagcaccgacgaggagctgtggacggacccccgcaccaagcccctggtgcagctctacgcgtccaaccccactgccttcttcaccgacttcggccgcgccatggagaagctcagcttgttcggcgtcaagaccggcgccgacggcgaggtcaggcggcgctgcgacgcgtacaacagcggccccgacgttggcggcgccatgcctatgcccatgcccaagatgtgacgctgtgcgcgctacaagtacaacga

SEQ ID NO: 14192 - DNA, 1543 bp, Zea mays
  Clone ID: LIB148-045-F9_FLI
aacacaaggagaaggggaagggcggcgagggaagggctccgcgtcgtgtcccttctcttcctcctcctcctcctcctctctccaacaccccatccatcagcgctgccctccgcattgctcttgatcccatccagtacatcgattctccccccaagatcaaaggccggaggaggaagaaaggttagggagtcggccatgggatgcttttcatgctgctgtgtggcagatgacgacaacgttggcaggaggaagaagcatgacgatccctatgttcctatccctgctcatgtttataattttggacctagccggttcccagccccaacccctgtcatctccactggcagagctcagccaattgcagtaccggccattcatctggaagagctgaaggaaattacaaaaaacttcagcagtgatgccctcattggcgagggctcgtatgccagagtctattttggtgtgctgaaagatgggacgaaatctgcagtgaagaagcttgactccagcaaacagcctgatcaagaattccttgtgcaggtttcagctgtctcaagattgaagcatgagaatgttgtccaactcgtcggatactgcgccgaagggagcacccgcgtccttgcttatgagtatgcaactaggggatcattgcatgatatcctccatggtaaaaagggtgtcaaaggagcccagccagggccagtcctgtcatggatgcagcgagctaggattgccgtatgtgctgctcggggtctcgagttcctccacgagaaggccgatcctcgagtggtccaccgcgacatcaagtcaagcaacatactgctctttgaccatgatgttgcgaagatcggggacttcgacatctcaaaccaggcccctgacatggctgcgcgcctccactctactcgcgttcttggcacctttggctaccatgcaccagaatatgccatgactggacagcttagcacgaagagtgatgtctacagctttggagttgtgctgctggagcttttaaccggtcgcaagccagttgaccacacactgccccgtggccagcagagccttgtgacatgggctacaccgaggcttagtgaagacaaggtgaggcaatgcgtcgatccaaggctcggagacgaataccctccaaaggctgtagccaagatggctgctgtggccgccctctgcgtgcaatacgagggtgaattccgtcccaacatgagcatcgtcgtcaaggctctgaaccccttgctgcacagccggtctggcaaccgccctactgcctcgtcggcctcccacgctgccgagcgatccggactgtgatttctcatcgctgcgacaactttgggttcacgaaaaaggaccgtcttgtggagcgttggtgttgctgtgtcgtgactgccaaagccttggcgcagagaagagctttgccatgcagctgtgtattgtaaattgttttgtaagcgatgcgcctcctggtttgtgtgccctgtcatcatcctattctattctagaaaatggtgtacgatggatcatggatgatacc

SEQ ID NO: 14193 - DNA, 1436 bp, Zea mays
  Clone ID: LIB148-045-H7_FLI
gccgccccccctctccgcctcaaggctctcctctcggaggtctgataggcaacccaataatggcagaagtcctatcaggatctcatgaacaccgtctaagctctgccttagatggacactacgacgagaagaggaaatccaatgtggaatacacagaggacgagaagaaagccgtgatcgcggctctgaaaaagaaggctttgagcgcctcacagaagtttaggcattccatgaagagggggaggaagagcagcaaggtgatgtccatctcgattctggatgagcgtgaacctgaggaggtgcaggctgtggatgccttccgccagcttcttgtacttgaagagctgctaccatcgcagcatgatgactaccacatgatgctaagatttctcaaggcaagaaagtttgatatcgagaaggcaaagcaaatgtggtctgatatgctgaagtggagaaaggagttcggtgcagataccattctcgaggaattcgaattcgaagaagctgataaggtggcagaatgctaccctcaaggttaccatggggttgataaggaaggcaggcctgtctactttgaacggcttggacagatcgatgtgaataggctaatgcaggtcactacaatggatcgctttgtcaagaaccatgtcaaggagttcgagaagaactttgctgttaagttcccagcttgctcaatcgccgcgaagcaccatattgaccagagcacaacaattcttgacgtgcaaggagtggggatgaagcaattcagtaaagctgcaagggagctcattggcatgcttcagaagattgatggtgacaattatccagagaccctgtgccgcatgttcatcatcaatgcaggccagggattccggcttctatggggcaccgtcaagagctttcttgacccaaagaccactgcaaagattcatgttctgggtaacaagtatcagagcaagcttctcgaggtgattgatgctagtgagttgccagaaatttttggtggaacctgccgatgtgaaggtggttgcatgaaggctgacaaaggcccttggaaggaccccgaaatcatgaagatggttcaaagtggtgatgggaggtgtggatcactcggtacggcctctttcgaggctccggagaaaatgatttgtgaagacgacacgtatcctaagaaacaagctttgtttgatggggaaacacaattagctggagacgagcattctcagtcacagaaaatttcccgtggccggattgaacatcctcacgtgtcacctcttcacgaggaacttatccccacttcaattcatacccctggatcaccctattcttgtgatgtcccgatggttgaagaggccatagacgccatctgcaagagccacggaacaccaccagatgagaagattgccatcaccaaagctattataaatgtatcgaat

SEQ ID NO: 14194 - DNA, 656 bp, Zea mays
  Clone ID: LIB148-046-D4_FLI
cctctctcccttcgtcaccatcacatccagccagccaacaaaaatgtcgcgcgtcacagctgcggtgctcttctacatcctcgccgttgctgccctcagcgcggccgaggccccggcagagtcaccgaaggaaggcagtgctgccaaggcacctgagtctgccaagagaactgctgcccccgctgaagcacccgaagccgcatccacccccgtcgccgccgctgccccatcgccgtcgtctaggaagtctggtccagctaccgcgccagccaccgcctctacacccccttcttccacggacgaggagttgagcccttccccgccagcatccaccgccgcggcgtcccctgcggctgagggaccggctgctgatgactccgccggtgctgctgcccttggaagtggagctgccatcgccggcgttgccgctgctgttgctaccatgatcttcttctactaaactcaccgacgatggtcgtgtcgcggtgagacattagggtggacacgtaattggctgtgctgtaatcgctctcgtctggtggggagggagggaccaagtgtttctttgctttgctcacttcgtttgctcttgtaacattatggggtcaaccgttatgtaactaatggatttgattaatctggtctctaactctccc

SEQ ID NO: 14195 - DNA, 442 bp, Zea mays
  Clone ID: LIB148-046-D6_FLI
aagcgattttgaacggctccgctagctaaagcagggcaaggcggccggaaggcaggaaatccgtacgcacgccgaggtcgaggtcgaggtctcagcagggaggatggaaacggagcagcagggcgtggttgcgggggtgaagccgacgctggccaaggggacgccgtcggcgtcgttccggctccgcaacgggagcctaaacgcggtgcgcctccgccgcgtgttcgacctgttcgaccgcaacggggacggcgagatcacggtggacgagctggcgcaggcgctggacgcgctgggcctcgacgcggaccgcggcgggctggccgccaccgttggcacctacgtgcccgacggcgccgcgggcctccgctttgaggacttcgaccggctgcaccgcgcgctcggggacgccttcttcggagcgctggcgggccaggacgac

SEQ ID NO: 14196 - DNA, 572 bp, Zea mays
  Clone ID: LIB148-046-D8_FLI
tatccttgtgtataaataaacagggttccatggtctctctcactcaaagaacagtgatttgaaataattgggaataaatagttcgtgaatccctgaagcgtgcatatatatattcctgccaagataaaggtaatggagtcgtcacgcaggttccagccggccgtcatcctgcttctcctgctcattgtgtccaccgatatggcacaggcaagggaatgcgagaagtacagtgagcgatttgttggggcatgcatgatcgcagacaactgcgccaatgtgtgccgcggtgagggcttcttggccggcaggtgcagcaccttccgccgccgctgcatctgcactaggcagtgctaaacaagatcgctcgatcgcttgccatgcatcgacaacctattcttaataacgttcattatctcgttcttatttatgacgaatgtcatgtatgttctggtgactgtcatgtatattctgatgactgtcatgtatcttgttcatgtatgctcaaggttcattatcttgttcatgtattaagtatgttatgaataactcaatatttattattttgttcatgt

SEQ ID NO: 14197 - DNA, 696 bp, Zea mays
  Clone ID: LIB148-046-F11_FLI
agaacctcctcgcctcctccattgaccaacaattaagcctccccgaccgccacatctattaggtgcagccatgggtgcctgtgcaacgaagcctaagacgcttgaggggaaagccccagctgaggccaccatctccacacccaaggttgcacctgagaccactaccatccacattgaggttgcggcaaaacatgcagtagttgagaaggtggaggaggacaaggaggaggcactaacagtggcggcgaaacaagagccagcagccaccattgagcctcagcagattgctagtgaggtgaccacttcggaagtggcggtcgtcgttgtcgagcctgagaacaaagaggaggaggaagttgtggagaagaccgtcatcgagaaggagaagccatcagcagtccatgcagaggaaaatattgccaccaacaaggtggcagccgagcccacgacagaattgaagaaagacaccgaggaggagatatagatggagaaggagaagccatcgctaagctaattgactgcatgtcaattggctgatgcctgatgatcaatgtgcaagaaagagatcgaccactaattggcatacatgtttaagtcgggagagagactcggtcaccttgtaaacaaaacaaacctttgatgtctcccgttttccctccatggggttctgataatacaacatcctggggcttattg

SEQ ID NO: 14198 - DNA, 1298 bp, Zea mays
  Clone ID: LIB148-046-G2_FLI
gtccggggacgacatttggcggcatcaaccacacagcacaggcacagcgcagcaccatgacgatggagggggcggtttccgacaacaccaagggcctggcgctcgccgtcgcctccagcgccttcatcggcgccagcttcatcctcaagaagatcggcctcctgcgagcagccaagtgcggcgaccgcgcaggtggcggaggacacacttacctctccgagcctctatggtgggcgggaatgaccacaatgctgcttggggaggtcgcaaacttcattgcttacatatttgcgccggctgtactcgtgactccacttggggcgttaagcataatcgtaagttcagtgttggcgcactttgtgctcaaggagcggcttgagaagctcggggtccttggctgtgtgtcgtgcatagtaggttcagttgttgttgtcatgcatgctcctgaagagcatatgcctaactctgtcaaggaaatctggaacctagctactcaaccagggtttctagcatatgtggtgacagcattgttacttgtgggagcgctagtactcttctttgaacctcgatacggtcagactaacatcctgatatatctgggtatctgctcttcaatgggatcgctaacggtcgttagcatcaaagccattggtgttgccataaagcttacgttggatggggtgaatcaggctgcttatccatacacatggctttttcttatggttgcaattgtttgtggggtttctcaaataaattacctgaacaaggcattggatacctttaatctggctattgtctctcctatatattatgtaatgtttactacccttacaatagtggcaagtggaattatgtttaaggactgggctggtcaaagcttaagtagtattgcttctgaatcatgcggcctgataaccatcctttctgggacaattttgttgcacacagcagaggagggagccaacaattctgcagctttgttgccttggcctttggataaagggtctatatcatggtgtatcaacttaagcagtgacaatcttctaaagaatgtcgaagaggactacttcacagctctgcaaagttcacctgccccagtataatgaagaaactgataaatatctaaaagggaacatgcaaatcaaggtgtaaatcttaacagtgccagaaatctggcagttttgggatagaacttctccattgtttgttcaaggcaagcagaattatcgcctgcatgttgtattttgtataaatgttcatcctttaactaaaactcagaagtgaagattgatatatct

SEQ ID NO: 14199 - DNA, 577 bp, Zea mays
  Clone ID: LIB148-046-G3_FLI
ccgccgccacagcacccgtggcagcagcttgccatggcgctgccggccccctccgccccgccgcaggtcaccgcaagacggcgctgcggagtgcctggggtgcgcacgggttgttttggcgaccccgagatgaagcggcggcggcgggtggcgggctacaaggcgtacgcggtggggggcaaggtgaaggcgtccctccgccggggcctcaggtggttcaagcgcaaatgctcccgcatcttgaatatctgaccaccgtgcggcggcgcgcggcggcgttctcccactcttcttggaccgcaaggccgctcttttaccgcaacaattatggcatgcactcggcggtgcattgccaatttatgcattgatcaagaattcgcgtgattgaatgtacctctctgttcggaaagatcttgtttgtgcttccaagatttttatttccagaggctgcagatttcaacggttatcaataatccttgtttccagactacatgcttcctagtcttctagaatgcgtaccatttcggtcattgaagttcataattcaaacgcttgccctcattgaatttgtaatcac

SEQ ID NO: 14200 - DNA, 950 bp, Zea mays
  Clone ID: LIB148-047-A9_FLI
gccgcggtgcctgccgagcctcgtcgtcgagctggcgctgcagacgcacgcgctgctgcgcgagctcggcaaccccgcgggcgcgcgcatcgtcctcgaaaccgagcgccgcgcggcactggaggccgccccctcagccgccgccgcccgagacggaggaggcggggcgtcgcgggctaataataagcgcggagtccgcgcgccgccgccgccgctgctggacgagccgtcgtggaccatgttctgcaacggcaagaagaccgggtacgcggtgcgaaggcaggccacggacgacgacctcgctgtgatggagacgctgcgggcggtctccatgggcgccggcgtgctccccgggagggccgccccttcgtcggcgcccgacgcggctgcggcggcggcagcggacgacgaggtgccctacatgcgcggctgcttcgaccacttcgtcgggtcccgggactcggagtcgctgtacatgatcgcgccgcagggcggcggcacgggcccggagctggccgtcttcttcgtcaggctctgacctccgatccgatccgccccgcgccttgcctctagctatctcctcgcccccatgcatgcgaagacggcccaagggcatccattaaccgccacgtacatatacatcgtcagcattcattggatggtgcaacctaaagattgactaacaagaaagagttaagaatcaaagagagagtcgcccaatctttgatcgtgcaacgacctcaagattgactaataaggtcttctggttaatttttttttggctgattcgttattaggttgttgtatacgaggtgttcttggatttgtgccctatgcagcattgcaccatctatcattagtcagacattcatcagagtacataagagagtagtcactggacggtggaactgtggtccaaaaagttgtttacttcagaatgtttttttccc

SEQ ID NO: 14201 - DNA, 508 bp, Zea mays
  Clone ID: LIB148-047-C3_FLI
gccgacatcgaccctgaccgcctaccgcaaatcctgtacgaagacgaggaccgggacaaggtggtgctcgcgtcggacgacgacctcgcggcggcggtggaacacgccaggctcgccggatggaagggtctgaagctgttcctggactactccggcaccaccgggcgcaggaaagcggtggccaccccacgtggcgccatggcggtgggcatgtccagccgggacgcgtgggcggcggcgtacagcggggtcgccgccggggctgccctcgtcactggcatcggcgtcatggcgtacctgcgaagatctgcctagctagtgtggtggcgcggcggcgcggcgcgcatattcgccaatgcaagagcaaggggttcctgtcctgccttcgaatcaccacagaggtgctagtatgtgtggattacgtacccaaccggtgtatgtgtgtattcttttctacacgaacatgtaccagggcacaagttttccattaagaagaaatgggtggacc

SEQ ID NO: 14202 - DNA, 1610 bp, Zea mays
  Clone ID: LIB148-047-C8_FLI
atcgccgtcgtctcctcctccgcctccctgtctgtccgctccgcacctcccctaaaaaacccctccggccattgccgcaccgagctccccttcctcaaatgccccaggcccggacgcctcgacgcccagctccgtgctcgaatggctagcggcgtcctccatcgctccgcctccctatgtctccgcccggccgccggctcctccgccgactccggccggggccacggcgcggttatgatcggtgattcgaggacgcgcgttgctgctctgcggctgggaggatctagccggagagagttattatctgtcacaatggcctccagagatcacactggcttgacccgacaacttcttgattttcaacatgatacaatagatgaggtaggcgcaggacatgatccattcatggatttgaaagcgagattcatggactttaaacagagaaactatgtggaaaaattttcaaattaccaaaccctggctgagcagcaaacaccaaagttcatggtggttgcttgtgctgactccagggtctgccctaccgctgttttggggtttcagcctggggaagcatttacagttcgtaatgtggcaaatttggtaccaccatatgagcatggggggacagagactagtgcagcactagagtttgctgtcaataccctccaggtagaaaatgtactggtgataggccacagtaggtgtgggggcatccaggcactaatgagcatgaaagatgattcgacctccggaagcttcattaaaaactgggtttcaattgggaagagcgcaaggttaagcacgaaagctgcagctggaaatatgagttttgacatacagtgcaaacattgtgaaaaggaatcaataaatagttctctgttgaacttgttaacatacccatggattgagaagagggtgaatgaaggcactttgaatcttcatggaggctactacaacttcgtcgattgcacatttgagaaatggacattgttgtaccgtgaagggttggaaggtggaagcaagtatgccataaagaaccggtccacctggtgttgaccaacgaaggtcgtgtttacttgggtaaatttcactctgccccccgctgttcagcatggtttcgctttgccactacgttgtccatttcccattgcacctttgctccattgtggcatcgatgttctccgggtcccggtatcaaataactgtggcaaggctgttggcatgccagcttgaactgcgtgttgtagtgtcgcatacacatgcgcaggcacgtctgcatcgtagcagttatttgatacaggaactttttgatactgtagaagcacaataccacaatggagtgaggtgcaacgcgcgatggacaatatggttgcaaggtgaaagtctgtggaactgccgggggcaaagtgaattttatccaactatctgtaatatgtgtgctgttttccggttgaaactattaagaaaaaaataggaataagctgcaggatcggtcgtaatgcgtgtaattgtcgccacatttggcattaccttgctattgtaacatttgtaccatttgttgtatcattataactgagatatatacggtctcgtcaaatttgcttggtgac

SEQ ID NO: 14203 - DNA, 2083 bp, Zea mays
  Clone ID: LIB148-047-E1_FLI
tttgtacatatgaggctgaatacatatcacgactctaaaccatccatttggttatgatctttttttaagaaagagcatatagttttttgaccaagaaaataagcatgtagttatgactaccaattgttcgttttagattaaagatgattgtttgaattgctgcagttgtaatctacatagacaaaaaacaatgtaaaagcaataaaatccggtacaaacattgcaatggtccacctagcattcttaattctttgatcctttcataccgcgttcacgttaacggacggcagcagcgggcgggccggccggccggctcacgtgaacaacgcccacgaaacagcgctggctgttgcaaaagcaaccgtttccagtttcctcgccagtgcacccccctcccctgtcccctccctggctccctctctcctccgcccccttttttatcgcccgatctcacacattttggaaggagagagagagagacagagggagagattggagggaggcccctgcccaaggcaagagaaaccgcggcgcgcggagagggaggaagggcagacgcagacgggcgaacaagatgagggagatcatcagcatccacatcggccaggccgggatccaggtcggcaacgcctgctgggagctctactgcctcgagcacggcatcgagcacgatggcaccatgcccagtgattcctcggttggcgtcgcacatgatgccttcaacacgttcttcagcgagactggttccggcaagcatgtgcccagggccatcttcgtcgaccttgagcccactgtcatcgacgaggttcgcactggctcgtaccgccagctcttccacccagagcagctcatctcggggaaggaggacgcagctaacaactttgcccgtggccactacacggttgggaaggagattgtcgatctatgcctggaccgtgtgcgcaagcttgcagacaactgcactgggctgcagggattcttggtgttcaatgctgttggtggtggtactggctctggacttggttcactgctgttggagcgcctttcagttgattatggcaagaagtctaagcttggtttcaccatttatccttccccacaggtgtcaacagctgttgtagagccatacaacagtgtcctctcgacccactccttgctcgagcacactgatgttgcagtcctcctggacaacgaggctatctatgacatatgcaggaggtcccttgacatcgaaaggccaacctataccaacttgaacaggctgatctcacagatcatatcatcacttaccacctccctgaggtttgatggggctatcaatgtggatgttactgagttccagaccaaccttgttccatacccacgtattcatttcatgctttcctcatatgcccctgtaatatctgctgagaaggcctaccatgagcagctctctgtgcctgaaatcaccaatgctgtatttgagccctcaagcatgatggccaagtgtgacccaaggcacggaaagtacatggcttgctgcttgatgtaccgcggtgatgttgttcctaaggatgtcaacgctgcagttgcaaccatcaagaccaagagaactgtccagtttgtggactggtgccccactggattcaagtgtggcatcaactatcagccaccctctgttgtccctggaggtgacctggcaaaggtccagcgtgccgtgtgcatgatcagcaacaacaccgccgttgccgaggtgttctcacgcatcgaccacaagtttgaccttatgtacgccaagcgcgcattcgttcactggtatgtcggtgagggtatggaagagggtgagttctcagaagcccgtgaggacttggctgctcttgagaaggactatgaggaagtcggtgcagagggtgccgatgatgagggtgacgagggagacgactattgagtagctggctaataagtagttctctggtggttaatggttgggttattttgagtatatactctatggttccactccattggatactgctgctgtgtgtgtttccattttgtactatgtagtaaattgttcgtagccccctattggccatgattgttc

SEQ ID NO: 14204 - DNA, 1591 bp, Zea mays
  Clone ID: LIB148-047-F12_FLI
gacttgctagggagatctacaatgatgacaggatgactgaaaatttccccatttgtgtgtgggttgacatgtccaagaatttatcggagctagatttccttaaaacgatcatcaggggtgctggtgccaatgttggggttacagaaaacaaggaggaactcctcatcctcctcgcttctgccctttccaaaaggttcctccttgtcctggatgacttggagagcccgagcatatgggacaatctgctcaaagattcattgggagatggtgttgtcagaggaagaatactgatcacaactcggaacgaggaagtggcaacaagcatgaaggcaactatccaccatgttgacaaaatggaccctgagagtgcctgggcattattgtgcaatcaagttgatgcagaatgcaattcggaagagcttgcaacattaaaggatgttgggattaagattgcagagaaatgtgatggccatcctctagcaatcaaggtcattgcaggtatcctaaggtcaagaggcaacagcaaggctgaatgggagatggttctgaacaatgattcttggtccatgtgcccaatccttccagaagtaccacaagccgtgtatgttagttatgtcgatctttcttctcaactgaaggagtgtttccttcattgctctctgtatccagaagaattccctattcagcgctttgctcttgtgcggcgttggattgctgaaggaattgtaaatgccagagacaaaaaactgcttgaagaatcagctcaagagtattatgtagaattgataagcagaaacttactacagcctgatcctgaaagtgttgagcgatgctggataacacaccatcttctccgctctctagcccgcgctttgatagcagatgagagtatcttaatttatggccagcagaaactgaacacctcattgtcaaagccccggcatctcacattgtgtagcatggaaaacagcttggatggtccaatttcgctgaagcagcagatgggtttaaggtcgctgatgctcttcaaaagcccaaatgtcagagcaatagatcttctcatggagtcagcttcatgcttgcgtgtattagatttgagcaagacagcagtggaggccatcccgaaatccattggtaacttggtacatttaaggtacctcaatcttgatggggctcaggtcagagacataccttcttccattggatttctcataaacttgcagaccttgagccttcaaggttgccaaagcttgcagagacttcctcggtccatcagggcattgctagagcttagatgcctttgtctctatggaacttccctaagctatgtaccaaagggtgttggtaaattgaagcatctcaatcatctagatggtctaatcattggtcatgacaacaatgcgcctgagggttgtgacttagatgaccttaaagcattgtcagaactaaggcaccttcatatagagagtttggatagggctacttccggtgcgtctgcactcgcaaacaagccattcctagaggatctgtacctctctgagcaagcaccagcaatagaaaatcaggaggatctggaggacaaagatgaaac

SEQ ID NO: 14205 - DNA, 1111 bp, Zea mays
  Clone ID: LIB148-047-H12_FLI
tctgaaaaccattcccaggcaggcccgacctcctgcccttgtacaacgcacgcacggtccccgtcccaatggcccagactctgtccgccgcctcggagctggccaccctgaagcgcccgttcggcaacgacgggttcggcgatggcagcaacaacggcagcgcgaccggcgagaagcccaaggcgcggcggcgggaggcggacccggcggcggcgatggccgcggcgcggcacgagttcggcgagcacggcggcgtgaacatgtccatcgaggcgtcggcgacgttcacggtgatggagccggacacgatgcggcggctgttcgcgggcgagctgggccccgaccgcggagacatgtacatctacagccggcacttcaacccgacggtgctggcgctggggcggcagatggcggcgctggagggcacggaggcgggctactgcacggcgtccgggatgtccgccatctcgtccgtgctgatgcagctggtgggcgccggcggccacgtggtggcgtcgcggtgcctgtacggcgggacacacgcgctgctggcccggttcctgccgcgcgcctccggggtgcgcgccaccttcgtggacgccgacgacgaggccgccgtgcgcgccgcggtggtccccggcgagacgcgggtggtgtacgtggagaccatgtccaacccgacgctggccgtcgccgacatccccatgctggcgcgggtggcgcacgaggccggcgccaagctcgtggtggacaacaccttcacccccgtggtggtgtcgcccgcgcgcctcggcgccgacgtcgtcgtccacagcgtctccaagttcatcagcggcggcgccgacatcatcgccggaaaaaagcgtgaaggaaggaaggcccaacgccagttacagtggcccagagtggattcgtaacatggagatggcccaaataccaatcttgtggtatgtcctctcctctcctgcgtgcaggttctttcaaattaaaggcgagctcgccggcgccgcgaagcagattgtggggtggatgttatttctactagttaacctattttttggacggtgtgtagcgaatggcttcatcatgaaatctaaaactatcgtcgttg

SEQ ID NO: 14206 - DNA, 1281 bp, Zea mays
  Clone ID: LIB148-048-C4_FLI
cttttcaagacatgttattagaagtgtaatctatggagaacaaccaagaaataggttggatttgtacatacccaaagataatagcaaatcaagtccagttgtggcattcgtaactggtggagcttggatcattggttacaaggcttggggtgctctccttggaaggcggttagcagagagaggaattatagtagcttgtattgattacagaaatttccctcaaggaacaataagcgacatggtcagtgatgcttctgaggcgatatcattcatttgtaacaatgttgttagctttggaggggatcctaataaaatctacttgatgggccaatcagcaggagcacatatcgcggcctgcgctctcttagagcaagcaattaaggaatctaagggagagaatacctattggaatgtggctcaaataaaagcatattttggtttatctggaggatacaatatccaaaatttggtcgatcactttcatgagcgtggtctttatcgttcaatatttctcagcataatggagggagaggaatcactgccacattactcacctgaaattgtcgccaaaaaattaagtgcagaaaccatatctctactacctcagattgtactattgcatggaacagcagattactccataccatcatctgccagcgaaacttttgctgatgtccttaaacaagctggtggaaaagtagagttacaattgtataaagggaaaacacatactgatgtatttttacaggatccactaaggggcggcagggacaaactggttgaagatgttttatctgtcattcatgttgatgatgcaagtgcgcgtgagagggacgcttcggcacctacccctgagcgcctggtttatgaatggcaaattaaattggcccgccaaattagtcccttctaaacaggtctgtacacagaaaggatttgttccaagacttcaacaagcatgtgttgcaacgtgataaactacgtggggtacatgatattttttgggattttcactgggtcaagcaaacgcagcttcaatctttgtttgcagggcgccagttgccaatgatggcagaagatttgccactgatggaagaaataagatttttgaggggtctctaggctgtaggcagtgctctactatactacacctgtttaatttccttggtttctttttacaaaatatatgaaatcctgatacaattctgtaaatagaatacgaagttgtttcatcatcgtaaaaaaacgtgggcaattcatgtgggaaatgttaaaagtgagatt

SEQ ID NO: 14207 - DNA, 588 bp, Zea mays
  Clone ID: LIB148-048-E10_FLI
gccgcggtcatggacggcgatcatgctgacattcgacaacgcgggcatgtggagcgtccggtccaacgtctgggagcggtactacctcggggagcagttctacatcagcgtcatctcgccggcgcggtcgctgcgcgacgagtacaacatgcccgacaacgccctccgctgcggcaaggtcgtggggctgccgctgccgccatcctacgcccccgcgcgctaaagacgacgaaggcgccgttttcacctcgtgttctgaccatccagtctaactaatccattcctgtgctgctcggcgaaataaaatcatcaaaaagaacaaagacgaaggaagcctagggaagggagaagggacgttgggtgggggtgagccaaatgagaacgcacggatatatctattgatgtaatcttgagatgccctctcaaatcactgtaatggggtttaaaaaacaatcattgtaatgggagttatatatacttttatcttaacatttatttacaccagcaagtcctggtgtatgcatgctgtaccgtgtttactagtgaacactacactggcggacgggtccgcgccaccgcgatcagatt

SEQ ID NO: 14208 - DNA, 1204 bp, Zea mays
  Clone ID: LIB148-048-E12_FLI
cttttttttttgatggaaattagatatatatgttactgagttatacacggtgttaaatgtcacgacgcgcgtgtatacatatccacacgagtacacgacacgcgaggggtttgattattttttgaacataatggtaggagctctgcctctcaattaagaaggaattgacccagttttaagggaaaccgggcccaacagacaacaacaaccccacacagccacacacacaatgtccatcgtgagtcatcgttgcggagatcaacacaagtgacgagcagctccgactccccaagacaggcaacacaaggccgaaggaaacacgacgatgactacgaacaccgcagaagagaaggaagactgtggcacgccgtcgttgccaagccacgagatactccactcgagacaactccgattcttcaccagcgagacttccaaaaccttaatccaccaccccggtttgcacgaagatccgctggcacgcgcaccaccgcaaacgccggcggggccactgctgcccacatgcctacgccacacaccaccattgaggagccagatcctccgctcctcaccgtcgcacagctgacgcccgcccacagtagtagacaaggccgtgagggaggggaggggtggcaaagaagagagcgccgcgccacaatgcatgcacgagccccaaactgccatcgacgcaaccgccaccggccgccagcgccagctgctgagggcagatccggcctacacgccacaaacccaacaccaggaggagcacgcccgccagccagttccaggcccaccacgccatgtgtccgccgccgaaacggcgcagccccgccaccaccagtagatgccgccaatccatcacctggatgcacctgcaggaccagatgttgaaccaccgagcacagccccccgacgacgccggggacaaggaagacgacggcgtgggggacgacgcccgccccagcaaccccgcggctggaacttgaaccgcccggcacagaacccgctcagatctgagcatcggaagaccaaacgaaggagaaatgccggagaaacgccccgtagccgccatctttggaggtcgcgccggccttcggcagtctcctctggcgacggcgaggggggaaatagaggaggagagagtggcggcgctagggctggggggcctcccgtgtcgcccgagcggaggacgacgcgggggctgttc

SEQ ID NO: 14209 - DNA, 965 bp, Zea mays
  Clone ID: LIB148-048-F3_FLI
ggcgagagtgcgtgcgtgcagccacaggcaggcgtcggcaccatgtcttctttcaccggcacgcaggacaagtgcgcggagtgcgacaagaccgtccacttcatcgacctcctcacggccgacggcgtcacctaccataagacatgcttcaagtgcagccactgcaaagggatcctctcgatgtgcagctactcttccatggacggtgtgctgtactgcaagacccacttcgagcagctcttcaaggagaccgggagcttctccaagaacttcacgccaggtggcaagtcttcagacaagggtgaactgacaagggcccccagcaagctatcatctgcgttttctggtactcaggataagtgtgcagcttgccagaaaacagtgtacccgctggagaagttaactctggaaggcgagtcctaccacaagagctgcttcaagtgctcgcacgggggctgcatcctcaccacctcctcctacgccgcgctcaacggcgttctgtactgcaagatccacttcgcgcagctgttcatggagaaggggagctacagccacatgatgaagaagagcccgtcccaggatacgctgccggacatggcagccgacgagcaaccgccggaaccggcgccaccgcaagacggggaaggagaggacaactaggaggaagggaccgccaccaatatatatcacacacacacacacacactcacacattctcacactcaagtctgcgtttgccatttttcttttctttttctctacgacttcgttattccctcctttcatctatctctccgtgaactcggtttgtcgtccagctggctgtaagtgtaccagatgccttcgttacgtctgatgaggctcatgacaatggcgattttggcatggagttgtgttagcctcgcggaaaaactgtaactgtgtaagcagaactgctatatattgttcctaacaatgttgtcctt

SEQ ID NO: 14210 - DNA, 1171 bp, Zea mays
  Clone ID: LIB148-049-B9_FLI
tgtccacgttaagcaatgggtcagcggcggcgtgggaaatccggggaagaagccagtggccgagagacaacagaccgcgtgaggcagcgacagtacgaggcacgccacctagcctgcagagagggtcatctgcacaccaacagggtttgcgacaatgtctagaccttcattctaacagatgcaaccttaaagagtgctgagattcaagaaacactgagcaagatgggtctcgatgccgtggtggccgcctgctacgtctttctagtacttgtctctgtgctcacagttcgcttcttctacgtactgtggcacagtggccaaccagagtcaaggttgtgcaccaccagattgcgttgtctcaatgtccttggctccgaaaaggtccagattaccagctccgggtgatgctgatgagctatctgtcattgaagaccaaattgcatggattgttcacataattacatccattgtcaagaagagcccgcagagaggtcgaggagcagcactagttgtttctctaacgttgatcaaggcaagcacatcaaggggtctcgggcacctccctctcattggtgttgtcgttgaactagttatggtacattggtatggctgcaaattgagagagaaagacctggaaacagtgatgcagcatgttcacacgaagatggcaacaatggtaacatttgcattggtcctgtaaataaggtattgaatatgcttgcttgatggactaaagatccaaactcgaataccttctaacttcataagttcatatcccacgagtctgattacttgtggcttgctgaagatgacatgaagatgcaggaagctaaaattgaaaagatgaaatatgagcatctgacgagggaggctgctttggcagagaaggagcttcttgaagaggagtacaagaaaaagtttgatgaggcaaagaaggaactatctctggagaatgatctagcaggcatgtgggttcttgttgctaagttgaaaagaggggctttagacatatctgatttgaatgttgatgattgaactaaagtgtaagggcgtaccgatcaccacattgttgtctcataattggtgttaatgaaaataacatggtgctacacggaatctctactttctcttgtaagaaggattgtttgtcagcataatttgatttgcatgt

SEQ ID NO: 14211 - DNA, 592 bp, Zea mays
  Clone ID: LIB148-049-D12_FLI
gcaggtgccccggaccccggcgacgcagacgaagctgttcctggaccccgcgatgcccttctacggcgtgaaggtcgacgccgtccacgtggccggccaggccctcgacatccccgccgaggtgtgggaccccaagagcggcggcgtgatcctcgactccggcacgaccctcacggtcctcgccaccccggcgtacaaggccgtggtcgccgcgctgaccaagctcctggccggggtccccaaagtggacttccccccgttcgagcactgctacaactggacggcaccgcgaccgggagcgccggagatcccaaagctggcggtgcagttcaccgggtgcgcgcggctggagccaccggcgaagagctacgtgatcgacgtgaaaccgggcgtgaagtgcatcggcttgcaggagggcgagtggcccggcgtgtcggtcatcggcaacatcatgcagcaagagcacctctgggaattcgacctcaagaacatggaggtcaggttcatgcagtcgacctgcacccggtgatcgtaaagctgacctcgatggttttgttcagagcattcgaagggaaatgttttttctgaacat

SEQ ID NO: 14212 - DNA, 646 bp, Zea mays
  Clone ID: LIB148-049-F3_FLI
agcgccccagccgccgccagggccctcagtggcgtgtgggcgtcctgtcccggtggatagggcacgaacccaagctccggctcaccggtgggtggcccggccaggcgcggtggccgggcgggtgcggcctcctgccccgacctcggctcggcgcgcgcaggcgcctggcagcccccagcctcggcctcggccaggcgcgcgcgacccccagccccggctcgccggctcgccggtcatggtggctccgatccgggctcctccggcatgggcaggcgcgggttcccccggctagcagcctctcctggtgggcacggcctgccccggcggctcaggaaggcgcggcggccccggcgtgcacagccgtggtccagccatggcggcgcgggcacgcagcctcggctccccggcgggcatccatggcgcagtacgggcgcgcagcccggcggctagtctgctcggcggggcagcggccctccgcgggcgtgcgtccacggccaggcgcgggccgggcagacggccctcatccagcgtgcggcagcctctggcgcggtccagcgcagtcgggcctcggccagcatgagcgcgcggcggcctcgacggcgcagacacgagacacggcctcggtacgggatccggccatggcgag

SEQ ID NO: 14213 - DNA, 1087 bp, Zea mays
  Clone ID: LIB148-049-G12_FLI
aaacaatgggtgatattgagaatcataataatccaattcaattcaatgaccgcccctggatagagtcccctaactcgtggagatcactatgtgttgtcacgcaatcagactgtcatgctctgtcacacaatgctgacatttgcaaccttcttgagagaaaaaaggtctcaaagtctcttgagagtgacttcagcaataaaatgaaccagctgttgctaacagctctgcaaaaacaaaggcaacaacggatgatggatgactttggaggatactatgatgaacgcatgtactggagacaaaatgatgaaattcgtgatgctgataaggaggcatctgctccatgttcattagcccctgtcgcacatcttggagctcatcagcaagagagttggcagcattcttcatttggaagtcaacatcaacaccacgataaccaaaatttacttgaaatggaagtcagggtaaggggtgaaatgtcccagattcatcaggaaatatatcaactgcggaagttggtggaaagttgcattgcatcccaagtaaagatgcagcactccattaaagaagaggtgtgcagtgcacttcgtgaggcaggcttgatgcgaagccaacccgacacagcagcagcaaaaaggggtaactgctgcatctgccatcgaatgcaagttgactctctactttacaggtgtgggcatgtgtgcacctgttttgactgcgccgatcagctgaaatcgagcggcatgagctgcccaatctgtcaatctcctattgatgatgttgttctggcgcggttgaatttttgagcttagaatttaggaaaggccaagagaaaaagagccggcactcccagatttagacgtggagtttgcgaagccctggttttgaggcggcttcttacctttttgcttaaccaccactaaagaaatacgagctagttcttggagaaaatgtaaatatgtttttttggcgcaagagcggtgtgcttgtatcgcactaaaggaaaacagagttctaattaaaatgctggttgtattccccgtatgtaccacatcacttgttcacggagagaatgtaatggttctggttc

SEQ ID NO: 14214 - DNA, 358 bp, Zea mays
  Clone ID: LIB148-050-G1_FLI
gacatctgccaggtggtgctggtggccagcccgcgcaaggactgcgacgaggtccaggcgctcagggaccgcgccggcgtcctgctcaccaggaacgttggcatctccgacagcctgcgccccgccaacccgctaggctacttcaaggacgtgccgctccccgtctgcgccgcgctgctcaagcagctggactcggacgacgacgacgaccagtaaactataccacggcggcgtcgcggacatgctgcacaaaactacaacgatacagagcgaacgcatggcatggatagcagtatctacggaaagaaaaggaagaaaaggaaaataaaaaatgtatcagagtgcttgattcacttgc

SEQ ID NO: 14215 - DNA, 616 bp, Zea mays
  Clone ID: LIB148-051-D11_FLI
tcagccggtcgggaacgatgaagaaagatgatgacctcgagtcggcgctgctggccgccaaagagccggcgccggcgcccgccaagggctacgcgtacgcgctcacctgcgcgctcctggcttccctcacctccatcatctacggctacaaccgcggggtgatgagcggggcgcagaagttcgtgcaggccgacctcggcgtcacggacgcgcagctggaggtgctcatcggcgccaccagcgtctactccctcgtcggctcgctggcggcgggctgggcgtgcgaccgcgcgggccggcgccgcaccatcgcgctgtcggcggccttgttcctcgccggctcagccgtcaccgccgccgccgacggctacgccgcgctcatggcgggccagttcgtcgccggcgtggcctgcggattcggcctcgtcgtcgctcccgtctacatcgcggagatctcgccggccaacgctcggggcttcctctcctccatccccgagatcgccggcaactcgggcatcctgctgagctacatcgccgacttcgcgctcgccggcctcccgacgccactcaactggcgcctgatgatcggcatcggcgccgtccctcctctattcct

SEQ ID NO: 14216 - DNA, 796 bp, Zea mays; identical to SEQ ID NO: 12899
  Clone ID: LIB148-051-E1_FLI

SEQ ID NO: 14217 - DNA, 366 bp, Zea mays
  Clone ID: LIB148-051-F4_FLI
gcgcggtatagattggtgatccattagcagcggctactgcagtttcttactagtagtacaaattatacatcactagtttacgcaagagcttgctcaaaaagagagtacatgggattactactcctccctatacatcgatcgatacaagtacaaggcgcgcgcgcagcggcgtgccatgccggttcaagcgcgcggccggccatgtgcgcgcgtgttgggcccgggcacatcaaaagctcggtacgacgccgtagccgaagtcgagcacatatgacatcggcacggcggcctcggcctcggcctcagcgtcgtcggcgtcggcgtccccgtcgtggtcagcacgcttggcaaaccggcccttgattc

SEQ ID NO: 14218 - DNA, 1541 bp, Zea mays
  Clone ID: LIB148-051-G4_FLI
ccgactaccgccgcctcctcgcgcagctatcctccgcgggcctcttcgaacgcgtcggccccacccccaaggtccagctcgtcctgatggccgtcctcttctacgccgcgctgtacctcgtcctcgcatgcgccagcgcctgggcgcacctcctcgcggggggtctcattggcttcgtctggatccagtccggctggatgggccacgactcgggccaccaccgcatcaccggccatccggtcctcgaccgcgtcgtgcaggtgctctccgggaactgcctcaccggcctcagcatcgcctggtggaagtgtaaccacaacacgcaccacatcgcctgcaacagcctggaccatgacccggacctccagcacatgccgctctttgccgtctcccccaagctgttcggcaacatatggtcctacttctaccaacggaccctggcgttcgatgccgcctcgaaattcttcatcagctaccagcactggaccttctacccggtaatgtgcatcgccaggataaatcttctcgcgcagtccgccctgttcgttctcacggagaagagggtgccgcagcggttgcttgagatcgcgggggtcgccacattctgggcttggtacccgttgctggtggcttccctgccgaattggtgggagagggtcgcgtttgtgcttttcagcttcaccatctgcgggattcagcacgtccaattctgcctgaaccacttctcgtccgacgtgtatgtcgggccacccaagggcaatgactggtttgagaagcagacggcaggcacgctcgacatcctgtgctctccttggatggattggttccacggtggcctgcagttccagattgagcaccatctgtttccccgcctacctcggtgccaccttcgcaaggttgcaccggccgtccgcgacctttgcaagaagcatgggctcacttattctgcagccacattctggggtgcaaatgtgcttacatggaagacactcagggctgctgcattgcaggccaggaccgctacaagtggtggtgctccgaagaatttggtatgggaggctgtgaacacccatggataaatgggatgaagatacgggctaatggcaacttctggtgttcagcttggtgcccatgtgattgtctggatgcctttcagttatttagagatattgatcattcaacctgcctgagtcaggttggaattttcgtgttgacaagtggctgtctatccagttggagagttcatgcttcaatagtctggttgttcacgggatgttctgttctccctatcacggtaactatatgatgatgatccttgctttaattcatgaacacttgtttcaagattatgtccattacattttgcttgcattgtcaagattgtggattcttggtgttcatgacgttgtaatgttaatgaacggctggtaacgccatgtggtactggtacccctgtattttcagttgctgtggcaccttggctctctctttgaaaaaccagtatgtatatgacaatgatcaatttattcatattcctaaaa

SEQ ID NO: 14219 - DNA, 755 bp, Zea mays
  Clone ID: LIB148-052-E7_FLI
gcttctcgtatcttgcagctggccttggtcttgggacttctcctaagcatacttcttggtgttggtctgcgcatagggtccagattatttacatccgatcagggtgtactgcatcatatctacataggaataccgtttgtctgccttactcaaccaatcaacgctctggcttttgtttttgatggtatcaattacggagcatcagatttcggatatgctgcctactcaatggtccttgttgccgttgtcagtatcatttgcatcctcactcttgaaagttatggcgggtttattggaatctggatagctctggtgatctacatgagcctccggatgtttgctggattttggaggatagggacggcacaagggccctgggcttatcttcgcggctgaacatagaggcagagctagtaacctgactcaccagcacgacgagcacatggtttattattgttcacggaagtggcagtccttgatgtggtctcgtaaatatgccatacggactcagggtctttttggtttgctacctaacttgtcatactttgcctaacttttctgcttaaggttagttcttcaattcggacaactaaccttaggcaaagtgtgacgcagttagccacgagccaaacagtccctcagttcgtcaaacttaggtctgtgagtttggcggatgtgtaggcactcacatcgttaaacaaatctgttgtactggcctagattgtgacagatgcaaaattatgtcatggttggct

SEQ ID NO: 14220 - DNA, 871 bp, Zea mays
  Clone ID: LIB148-052-F6_FLI
cgaccaaccaccccgcgctcccgccccacgcacgccctcgcgctcaccggcgccccgcccctcccccacgctggccgcacccgcaatggggtgcgcggcgtcggccgccaacggggccgggccccggcggcgggggtgggcgcgggcgcggatgcggcggtacagcgaggcgtccacctcgggtctgccgccgccgccgccgccgccgcaggaggcggcggagtcgtcgtccgggggcaggaggcgagggcgcaaggtggcgccggagcccaaggagccggcggaggaggggaccgccgcgctgccgccgatgcccggctcgcccagcttcaggtactactgccagaagaagacggcggccgtcgacaggatcgtggccgacgccgacgccgccgacgccgatgactccgtcagggtcagagcgacggcgcgtcagctgagcaacaggtgcgaaatcacggcgaccaaggcacacgattctaccgaggttgctcaacctaaagagggaaccagatggcttaggttcagtggcctgtccctcgtcgctaccgcttggcacaacttgatcagccgacaaagaagcaaacattcgccgcctcctgctgccgcaacctctcaaccatgaccaggcagcgctgtacgggatcctcagcttgtaaaaaacacgcacacacacgcatggctcatccatccatccatccatgctacatttgcagtcatttgctgttattttccaatcctggttagttcttgtaagctaaccccgcatccgataagctaatcctgtaaatggcgcaaggagcatcagctctggactgctcctgttgtagagaaaaaaaaatactacagcttagagttggggaaggagggc

SEQ ID NO: 14221 - DNA, 1249 bp, Zea mays
  Clone ID: LIB148-052-H9_FLI
cgcgcgatcgcccgccgcagcagcaatgcctccacctccgccgccggccgcccgcatcagggggcggtgcagcgcgctcagcttcgcggcggcgcgggaccgctgcttcagccaccgcttccgcagggcggggctgcgcccgctcgccgtgccgctccctggcccgggcccaggccccgacgccgacccggccaccaccgtccacatgtgggtgcccgcgggcccgccgccgcggaacccgctgctcctcctgcacggcttcggcgcctccgccacgtggcagtgggcgccctacctccgcccgctgatcgccgccggcttcgaccccatcgtgcccgacctcctcttcttcggcgcctcctgcacgcgcctccccgatcgctccgacgccttccaggcctccgccatcaaggccgccatggacgccatcgggctccccaggttcggcctcgtcggcgtcagctacggcggcttcgtcgcctaccggatggccgccatgttcccggaggcggtccaccgggtcgccctggtctgcgctggggtctgcctcgaggagagagacctggcggagggcctcttccccgtggccgggatcggggaggccgccgcgctgctcgtgccgcaccgcccggaggaggtgcgccgcctagtccgcctcaccttcgcgcgcccgcccctcatcatgccctcctgcttcctatgggactacatcaaggtgatgggctctgatcatatccaggagaaagctgagctgctatacgctttgattaacgggaggcaactctgtactcttccaaaattgacccagccgacgcttataatctggggagagcaagatcgggtgttcccaatggagctggctcacagattgaatcggcatctagaggggaattctcgattagttgtcataaaaaatgctgggcacgcggtcaatatcgagaagcccagggaagtgtgccggagcatcattgagttcttcaaggagccggtcgctggagctgcaaatgcggacgacaaggtgtagtagcttccaccaatggcggacgtggacaggtcttcgctgggcatcggcagacggcgcacccgcttgtggcacgcaaacacaaggcagatacgtggcattgtacatctacatccctctgccattgttctgatgtacttaaagggtgtatgtagagtcattgcagtagcgattcataaagcatgtaacggggaacagagggaaaccatagtggctcaaatccgagtg

SEQ ID NO: 14222 - DNA, 1775 bp, Zea mays
  Clone ID: LIB148-053-C10_FLI
gtggggccatctgagggacctgcacctggcgctgaagctgtgcaagaaggccctgctctgggggaagacatcgacggagaagctgggcaagcagttcgaggcgagggtgttcgagatcccggagcagaaggtgtgcgtggcgttcctctccaaccacaacaccaaggacgacgtgacgctgacgttccggggccagtcctacttcgtgccgcgccactccatcagcatcctcgccgactgcaagaccgtcgtcttcggcacccagcacgtgaacgcgcagcacaaccagaggacgttccacttcgcggaccagacgacgcagaacaacgtgtggcagatgttcgacgaggagaaagtgcccaagtacaagcagtccaagatcaggctgcgcaaggccggcgatctctacaacctcaccaaggacaagaccgactacgtctggtacacctccagcttcaagttggaggcggacgacatgccgatccgccgcgacatcaagacggtgctcgaggtcaacagccacgggcacgccagcgtggcgtttgtgaacaccaaattcgtaggatgtgggcacgggaccaagatgaacaaggcgttcacgctcgagaagcccatggacctgaaaaagggcgtgaaccacgtcgccgtcttggcgtcgacgatgggaatgatggacagtggcgcttacctggagcaccgtctggccggcgtcgacagggtgcagatcaagggcctcaacgcgggcacgctggacctgacgaataacggctggggccacatcgtcggcctcgtcggcgagcagaagcagatctacaccgataagggcatgggcagcgtcacatggaagccagccgtgaacgacaggccgctcacctggtacaagaggcacttcgacatgccgtcgggagaggacccgatcgtgctggatatgagcacaatgggcaagggcttgatgttcgtcaacggccagggcatcggccgctactggatctcctacaagcacgccctcggccggccatcgcagcagctgtaccatattccacggtccttcttgcggcagaaggacaacgtgctggtgctgttcgaggaggagttcgggcggccggatgcgatcatgatcctgacggtgaagcgcgacaacatctgcactttcatctcggagaggaacccggcgcacatcaagtcgtgggagcgcaaggacagccagatcacggtgaccgccgccgacctcaagccccgggccacgctgacgtgctcgcccaagaagctcatccagcaggtggtgttcgcgagctacggcaaccccatgggcatctgcggcaactacaccatcggcagctgccacacgccgcgcgccaaggagctggtggagaaggcctgcctcggcaagcgcatctgcacgctgcccgtgtccgccgacgtctacggcggcgacgccaactgccctggcaccaccgccacgctcgccgtgcaggccaagtgctccaagaggtcgcccagagccgcgcagtaattcggtagtcgtcggcttcggcctcggcttgctacctcccgtcgtctttcattcttcattgctgatgctgctgctgtaccatgggaccatgatctgaccggagacgtcgattcggatttcggacccatccatgcgtggctgggtggggaaacagattgtcggtactgtcactgtatgctttattatacacaaatatattatctatagaaatagattgttaatttgatgagcaaacatatatgcagatatcgatttggtgatt

SEQ ID NO: 14223 - DNA, 797 bp, Zea mays
  Clone ID: LIB148-056-E7_FLI
aaactatggggcaagccttcccacggcttgtcctcctcgccctcgtggcgttgttgtctgccggcctcttcccgcaggcgttagggaacggcaagggcaaggtgcatggcggcggtgccgtcaacccgctggttgccggcatctgctctcgcgccccattcccagaggtttgcacggccacagccgggcgccatgcatccaagtacccggtcatcgaccatttggccgtgctgaacatgcaggtggccgcgttcgccaagcgcacagcgcaggcgcggaagcacgtcgcggtggcggcccgcactattccaccgccgcaggcacaggccctcagaacctgcgacacgatgtacatgaacacgcaggacgccatcggcgcggcgcagcgagccatcgcgttcaaggacacgggcaccgcgaagatcatgctgcagctcgccgtccaggacttcgactcgtgtgaccgtccgttcacccatgccggtgtccccaaccccatgggtaagttcgataaggagctcagccagatggccaacaactgcatggcgcttgcaaacatgatatgaatcatatatatgcggccggggacagtttggcatgtgcttacactccagcgtgaggtggcggcgcgccgcatgcagggaatgcttggacatgaggagcacttggttttcatttaagaattcattgaaattacgagttaggttgagcaaactctgtgtaattgtccctggcctgcatttattccgttgctcatgaaatgagggagatggccattgaatgctagcggttgcttc

SEQ ID NO: 14224 - DNA, 971 bp, Zea mays
  Clone ID: LIB148-056-F1_FLI
ctgacatcaacggcctcatgaccgacatggtcaagttcctgcacgaccacggcgcgcccttcgtcgtcaacatctaccccttcctcagcctgtaccagagcgacaacttccccttcgagttcgccttcttcgacggcggcaagaacatccaggacaagggcggcgtcacctactccaatgtgttcgacgccaactacgacacgctcgtgcacgcgctgaagaaggccggcgtgcccgacctcaaggtcatcgtcggcgaggccggctggcctaccgatggcaacaagtacgccaacttcaagctggcgcggcggttctacgacgggctcctcaggaagctggccaagaacgaaggcaccccggtccggaagggcaagatggaggtctacctgttcggcctattcgacgaggacatgaagagcatcgcgccggggaacttcgagcggcactggggcatcttcacctacgacggcaagcccaagttcccaatcgacctgacggggcagggccacgaaaagctcctctccccagttaccgacgttaagtacctcccgaaccagtggtgcgtgttcgacgacggggccgaggacaagtccaagctgcctagcaacgtccagtatgcatgtgcgagcggcgactgcacggcactcggctatggctgctcctgcaatgggctggacgagaagagcaacatctcctacgcgttcaacatgtacttccagatgcaggaccaggatgtgcgcgcctgcgacttcgaagggcttgccaagatcacagacaagaacgcctccacgcgcggctgcctgttcccggtccagataatcagtgccagtggtcgggtggcgccagctctattgctggcggcgctattggcattgcttgtgattgtgttcgtgtagagtggggatttcgtcacttcgtgtagaactgcgttcgcgtgaccaaaaaaataatatgaattccttgctggc

SEQ ID NO: 14225 - DNA, 536 bp, Zea mays
  Clone ID: LIB148-057-A10_FLI
caggagcaccggaacatgcacatatctcttctaagagtatatacaagagccttagttctgttactgttagagttggacatggggaggcagcaccgcaggagattgagtgcgtgttgccttaagggtagactgcgcaggtgaggtgacaaagagcatgcactgcactgcactgcaccacatatgtgcatcgaaggttgaagacgaccagcacctccggtcagaagagaggaaggagaggcggctggagaaagagagccaggtcagcagggtgttcaaaccgccggcggtaccaacgaatcttcctctttttcttcttttgcttgaatttatgccttgtgacgtgcatctggaggcacgactgatcacaaaagaatacgagtttttttaaagtaacgcagcgcgaaagggaagattcttcctgctgcggattgcagtgggtgtacgctgtattatgtatgagtcgtggctccgtcgtgcctccagctaacgaggccctgacatgcatctgctgcattgctacacgttcgttcgtgttc

SEQ ID NO: 14226 - DNA, 883 bp, Zea mays
  Clone ID: LIB148-057-C7_FLI
gcgagagtgcgtgcgtgcagccacaggcaggcgtcggcaccatgtcttctttcaccggcacgcaggacaagtgcgcggagtgcgacaagaccgtccacttcatcgacctcctcacggccgacggcgtcacctaccataagacatgcttcaagtgcagccactgcaaagggatcctctcgatgtgcagctactcttccatggacggtgtgctgtactgcaagacccacttcgagcagctcttcaaggagaccgggagcttctccaagaacttcacgccaggtggcaagtcttcagacaagggtgaactgacaagggcccccagcaagctatcatctgcgttttctggtactcaggataagtgtgcagcttgccagaaaacagtgtacccgctggagaagttaactctggaaggcgagtcctaccacaagagctgcttcaagtgctcgcacgggggctgcatcctcaccacctcctcctacgccgcgctcaacggcgttctgtactgcaagatccacttcgcgcagctgttcatggagaaggggagctacagccacatgatgaagaagagcccgtcccaggatacgctgccggacatggcagccgacgagcaaccgccggaaccggcgccaccgcaagacggggaaggagaggacaactaggaggaagggaccgccaccaatatatatcacacacacacacacacactcacacattctcacactcaagtctgcgtttgccatttttcttttctttttctctacgacttcgttattccctcctttcatctatctctccgtgaactcggtttgtcgtccagctggctgtaagtgtaccagatgccttcgttacgtctgatgaggctcatgacaatggcgattttggc

SEQ ID NO: 14227 - DNA, 531 bp, Zea mays
  Clone ID: LIB148-057-E3_FLI
ctcgatccatcaattgcaagaggagcaagataccaccaccgtagcaccacacgcaggtacgaagaaggcgacgaacatggcgaggctggccttggtagcggcggtggttctgtgcctcctgttagcgacagggccgcagggggccatcagcgccgaggggatggtgtcatttgacaatttgatcagctgcaaggtactgggcaactgcgacaagaacctgggccccgaggcctcccgcccagggaaacccgccaacgactacacccgcggctgcaacccgatcaccggctgtcgcggctgatcatatctctctggtcgatgtgcgcgcaatgtcaatgtcgcacgcgcgtgcaggtaccaggcctcagcgtgtggtgccgcgtgtgtgtatatattacacacatgcattatacattggtcgtcgatcgttactgtatgcatggcaactgatgtttcttgcctcgcatatctgaggtgtatactgatgtatgtggctcaacttttgatgattaatgtataagtatgacaacc

SEQ ID NO: 14228 - DNA, 723 bp, Zea mays
  Clone ID: LIB148-057-H10_FLI
tgacttccaaggatatacaggaaatggcacccttacatctgtattggcacggcttggtgaattggaggagaaggtacaggcaattgaagcaaagccatcccaagtgccatttgaaaagcaggaattgttgcatactttcgttaaccgcgtgggtgtgttggaagctgaactaatttctatgaagaaggtcttgtatgagacattggttcggcaggatgagctgcttgcatatattgaccaacgacgggcagccaaattttgtcggcagaagttctgcttctgagtgctgaagtacctgccacctatgttcttctattcggagttggcatgctgctattgtggacacagaatacttgcaaatatcttcatattttgttgcggtgtaaagaattgcaatatttagacaaagatgggattgaaaagggttgcttctcttgacaccttgtttcaacggaaaaaaagagaggaatgctcgatatcttgtgcacattttcaagcagataaaggcgtaatttttttctagtatttggtgcaaggttcgaactgtctgtaactctatagtgcatatggcgtgtgtttgtttggtggatgtggatggggctcgattgtatatcttggctgagggatacagactgagtgaaaaatgtcggacctcaccccttgtcgcggaaatgagagggaattgaactggaacaaggaacaatgaattgtaaaatgttttgt

SEQ ID NO: 14229 - DNA, 597 bp, Zea mays
  Clone ID: LIB148-057-H8_FLI
gctactcagagggacactgtctcggcccggccaattgcccggccggaccttcgcccatgatcacagggagaacatcctttgcttcccatggccatgaagaagaaccaagactcccagttggtcatgggccggtacaggctgggccaactcctcggcagcggcaacttcgctaaggtgtacaaggcccataaggtggccaccggcgaggctgtggccgtcaaggtgctggacaaggatgctgtgcaccgctccggcatggcggagaaggtgaagaccgaggtcgacgtgatgcggcgcgtgcgccacccgaacgtcgtccgcctccacgagatgatggccacgcggtccaagatctacttcgtcatggaatacgccagcggcggggagctcttcgcgcgcctcgcccagagcacgcggttcccggagcccgtggcgcgccgctacttccagcaactgatgacggccgtcgagttctgccacagccgcggcgtgtaccaccgcgacctcaagcctgagaacctcctccttgacgcgcgcggcgacctcaaggtctccgactttgggctcagcgcgctgcaggacggccgtggcggccgc

SEQ ID NO: 14230 - DNA, 982 bp, Zea mays
  Clone ID: LIB148-058-A9_FLI
gtccgtggagagcggcaagttctggttcccggctcaggtctacaaccgcgagcatgggcatgttgggttcatgatgtcatgctatgatgcagcgctcagttacgatttccatacggacacattccgtgcaaggtacccaccacacggtcgacgaaccgtggtgttggaggatggcgtgcaatgggacagggtgagggcaccgcctgttgacacccttgcgcatgacctgcacacctctgactgcctgcatgagctccggcccggcgaccacatcgagattcagtggagaaggaacaaagaattcccatacggctggtggtatggagttgttgggcacttggagtcatgtgatggaagcgaacacttttgtcggtgccatcttagtgataccgtggtgctggagtttaatcagtacacgccgggctcaaggtggaggcaagcgttggtgaaacggaaggagcatagggaggagggcaacgagggcgacgggttctacggcggcataaggaagctccgcggcaacgatgacatctccaagtggaggcagctgtggccaacagacgtcctggagtaagcaggaaccgcatcccttctcacaccgacattgatccatcgctcaaatgacacgcctttctttcatcatcatattgaccaaattcgtcgtctctgtcgcgctgttgtaaacgggttagtagaagaacaaatcccgtagctggacaagggtgtaacacttactctctccgtttcgttttagttgtcgctggatagtgcaaaattgaactatccagctacaactaaaaagaaacggatggagtatttgttaggcgtaccaggcgcagactgcttcctatttgttcgtggggctgtaactgtaagccttgtttgtgacccctaagcagtctgcgtcttgtgcctgctgctgtagcggtagagcagagagagatcaaatgtaaattacatttttttagctcaaattcacgac

SEQ ID NO: 14231 - DNA, 1686 bp, Zea mays
  Clone ID: LIB148-058-E5_FLI
cgccgccggtgaccgccccacctcctccgtcgccttcttctccgccgggggcgggctcggcctcggcccctccagcctgctgctccacctgctcctcctccactccctcttatagcctccagcctcccctcgcctcccgccaccccctatggccgccgttttcttccaccacgtcgtcggcgacctcaccgtcggcaagcccgaggtcgccgagctgcacgacaccgacacgctcgacgacgccgcgcgcgccatcgccgccagccccgagggcgccgtgcccgtctggcgccccagggccgcgccggacgacccgccctcgggggccaggttcatcggcatgatctccgcgctcgacatcgctgccttcgtcgcctccgcgggggtcggggatcgctccatgcgcgccgtcgtcggcgaggtcgtgcagcccaatcctgcgctgctcagggagatcgatccgggtaccaggttgatcgatgctctggaactgatgaggcatggagtgaagcgctttcttgttcgcaagagtgggagctggaaaggcattaccaagagattttcagtgctttataatggtaagtggctgaagaacatggaatcaacatctccaagtgcagccagcagcagcagcacgcagctatccccacgttctggttctgcagaaaagttctgctgcctatcaagggaagatgttctccggtttctcattggatgccttggtgctcttgctcccatcccgctgactcagatatcttcccttggagccatcaatccgcagtacagttacgtggaagcatctgcgcctgcgatggaagcaattcagaagatccctcaagacccatgcgccgttgctgtagtggagacgatgccagatggaactcgtagcatactaggagacatctctacttacaagctgtggaaatgtgactatgtttcagctgcatgggcactggcaaacctgtcagctgggcagtttgtcatcggtgccgacgagaatgggtcaacacccatctcagtcttcccagagcctcccatcagcccatcgtcaccggtggaggagatcagtcctgggcgctcgccaagggcgaagaagttcagcagcaggagcatcgggtttctgaacaacacccagatgtcagcgtggcggacacggagcatgtaccaccggggcaggagcaccccactgatgtgcaagaccacaagcaccctcgcggccgtcatggcgcagatgttgtcccatcgggccacacacgtctgggtgacggacgcagagtcggaggaggacggcgtcgtcgtcggcgtggtgggctacaccgagatcttcaatgccgccaccaggagcacctgcccaagtccgacagcatcttgatgcaccacatcgtgctgtacagtatactgctgttggttgatccgttggtgccccggtgcacgctgttgcactgaactgtacaatgtactttgctcatttgttggtttgtctggagagtttttagtcttttagatattcttggtctgcatggagcaggacttggtggtatattgttgcattcgttgtggacggtacgaataagaattcgggtttgcctcggagtctagtccattttgcatgctcgcctgcagcagtgcagctgtcgatgtactctatgactgtatatggaaatggaatgttctctgtttcctttc

SEQ ID NO: 14232 - DNA, 427 bp, Zea mays
  Clone ID: LIB148-058-E7_FLI
tggtcaagatgtactggggtgacccgagggagaaggtgtgcgacgcggtggaggagctccagatcgagtcgctcgtcatgggcagccgcggcctcggccagatccaaaggattctgctgggaagtgtgacgaactacgtgctgtccaatgcgtcatgccccgtgaccgtcgtcaagtcgaagtagtggctctggcctttcatttccagaaagatgaatctgcagctaacctatacgcaaaccgaaacaactaaatccgatatattgcaccttacgtttcagctgttttcactccatgatttgttttatttttctagatgtacctggacactgttgttttcgtgaaaaaggctgccagataaactgccagcttgtatcactacatgagaaagtcactggacagcatcactataccatttctttttaac

SEQ ID NO: 14233 - DNA, 950 bp, Zea mays
  Clone ID: LIB148-058-F3_FLI
gtccggtccggttctcttcgccgcggcggcggatggccctgccgctctacggctgcaggtcctgcgctgtgcatgatgccatcatcttctgccactgctgtgacgccaggctgtgcctgcactgcgacgccgccgtgcacggggctaccgaggcgggggcgctccacccgcgcgcccggctctgcgacgcgtgcggcgccgcgccggccgcgctgcgctgcgacggcaccgtgacgctgtgcgccgtgtgcgtcggccgcggtgctcccggcgtgacccgcacccgcgtggccacgtacaccggctgtccgggccctgctgagatggtgcgcctcatttccgtagacccaccgcagctggagcaggactttgaggcctggctcgcagacaagctcccgcgtttggtcgtggaggaggatgttgggctcccgccagactgggatgtcgccgtggaaactgcaaggcttgagaagatgctggcagaatgctgtgagcctgagactgagataaatttgatgcaggaagctgaccagcagcgactgcagatgcagatgctgctgcaagatgcaagcgctatggccaagaagcgagaggggagagagagggccaaacaaagatatatcgagaagaggaagaatagaaggttctgcaagcagatcatgtatgcttctcgtaaggccagagcagacacgagatggcgagtgaaaggccgctttgccaagcaggcttccgctagcttctagtgatctccctgatctgctttcacagtcatttttgtgttgtcatctcgctcgcactttgctcaatccctcttcggcttcaacaacaaatttctcttgggtaatttattttccataattacatatattttccctgcttgtcagatgtaatatttttctttccttttattcaagaactaaatgcaattcaatacgtatgtggatcggact

SEQ ID NO: 14234 - DNA, 1357 bp, Zea mays
  Clone ID: LIB148-058-H2_FLI
cgccgtcccgctccctctcccgccagccgccgcctccgccggggggcccaccccgccgggcgtcaccgcgcccgcccccgcggcgcagcagcagcagcagccgcccccgctcgcggagctggagcgcgtgcgccgcgtcggcagcggcgcgggcgggacggtgtggatggtgcggcaccgcggcacggggcgcccctacgcgctcaaggtgctgtacgggaaccacgacgacgcggtgcggcggcagatcgcgcgcgagatcgccatcctccgcaccgccgagcacccggccgtggtgcggtgccacggcatgtacgagcgcggcggggagctccagatcctgctggagtacatggacggcgggtcgctcgacggccgccgcatcgccgccgagccgttcctcgccgacgtcgcgcgccaggtcctgtccgggatcgcgtacctccaccgccgccacatcgtgcaccgcgacatcaagccctccaacctcctcatcgactcggcgcgccgcgtcaagatcgccgacttcggcgtcggccgcatcctcaaccagaccatggacccctgcaactcctccgtcggcaccatcgcctacatgagccccgagcggatcaacaccgacctcaacgacggcagctacgacggctacgccggcgacatctggagcttcggcctcagcatcctcgagttctacttgggcaggttccccttcggggagaacctcggcaggcagggcgactgggccgcgctcatgtgcgccatctgctacaacgacccgcccgagccaccgcccaccgcctcgcgcgagttcagggggttcatcgcctgctgcctgcagaagaacccggccaagcgcctcacggccgcgcagctgctgcagcaccccttcgtcgccggcccgcacccgcagcccctcgctgctcctcccccgtcatgaccacaccaccatttcggcgggttgggagttgggaccaaagtacggatctcgtctcagtttggcctccctcccttggctgcaggcagtgtgggactccaatcaatccggcgttcccttggatacaatacacggatctgatccctgatgtatcaagggaatttgctggccaatttcgggttctatcctccatcatcgacgtccgcatccatccatggttgcttctgctgcagttaaggtctcctaccaattttgagtgctgtgtccatctccaattctccatcatcaattcatcaccacggtcgtcctcaacccgctcctcgctgctgcgatttaaggtttctttctccttcctgttgtttgatgctcttttcttttttacttccagcgatgatagcataacgagaaagagaaaaaaaaaag

SEQ ID NO: 14235 - DNA, 1029 bp, Zea mays
  Clone ID: LIB148-059-F10_FLI
gacgacacggccctggacgcatcctccccgggcaccgacacgcagcgccgcctgctgtcccgcctcgcctccgactggctcgccctgctcctcttcaagtccgcctacctcctcgcgctcctcctgctctcgctcctctccgtcgccgcctccgtgttctccgtcgcctccgtctactccgccaagcgcgacgcgctcaccttcccgcgcgtgctctccgtcgtgccccgcgtctggcggaggctcgccgccacgttcctcgccgccttcgcgctcctcttcgcctaccacgccgtcgccgtgctcgtcttcgtcggcctcctcgtcgccgcggacaacggctccggcctcgcgggcctgctcgccttcctcgtcgccgtcgcctacctgctcggcctcgtctacctcggcgtcgtctggcacctcgccagcgtcgtctccgtgctcgaggaccacaagggcttcgccgccatgcgcaagagcaaggacctcatcagggggaagctcgtcaccgcgggggccatattcttcacgctcaacgtcgtcttcgccgccgtcgagctcggcttccgcgcctgggtcgtcaggggatccggcgccgcgtcgtccaggctcttgctcggcctcatcatgctcgccgcgctctgctgcgtcgtcatgctcgcgctcgtcacgcagaccgtcgtctacctcgtgtgcaagagctaccaccacgagagcctcgacaaggccaacatctccgaccacctcgaggtctacctcggcgactacgtcccgctaaaggcgtccgacgtgcagatggagcagttccagccaggtaatctgtaattgtgtacgtacagcaggcagcaggtgatgaacatacttgcgttaagtaggaagaattgggaatttttgtcttgggtgtacaagaataatggggatctgtacttcccttagtttcttcctcaaggacatggttccttcccttgtttacatgatatataaacaggagatgaatggaattgggcatgccgaatttacaaactt

SEQ ID NO: 14236 - DNA, 773 bp, Zea mays
  Clone ID: LIB148-059-G3_FLI
agagtagtactggacagaagcaacctcctgttcttgtcatagtgttgcagtttataactgcaatggttgttatggacacatggcagtacttcatgcacagatacatgcacattaacaagtttctgtataaacacatccattctaagcaccatactcttgtagtcccttattcctttggagctctatacaaccatcctcttgagggccttattttggacaccattggtggtgcactctcattcctcgtctctggtatgactccacggacatccatattctttttctcctttgcaaccatcaaaactgtggatgatcattgtgggctgtggcttcctggtaatatcctccaggcgctgttcagcaataacagtgcttatcatgacattcaccatcagctctatggaaacaagtacaacttttcacaacccttctttgtgatgtgggacaagattctcggaacttacatgccctactctattgaacaacgaaaaggaggggggatcgaatcaaaaccagctaaactcgactgagctgaggataccaagactgattagtacatgcatgcacagtttctatttttttttgacttgtccaatactcatgccttgtggtactgctgactgcgcaaatgatgtacacaccctgtgtcataacttcatatagtgaggctgcttttgctctctacatttcttgttttgttttttagggtgttctatcttgtaacaagatacagtgagtaaagtattgtaatgtaccaaagaatactcaacacc

SEQ ID NO: 14237 - DNA, 977 bp, Zea mays
  Clone ID: LIB148-059-H3_FLI
cgctggccgccgccgtcatgtcgctcagctactccaccatcgcgtggggcgcgtcggtggacaagggcaggatggcgggcgtggactaccacctgcgcgcgaccacgacccccggcaaggtgttcggcttcttcggcgcgctgggcgacgtggcgttcgcgtacgccgggcacaacgtggtgctggagatccaggccaccatcccgtcgactcccgagaagccgtccaagaagcccatgtggaagggcgtcgtcgtcgcctacgtcgtcgtcgcgctctgctacttccccgtcgcgctcatcggctactgggcgttcggcaacagcgtccaggacaacatcctcatcacgctcagcaagcccaggtggctcatcgcgctcgccaacatgatggtcgtcatccacgtcattggcagctaccagatctacgccatgccagtgtttgacatgatagagacggtgctggtgaagaagctgcgcttccctcccggtctgacactgcgtctcatctctcggaccgcctatgttgcgttcacaatgttcatcgccatcaccttccccttcttcggcggactgctcggcttcttcggcggattcgcctttgcaccgacgacctatttccttccctgcgtcatgtggctcgcgatctacaagcccaagaggttcagcctctcgtggttcaccaactggatctgcatcattctcggggtgatcctgatgattctgtcgccaatcggagggcttcggcagatcataatggacgcgaaaacgtaccagttctactcgtaaactgctaccagacactgagtttttttgtcgtgccaacaacagaggggaacttcctggtaccatgtataagctgttacagatgttgggttagttatatatatacatgcatacgtattgtttcttaatgttccaaggtgaccgtgggttgtgtatatggtaaaggagaatcgatgatgatggttgtcccag

SEQ ID NO: 14238 - DNA, 756 bp, Zea mays
  Clone ID: LIB148-060-E1_FLI
atcttctccgatccatcaacaatcgccgagagcgatcgagagataaataaagatgaagaaagtggcatcatcgtcagccgttctcttcgtgctagccctgacgctagtttgtgccccgctgatagcagaggcaaagaagaagagagtcgccgccgccgccgccgaggagaagaaggtgcaggacaacttctgctcgacactgtgcgagggcaggaaggggatggacctggtggtgtgcaaggagtcctgcgacctctcacagcgctccaacctggtgctgtacggccggatccagtgcaagggcaagtgcaccgagcagaagggcatcaccgcgccgcagatgaaggtgtgccaagaggcgtgcgacaaggactacgtggtcaaggcggctgaggtcaccaaggcctgcaacaccacctgcgccaaggagaagcagcctctgctcagcgagaactgcaggaggtcctgcacccctcctccttcctgaacgcagagcacgcccgccggtcgtcgtcttctgcctgcttgcgtgacactgaatcactgatacatcatacatgcatgcatgggatgcgatgacgatttgatgcatgcatgcatgggtatacctaccaatttgatgaccgacgatgtatagtttcgtcgactgcttcatacacatatatagcagcccaattaatgtaacgtcacgcaaataagcatttgcggtaattttttgtctcgttgattcgatgaataaagggcatgcttgagagt

SEQ ID NO: 14239 - DNA, 1243 bp, Zea mays
  Clone ID: LIB148-060-F1_FLI
ggggtgcgatccgcgatgctggcgcgggggcaaggggggtctcggtttgaattagttgatttcgcagttcagggtgcgcatctgaagggtgcgccaggtgctcttgctgtgtgatctttgtcgccttgtgacgctggggaccgggttattggcgggagtttgtcagaataatacataaagaactggtgccacgagatcgggggacttcagatcagggaaaccttgagccatgggcacagttgtggatgccgctccagcagttgtggctgaggtcactgagaacatgttgggtggcaagaaagttacagttgtatttgtcctaggtggtcctggaagtggaaaaggcacacagtgtgccaacatcgtggagcactttggattcacccatcttagtgctggagatcttctgcgtgcagagattaaatctggctctgagaacggaaccatgattgagaacatgataaaggagggaaagattgttccatcggaggtgactataaagcttttgcaggaggcaatgataaaaagtgaaaatgacaaattcctgatcgatggatttccaaggaatgaggagaatcgtgcagcctttgagaatgttaccaaaatttctcctgcatttgtgctattctttgactgttctgaagaagatatggagaaacgactcctggggcgcaatcagggaagggttgatgataacattgaaactatcaaaaaaaggttcaaaacctttgttgactcaactctgcctgtcattgagcattacaactcaaaggacaaggttaaaaagattgatgctgcaaaaccaatccccgaggtgtttgaagacgtcaaagccatttttgccccatattctctaaaggctgaatagagcaatctaagggacatgataaaggtgatacatggtgtctaggcaccacataaacatatctgtgattatgatggaccctttaatatagaacaaaagttttggctcatttgagctaccagcgtaccagtaggcaattcgatttgttaccagcaacaagtgatctgattcccagtggtcctgctagagtaacattttttaccactgtctgttgtctatgtatcctttgatattgtgttgtaccaatgtgcaatttactctatggactgatggaacattgtgccatcccatccaccagatttattgtggcgttatggaaagcatagaaccgctgccatattctttaatttgtacgctgaaatatactcgttggcaccg

SEQ ID NO: 14240 - DNA, 828 bp, Zea mays
  Clone ID: LIB148-060-F5_FLI
ggaagcgtgggccggggccgggaggagcggtacgtgctccccttcgaccccaccacggagttccaccgctactccatcctgtggacgcccgccgccgtggccttctacgtggacgacgtgccggtgcgcgaggtgcggcagtcggccgccatgggcggggacttcccctccaagcccatgtccgtgtacgccaccgtgtgggacgcctccacctgggccaccgccgggggccggtaccgcgtcaactaccgctacgggcccttcgtcgcctccttcaccgacctggccctcctcggctgccgcgttgacgggcccatccagcagacgacggcggagcggtgcgccgcagccgccgaggcactcagggcgtcggacgtggccgtcatgacggtggagaagcagcaagccatgcgcaggttccgggagcgcaacatggtctactcctactgctacgacacgctgcgctaccccgccgcgttccccgagtgcgacgtcgtcgagtcggagcgcaggcggttcaaggacaccggacacctccgcttcgcgctgcggcggcggatgagcccgcgacgctcccacggcagggcggccagcagggacagggtcagggagctcaagaagcgcgcggcggacatgtagcattcgtgtagactgtagtagcggtcggcgatggtaatggatattcacgcctgccgctgttaatctattggatacgaatacgatacgcatcgtacagcatcacagttcacaggagtagcggaatggcgagggcgaaaaaaaataccttttgtcttcaacttttaaatttaaagaatatatctagcacat

SEQ ID NO: 14241 - DNA, 512 bp, Zea mays
  Clone ID: LIB148-060-G11_FLI
ggcaaccgtgtgccttttggagacgcgatgtcgtccggcaacaagatcagcgtggccttgctgagcgtggccctagtgggcctgctcctctgccacctcgccaccaccgcctccgcccaccagaaagacatccacgtcctcggcagcgtcgacggctccagcgacggcagcagccccgagtccgaaggccgcgtcgtctacgcggacatgaagctggctgatacggaatccgatgcgccggcgccggcgccggcgccggggccgtcgtccggttgaactgagaagcgtgcgtccagccaagcaaggtggtcaaaaccgagaactaattaagggctcgatcgtgtgtcaggctactactgttcttgccataattatatatagatacgcaaagtgtggccaagcctacccacatgcatgctattgcatgcctccgaatatatattatccgactcgatcctgccaaattgtttcgtcgacttcattatatatattccatccctttaatttaatgg

SEQ ID NO: 14242 - DNA, 741 bp, Zea mays
  Clone ID: LIB148-060-H6_FLI
gccggccgggcggcaccgccatcggagtacgtacacacgtcctgctgtcccgcatgccaccggccgggggagaaaaccaacagccaagccaagcccacattgtttccgcagctaggtagaggggcaaaggaggagtatagcggagaggttgatgcgtgacggaggaggcgccatggacgtcgacatgcaagcccgcggtggcggtgctagccatggcggcgaacttgacgacgacggcaaggagaagaggacagggacggtgtggacggcgtcggcgcacatcatcacggcggtgatcgggtccggcgtgctgtcgctggcgtgggcgatggcccagctgggctgggtggccgggcctgtgatcctgctgctcttcgcggccatcacctactacacctcctgcctcctcaccgactgctaccgcttcggcgaccctgtcaccgggaagcgcaactacacctacactgaggccgtcgagtcctacctaggcggcaggtatgtctggttctgcggcttctgccagtacgccaacatgttcggcaccggcatcggctacaccatcacggcttctgccagcgctgcggctatcctcaagtccaactgcttccactggcacgggcacgacgccgactgcacccagaacacgggctcctacatcgtcggcttcggcgtggtgcaggtcatcttcagccagctctcaaacttccacgagctctggtggctctccgtgctcgcggccgc

SEQ ID NO: 14243 - DNA, 763 bp, Zea mays
  Clone ID: LIB148-061-B1_FLI
ctcgtttctcattcagcgcccgtacagccaccactctcaaccgagccatatccaaagttctcaacatcgcttcgtgcagcctgcatcggtcgacgagggctgcacgaacgatggggtccgcctccgcctcagtgacgacaaccagcctgctggcgctggcgctggcagcgctggctttcgtctccagggccgcggcgcagggcaacggctgttccagcgtgatgatgaccctggccccgtgcatggacttcatctccagcaaggcgtcggagccggggatctcctgctgctcggtgctggccggagtcgtgcagaccgacccccgctgcctctgcatggtactggacggcactgccacgtccttcggcatcgccatcaaccagaccagggcgctggagctccccggcgtctgcaaggtcaaggcgccgccgctcagccagtgcacaggcgtccctgcggcacctgcaccgacgcctcccgacgagccagcagcggcagctgaggaagaagccgacgcagctgcagatgccccttcagcaaatggagcctcaagctccacaaactcaaagaatgcagcgagcttactgcttctcatctgcgcattgctgtatgccttctaataagtggtgatacaacttcgctggccatgtcaccgtgcaggaattaggtctttccctgagtcctgactatgtacttacccatgattctcggcaaattttttgtatggtatggtatgggtttctgatgtgccacatcaaacaac

SEQ ID NO: 14244 - DNA, 938 bp, Zea mays
  Clone ID: LIB148-061-B12_FLI
cctcgctgctctgattctcgtcgtcgccttggcgacgtgtacaaacaagtctgttgatgcccgcgtggtccaccccatcgtcaccctcgaggccgatggctcatctcccacctctggcgatggtcgtcgcctgatcagctccaccaaccaagatgaacttggagcgttatgccaacagatgcactacaagacgttgtgctccacgatgacgacactgcctggggtgactacgccagagcaactcttagatgcatccctgcggattacagcggtgaaggcagcgatggcggagatgaagctagacaatgcaataaaatcaggcagtgctcagggtaacccgatgatgtcgtcgctaaagacatgcaaggagagctacgcgtcgctggtagactccatcaataccacgcggaacacgctcaaaagcggcggcagcaatgcagacctcatgtcggagctatccgcggcggacaccttcgccaccgactgcggggacaccttcgacgagcgaccagacctcaactcacccatacccggtgcacagcgccacgtcaaccgcctcatcagcaactgccttgacctagcagccaccattaaggaacaaccctagatgcctatgatgtggacactgaaaaaatttatctacaactggctgaagaagaaacagtcccacaacctacttcaaatttacgacatgtctgcacataccaataattgtgtggcttatcgattttggctctttttatatcctttgatattgctggggcataaaaagcaatcatcggttattagtaggtggatacgtgtcgcaaatccaaagaaggttgtatgactgtttctctgtagccaactatagaactagaccgcttgcatgcatgtattgacgaggacacacagtgttagcatggtacattatatacatctagtgtacattgctctgt

SEQ ID NO: 14245 - DNA, 851 bp, Zea mays
  Clone ID: LIB148-061-B5_FLI
ttcctcgaccaacgcaaatctgcctcgggacgaacaatgcgtcgtcgtccatcgatcatgaggcgtctccgacggagctaaaagagaccgatcagtgagcggtggtggattgaagaatcgagggcgaggaggaagacagggaggatggaggaggtggagcagcagctgaccaagaaacagatcgaggagttccgggaggcgttcagcctcttcgacaaagatggcgacgggacgatcacgaccaaggagctgggcacggtgatgcggtcgctggggcagacgccgacggaggaggagctgcagggcatggtggacgaggtggacgcggacggcagcggcgccatcgacttccaggagttcctcaccctgatggcgcgccagatgcgggaggccagcggcgccgacgaggaggagctgcgcgaggccttccgcgtcttcgaccaggatcagaacggcttcatctcccgcgaagagctccgccacgtcctccagaacctcggcgagcgcctctccgacgacgagctcgccgagatgctccgcgaggccgacgccgacggcgatggccagatcaactacaccgagttcaccaaggtcatgctcgccaaacgaaggaaccaggagctggaagaccatgggagtgagtcatctcactccaagagactctgcccctcctgtacaatcctctgaaactctactcactctgccaccttagtttctagctgtcaggagaaccaaatgtaactaacagcaagcaaagcaagaacctgcatgatttgcggtgtacatggtacaaaaaaaaagactactgaaatgatggccgagtactaatacgagttcccaattcagtagtc

SEQ ID NO: 14246 - DNA, 765 bp, Zea mays
  Clone ID: LIB148-061-C9_FLI
aatgatgtcctcagctccatgcacaaggatgctggagaggcaggagaagtaaagagcgcagaaggagagttcttattgcgtgttgatggtggtgctactgttaataatcttctaatgcagatccaggctgatttattaggcagccctgttgtcagaccagctgacatagagaccacagccctcggagctgcatatgctgctgggttggctgcaggagtttggaccaaggagaaggtttttgcaggtttgcacaaggagaacacgacagtcttccgcccgaaactggatgaggcgcacaggaaaaagagggcggattcatggtacaaggcggtttcaagatcattcgatctggctgatctttctctgtaaatttatcctgccagcgctcctctatctggttttggaagctgcaaatgaataaattggtcttcgctgggactaatcttaactgcttgttatttatatataacatcacgatgtttataaaagtgagtacatgaatatcctcagattttcagcaggaagtgtttttctagaatatttatgtgtgcttccatagacccggatggttgactgtttgcttcaaattaaagccgactatttggactgctacaaccataatttatagagataaaaatattgtagaagcagtaaaagctggtacgggataaagccaagcgaacaaccaatattgaacaaaggaggcgggaaatgatagaagaaatacattatgcataagatcgtgcttctgctggctgtttcatc

SEQ ID NO: 14247 - DNA, 438 bp, Zea mays
  Clone ID: LIB148-061-D7_FLI
gaagggcatcaccgcgccgcagatgaaggtgtgccaagaggcgtgcgacaaggactacgtggtcaaggcggctgaggtcaccaaggcctgcaacaccacctgcgccaaggagaagcagcctctgctcagcgagaactgcaggaggtcctgcacccctcctccttcctgaacgcagagcacgcccgccggtcgtcgtcttctgcctgcttgcgtgacactgaatcactgatacatcatacatgcatgcatgggatgcgatgacgatttgatgcatgcatgcatgggtatacctaccaatttgatgaccgacgatgtatagtttcgtcgactgcttcatacacatatatagcagcccaattaatgtaacgtcacgcaaataagcatttgcggtaattttttgtctcgttgattcgatgaataaagggcatgcttgagagt

SEQ ID NO: 14248 - DNA, 1238 bp, Zea mays
  Clone ID: LIB148-061-F5_FLI
ggctgtgcaggaggcatgggcatcggcgtgcggcggcactgggaagcagacaatcctcatacccaagggtgacttccttgtcggacaactcaacttcacaggcccttgcaagggcgacgtgaccatccaggtggatggcaatctgctggcgaccacggacctaagccagtacaaggaccatggtaattggatcgagattctacgcgtggataacctggtcatcaccggcaagggaaaccttgacgggcagggcccagccgtgtggagcaagaactcctgcaccaagaagtacgactgcaagatccttcccaactcgctggtgatggacttcgtgaacaacggggaggtgtccggggtcacgctgctcaactccaagttcttccacatgaacatgtaccggtgcaaggacatgctaatcaaggacgtgaccgtgacggcgcccggggacagccccaacacggatggcatccacatgggcgactcatccgggatcacgatcaccaacaccgtcattggcgtcggcgacgactgcatctccatcggccccgggacctccaaggtgaacatcaccggcgtgacctgcggccctggccacggcatcagcatcggcagcctagggcggtacaaggacgagaaggacgtcacggacatcaacgtcaaggattgcactcttaagaagacgatgttcggcgtccgcatcaaggcgtacgaggacgccgcctccgtgctcaccgtctccaagatccactacgagaatatcaagatggaggactcagccaaccccatcttcatcgacatgaagtactgccccaacaagttgtgtactgccaacggcgcctccaaggtcaccgtcaaggatgtcaccttcaagaacatcaccggcacctcctccaccccggaggccgttagcctgctctgcactgccaaggtcccatgcaccggcgtcaccatggatgacgtcaacgtcgagtatagcggcaccaacaacaagaccatggctatatgcacgaacgccaagggcagcaccaagggttgcctcaaggagcttgcatgcttctagaccctccgtcgactgacccatctctctagttataatttttctctcgtccttgcattgcccattagatgctatccattggtaacgcacaacagtaaaacgacagacatccgacagctatattatgttcgacggtgtaacaccctgaatttgagggtataaaatttattctccaaatacc

SEQ ID NO: 14249 - DNA, 1285 bp, Zea mays
  Clone ID: LIB148-062-A1_FLI
gatgctgtcgaagctgcggcaccggcacctggtgtccctgatcggctactgcgacgagaaccaggagatgatcctggtgtacgagtacatgcacaacggcgtgttccgggaccacatctacggcagcgaggggaaggcgccgctgccgtggaagcagcggctggagatctgcatcggcgctgcccgggggctgcactacctgcacacgggcacggcgcaggggatcatccaccgcgacgtgaagaccaccaacatcctgctggacgacaacttcgtggccaaggtgtcggacttcgggctgtccaaggacgggcccgggatgaaccagctgcacgtgagcaccgccgtgaagggcagcttcgggtacctggacccggagtacttccggtgccagcagctgacggacaagtccgacgtgtactccttcggcgtggtgctgctggaggcgctgtgcgcgcggccccccatcgacccgcagctgccccgggagcaggtcagcctggcggagtggggcatgcagtggaagcgcaagggcctcatcgagaagatcatggaccccaagctcgccggcaccgtcaacccggagtcgctcgccaagttcgccgagaccgccgagaagtgcctcgccgagttcggcagcgaccgcatctccatgggcgacgtgctgtggaacctcgagtacgcgctgcagctgcaggacgccaacccgcccgagggcgcgcggcagggccgcgacggggacgaccaggacggcgccgcggcggcgggcggcggcggcgctgtcgtacccgcgggcggtgccgtgcccgacgcgtccaccgccgccgccggggagctcttccagcagctcgccgacatgcaggggaggtgaggtcgatcgccggtcgtacgtcaaaactctacacacactgcacactgtacgtggcatggcaatctgactgagctcgtctcgtgcacgtcgacacatcgatagatgcatgtgtactgcacccggtgaaaattcgaaacgatgaatattcactagaacacaaactgaacagagtggtgagtcctacgtacgtacgtgtaacaactagcaccggtcgatcgatacaatattcttcaacctgacacgtggggtctgcactaccggcgacggacgagggtgagctcgtcatattctcaaatttccaatatttaatatacgtgtgtgcgataatgtatttatttgtaatttcgcgattgtgtaatacttgggggatttgctatgtttcggtcgcctctaaaatacactatatttttagac

SEQ ID NO: 14250 - DNA, 847 bp, Zea mays
  Clone ID: LIB148-062-A6_FLI
gcgagccccacccgacgcgacgattcctctcctccgcccgttcccaccgatctcacgctctctctcttcctccgtcgcgtcggcgtcgccatcgccggccatgggttgcggtggctccaaggaggccgtggccaccggcaacaccagcgccggcagcaaggtcctccggaggaagtcctcctccgtctccaccggcgcaagccacacctccaccacgtcgccgtcgtcctccggcgtcgtcgtcaaggacgtcgtgaaggatgcggcggcggccggcgaggtgatgacgcccgccgacgccgagaagcctatctctgtcgaccccaaggcagacgccatcgtggtgatggacgccaagaaagaggagggcaacaacaaggtggccgtggaggaggatctgcttcctgaatccaccatggccgacgaggcgcttgctgtggatgaggggcccaaggttgacgaaccactcaaaatcaaagacggggaggagaagacggttgagagccaacacatcgaagaggagcatccgatgaatgaggatggggattcagccacggaacccctggaagcgagaccggcggtcgacgagcacaaggcgaaggaggcgacgaccgtcgtcccagcaccgtcggcggaggaggagaagaccaccaccgacgaacaggccgctgccaactaactgattacaaggaggccaagagctagacgacgtgcatccaccacgatgcattttgttcaactgaattcgggcgccgggcgggctgtctctttttgtgtatcctcatgcatgggtgctttcgctgtacgtgggccgggctggagtcactcaatataatgtgttcgatcc

SEQ ID NO: 14251 - DNA, 553 bp, Zea mays
  Clone ID: LIB148-062-F7_FLI
gccgaaatccacaaaagggacttccggttccgtgctagcgtctagcgatcgcgtcggcctccactccaccttcccgaaaaagcttaccctttgtgtttgtgtgtctgtctggcaatcgatcgatctccatgacgacgtccccgccgcgcgcacgcctgctcgccatggcgctggcgctcgcctgcgtgctgctcgtcaggtccgcggacgccgccacgcccggcggctccgcgtacgggtgcaacccggccacggacaggacgtgcaggcccgagggcgtcggggtggtgctgcctgacggcggcattgacctcgacggcgacggcgacgaggacgagctgccgcagttcgacccacacttcacgatcctcggccatgcccagtgagtgtgagtgtgagtacaggtgcagctggctggttggtcatctcagtcggtgtactggacatgcgtcgtaatctctgtcgttcattcgacgcgagaggaattgaatgggcatgtatatgatggtaatctgttcactgttcaaacttgaaagcgcactgattcaagggc

SEQ ID NO: 14252 - DNA, 1060 bp, Zea mays
  Clone ID: LIB148-063-C6_FLI
gcaggggaagggggagaaacagaccaccagatcgatcgagacctcgccgtcgtccggcagggttaatttggttcttctccggccgggtgtgcatggcaaaacgacccacggtgcccaagttcggcacctgggacagcggcgatgccgggtacacggcctacttcgacaaggtgcgcgagaacaagggcgccacggcgccgccgctgcgccggccgcgcagccccaacgaccccgaccccgaccgcgagcccgagccagaggaggggccaatgaggagagtccccccgccgtcgtcgtcgaggccggcgaccgcgggaggccaccgcgagccgccgccgccggggcggcgccacgggcagagccaccggcgaacggagagcagcggcagcgcgccgtccgaccgccagagcaagttcgcgccgccgccgcagtactaccagcaacagcaacgcgccagcccgcagcagcagccccgtcatcaccacggcggcggcggcggcggcggccaccagcagcagcagcccccgtccgcgcacgggcacgggcatggccacggccaccgagctccgcacgcgcacaggcagcagcaccacgcggcgccggggccacgggcgcggtccgcctcgccgcagagcaacgccccgcgggcgtcggccgtgcccaggttcggcgtgtgggacgagcagaccgcttcgtcggccgcgcaggggttcacggtgcagttcgagaacgtgaagcggaaccgggaggtggccaggtccggggtgccggctgtgccgcgcgtgccgtcgccgccggagggcgccgcgctgaggcgcgcgcgcgcccatcagaagacccctttcgtgtccaaggtgtttggatgtttccttcccaccactgcaaaaggctgagaacgatgcacgtatatatgtacatgtatatgtatatctaatcttcgcacacgcatctcgttcccccgtacgtacgtgacctgttttaattttatcagcaggctacgagagcgtgttctttctttgattccatatattaattaatatataatgacctgcaattatgc

SEQ ID NO: 14253 - DNA, 1047 bp, Zea mays
  Clone ID: LIB148-063-E8_FLI
cacatctcttgcctcctctttcgcgctgtccggagaggaggggcaggaggaggccgcaccaaatctatctggggatcggagcgcgggcgacaagatgccacgcggcggcaagcccgcggcttcgtcgaagccgaacccgttcgactcggactcggactcggagtccagcaataagccggcgaacaagtccggggcgtcgtcgtaccaggcccccgccgacgccaagaagcggtacaaggacgggttccgggactcgggcgggctggagaaccagtcggtgcaggagctggagcactacgcggcgtacaaggccgaggagacgacggacgcgctcgccggctgcctgcgcatcgccgaggacatcaggcaggacgccagcgacacgctgatcacgctgcacaagcagggggagcagatcagccggacgcacgagaaggccgtcgagatcgaccaggacctcgccaagagcgagaccctcctcgggagcctcggaggcttcttctccaagacgtggaagcccaagaagacgaggcagatcaagggaccagcgcaggtgtcacgagatgactccttcaagaagaaggccagccgcatggagcagagggacaagctgggcctgagcccgcgagggaagcgcgaccctcgccactacgctgaggccaccgacgccatggacaaagtccagatcgagaagaagaagcaggacgacgccctcgacgacctcagcggcgtgctgggccagctcaagggcatggccgtcgacatgggctccgagcttgacaggcaaaacgaagcgctggatcatctgcaaggcgacgtggaggagctcaactccagggtgaagggagcaaaccagcgtgcgcgcaagctcgtcgccaaataggccgcctagctcgaacgtgggagcttgcgcattcctgggtctggtttgcgccacgattcaccctcgccggctgattgcttgctgtaacatgcatgtattcgctctccattgcattgcattgggagcgttttttctgttcaacagagaatgttctttctccttga

SEQ ID NO: 14254 - DNA, 820 bp, Zea mays
  Clone ID: LIB148-063-F8_FLI
cagacgcgctccgccgtctctgccttgtgggccttacgtgggcctcatggcttaaaatgccatgccccagcaactacacgagtcaacacaggcccggcccggcccggcccggcccaagaacccccatctctcgattcctccaacaaattcccctttcccttactccccatccccacccacccacgccgacgagcaaaccctagcgagcgagagagcccggagccgagagaccagccagccatggcgctgcgtgccctgtacaacgagatccggagcatgaaggtccgcgacgtgccggcttacctgaagccgcgcttgacctgggacaacgtcaagaagagcgccgaccaggccgtcgaccgctacatcgagaagtacatcgacacgagctcgccggaccctctctaccacgtctgcatcggagggatgatcttctcctacttcgtcaatctgccctgggagcgcgcccacctcgcccacctcgaggagatggagaggaccggtgggaagcactagatccgctgccccgtccctcgccggcagcgcgggaggacgggtgactttcatggggtccattcaggctgatggcttctgttttcttctgctgttgagctactggagtcatgttactttggtcgttggttttgtacccagacagcaagaaactgtccagcttattgtcttgttcctcgcgtcttgtcataagtaacttcaaacaaaggagtgcatgcattgtgattaaaaacgttttcagcaattgagtacgaatattctctttttttttgtaatttttactccagactccagtcatatttgctgc

SEQ ID NO: 14255 - DNA, 986 bp, Zea mays
  Clone ID: LIB148-064-A1_FLI
cttggagattaaaaaggatgtagttctgttggatgacgatgatgatatagagcctgctagatcagctgatgttcagatatctaataagtgggaggagtcaaatatccactatccttcaagcactgatccagaagcggttgaactgacctactctgacatgaaatgtcttgaaccagaagaatatttaaaatcacctgttataaatttttaccttcagtacctcaagaaggcaagacctcgcagggatttacacatgtttaacacctatttttatagcaaactcgaagaagcactatccatgccgggtcaccatgactcagaattcagcaagttacggagatggtggagaggtgtagatatttttaagaaagcgtacataattttgccgattaatgaatcgatgcactggagcttgatcattgtttgcatgcctacaaaagaggcagattctgggccaataatacttcacttggactctcttggtcttcactccagtcaaaagctttttgacatagttgcgagggaggatatggaggcgtctttcaaaaaatatcaatagggaaaagattgaggtgccacgtcagggtaacgagtatgattgtggcctctttatgctttactatattgacaggtttattcaagatgcgccagagaggttgacaaaagagggccttggcatgtttggacgcagatggttcaaccatgaagaggcttcagcgtttcggggagggatacgggcgctactgattgatctatttcatagtgctctagacgacgatggaccatcggaggcagagcttgaagacaaggacattcagatggactgagcctgctgttgctgctttgattgaatatgtagtaacctcgttcactcccaagtgaagtttggccgtggagggaatgcggctacacacttttgtttacacgctcgttcattcggcggtggaaatgtacagttcaacgttatctaagggcctgtttggaac

SEQ ID NO: 14256 - DNA, 1044 bp, Zea mays
  Clone ID: LIB148-064-F1_FLI
tgccattagctgtcgcgtcagttacgttttgcttgccctgttctcgttcggccttgacaacccggaaatcctccagccctctagtccccaacgacgcaggaagcaggatcgagccgaatcctccggaactcgccgccggggccaaccgacctcacactattgatcgaggatgtcgtacgcctacctcttcaagtacatcatcatcggcgacacaggcgtggggaagtcatgcctgctgctgcagttcacggataagcgcttccagcccgtgcacgatctcaccatcggcgttgaatttggcgcccgcatgatcaccatcgacaacaagcccatcaaactccagatttgggacacggctggccaagaatcattcagatctattactaggtcatactacagaggagctgctggagcccttttggtttatgatatcactaggagggagaccttcaatcatctcgcaagttggctagaagatgccaggcaacatgcaaatgctaacatgacagtgatgctgattggaaacaaatgtgacctttctcataggcgtgctgtcagctatgaggaaggcgaacagtttgccaaggagcatggtctggtttttatggaggcatctgctaaaactgcacaaaacgtcgaggaggcattcattaagaccgctggtacaatatacaagaaaatccaagatggcatatttgatgtatcaaatgagtccaacgggatcaaagttggctatgctgttcccaactcatctggaggtggtgctggctcgtcctcacaggctggtggctgctgcagttgagcggtggcagcaagtcatacaattgcaagggttctctctgcagtatcttgatgtttgcctatagctggccccggatgatttgttctttcagccatcacgtttcaatccatgaacaaaccatcttcagtgttagttgtcattcaaacttgtgcgatctttctgtaaagccaatcattcacgattgctaacgtatgtgctttctgtaaccaaattgaaatcagttctatggtattcatttgttc

SEQ ID NO: 14257 - DNA, 832 bp, Zea mays
  Clone ID: LIB148-064-G3_FLI
gcgctgccgctgccgctgccgctgctgccgtgccaagtcgccgggcaagctccggatcggggggcgcgcgcgcggggccgccgccgccgccattatattgggttagttaggccagcttgtcattgcatcggagagatgtatccggccactacgccctacgatacggcgtccggggtgggcgtggcgccggtggccggcttgttccccgtcgccggagaggccagggagtggtcgtcgaggctcctggactgcttcgacgacttcgacatctgctgcatgacgttttggtgcccgtgcatcacgttcgggcggacggcggagatcgtggaccacggcatgacgtcgtgcgggacgagcgcggcgctgttcgcgctgatccagtggctgtcggggtcgcagtgcacgtgggccttctcctgcacgtaccgcaccaggctgcgcgcgcagcacgggctccccgaggcgccctgcgccgacttcctcgtccacctctgctgcctccactgcgcgctctgccaggagtacagggagctcaaggcgcgcggctacgagcccgtcctcggctgggacttcaacgcccagagggccgccgccggcgtcgccatgtgcccgccggcctcgcaggggatggggcgctgatcatccgtcgaccagccagccagcccgtcggggtttgattcatgtctccgatctgttggttcatgcatgcatgtctccatttaattcatctgttcatatattcatgtctccagatccagacggtacgtataatatattcagttgttttacgtactgttcatcgtccgacaacacagcaccattaattactgtc

SEQ ID NO: 14258 - DNA, 1960 bp, Zea mays
  Clone ID: LIB148-064-H5_FLI
cccgtccctcgccaccgccatggccgacgtcggcgagcctcctccctcgctctgccccttatgcggccaccccgctgccttctccgtttcaccgtcgacgtctgcggcggccagcgtgtcccccgcaaggccgctgctgaagcgaaggaccccacccgaggcgccacctgcggtcgtgagggtggagatcggggatgaggccgcggcgctgcgcgaggcattggcgcggcagcaagcggcgctcgccgacgtccaggcggagctcgacgcggagcgcggggccgcggccggcgccgccagcgaggccatgaccatgatcctccgcttgcagcgcgagaaggctgaggccatgatggaggcacgccagttccgccgctacgccgaagagaagatggcccacgacgccgccgagctcgcggccctcgaggaggctctctcgaagcgtgaggccgggatgcgggcgctccagggccagacgccccgtcacgcctgcgccgtgccgtcggggggctccaccccacgacgcccctctgtggccacgccgcgccacccaccctcctcgctgtcccccgcggcgtcgtccggaggagggtactacccgcctctgcggtgcagcatcgaccacccgcccaccgcgtccgaagcagacgcgctcgagacaccgcgcgaccagctcaaccacctcgcccaccgcgtccacctcctcgagcgcggcgcgaccccgatggccgccaccaacaccacgcccatcatccgtgtcgcgccggggtctgccttcccgcaccatgcgcgggtctactcggacgacagccttgacttgtacgatggtggcgactgcttcccagatgacgattgcggcaccagcgaccgggtatacaccgtggacgccattcatggggcacccctggcggttcctgagggctcctacgctggtagcacgcccatggggagcgactgctacggtggtgctccgtgggcagaagacgaggaggtgcgccgcctcagcgtgcggatgcaggcgttggaggcagaccgtgagtccatgaggcaagccatcatgtccatgggagccgagaaggcgcaggtgatgctgctcaaggagatcgcgcagaagctctgcaaggacacgacaccaccagttccagcggcagcagtggctcagcacagcttttacaaagggggcaacacacagccggccatgaccatcactgtgcgaccaccacggcacccggctttgcttatgcaaaggaaactggtgaagaagaagccatcactccttgctgcagtggtcaagtgggttacatcaatcatgtggtggcgaaggaaatcatcccgcgtcaagttccctattgggcagtgcggcaacaacgtggggctgcttctgctgctcgacaaggctcccagggcaggccacgggcaccagaggcctcccaagaggatctaaccaccaaatgagtcatctgtttgtgaagcaaacacatgactgggcttccgcattgttgttctcgcgttcttctattcaccgtgtctggtgatgtagctttcacatatggaaaccatttttttctcatgtaggatataccacctgagcattgtacgttgtgtgttcatgggacttcaatcaccagaagttgactcagatcttagaatcgatcatatggaattgacgttcatggcaattcgccgctgaatactgttgttgggtgtcatttgagcaccatattcaacttgtcagtaaatacatggtttacggtttcatgatggttttttttgggtggggtgggggattttgaataggcaattaccagggtagttcttggtttcatgattgtttgggggatgctgattttgaataggcaattaccagggtagtggaacttaggctatccgcaacggtgtcctctaaattttccctctatatgctacaatgcagtcacatcaacaagatttcttccccttt

SEQ ID NO: 14259 - DNA, 771 bp, Zea mays
  Clone ID: LIB148-064-H6_FLI
cggaggccgggcccgtgctgtccatgtgcccggcgttcgccaaggagccggcgcccgccaagccggggtcgtgcggcacagtggtgcgcaacgcggagctcaaggtggtggacccggacacgggcctctccctcggccgcaacctccccggcgagatctgcatccggggcccgcagatcatgaaagggtacctgaacgacccggaggccaccgcgaggacgatcgacgtccacggctggctccacaccggcgacatcggctacgtcgacgacgacgacgaggtcttcatcgtcgaccgcgtcaaggagctcatcaagttcaagggcttccaggtgccgccggccgagctcgaggctctgctcgtcgcccacccgtccatcgccgacgcggccgtcgtcccgcaaaaggacgaagccgccggcgaggtccccgtcgccttcgtggtccgcgccgccgacgccgacatcgcggaggacgccatcaaggagttcatctccaagcaggtggtattctacaagaggctacacaaggtgtacttcaccccctccatccccaagtcggcgtccgggaagatcctgaggagggagctgcgcgccaagctcgcggcagccgcgaccgcctgaggagcttgacgctcaggttccatgccttgctacgtgcaactcgtttggtagtggcgtttactgccaatccagtgtatgggtacaggcgtgaaacatgaggtaccgagaatgtactatcaatatatgctttgtatgcgagtgcttcgtc

SEQ ID NO: 14260 - DNA, 559 bp, Zea mays
  Clone ID: LIB148-065-F1_FLI
gccctcgacttctatttcgccgtcaaccggcaggtgtcggagcccaggatgtcgtttcccacgagcacgagctcagggccgtctctgtcggccaccaagtcctcgcccaacctctgcggcacgcccagcccaggtagccctggtgcgcactctagtaacgccttggagtcatggaagatttgcaacccaggagataaccctctgcttgtgaagacaaggctcaggcactgggctcaagtagtggcttgttcagtgaagcactcgagctgatcctcgtcagtgttttattcacgctcttcttccatacataatacccgtacaagtggttgcgatggcgatgaattagtcgtgtccgagtgaaactagatcaattgaccttgttgctcgatctaatgtcgtcccaggtcacattgttgtggacagatttaattagcgtcgggttggcaaattaaaaaatgtatatgcaaagtactgttaaaggttggcatggtgtaaaaggtgtgagctatctccctaaatcattatgtcacagatttgaaacagtctttccgtatctgcg

SEQ ID NO: 14261 - DNA, 1018 bp, Zea mays
  Clone ID: LIB148-065-F10_FLI
atccgatccatcttgggcgggcgccgcgcgtcgagggccagccaaagcttgccatggcagccgtccggtccgacagggtccaccaccaccaccgccgctccgaggcgtcgtgcccggcaacctccgcggccgtggcggcggcgagggccgatgacgccctgcgccagcgcccgcgggggctcgtgcaggtccgggagcgggatcagggcccgctgtcgacggggcaccagcacctgcaccaccatcaccaccagctgcggcggtcggcggcgttcccaccccgccgcccggggccggggcgccgccctcctcagcgctgcgaaagcgacctcaacatcagggagcaccgctcctgcagcgaggtggccggcggcaccgcggcgggctgcgccgctgtgtgctgctgcttcccctgcgtcatggtggaggtcgcggtgctcgccacggtgcgcgcgcccgcggcgctgtgccgcaaggccgcccgcgtgcgcaagggccgcaggcgctctgcctccgcgggccaggccacggagatatacgagctcctcgtggacgacaccggcgtcgtcgaggtggatgccggcgccgccaatgcggtggcgctgcccgtgaagcccgccttgcagctggaggaaaagggggagctggagaaggaggtgtgggcgaggttctacggcaccggcttttggaggagcccgtcgcagctggacgacaacgacgacaggtgatcgggacaggcccgcgagcgagctatccacaagctcctccggcgatgcgtgggcttccttcgttttccgcgggaagaagagaggatcgaggaaagggaaacatgattgtgtgttcgatactacgattacgaacttcgttttcccttcttttttgtttgtttggaaggggaaatacttctcttctattctacaacaatgtcacgtacatgcaatgtaataataaaaaatgtatgtgatatatttaacaatgtgattgatgattgataaatggaaatggaaaatgcttgggc

SEQ ID NO: 14262 - DNA, 1397 bp, Zea mays
  Clone ID: LIB148-066-A5_FLI
acgcctggcctgggctggccgcctccgaccaccgtacgtcctccaccgcgtcgccgccggccggcctctgcccagcccgggctgcctgcgagggcttctgatggccctcgacgccgtcctttcctcctagtgcccagctttattgcagatccagccctctgatcctcgtcttctttcacctctccaacatgaaggtcaacaccaagatcaagctggagccggtcatggcgccgtcgtcgtccctgccgcggagcgccagcgagctacccgacccgccgtcaccgttcagctccaacacggcgcaccaccccgtctccgtgcccaccacacctaggttgtccttatcgtgctcgtcgttcggccacatggtgaccccgcccaccgacacaccgccgatcacgcccaccaagaagcaggacgacaagccgaagccgacgccggaggccgccaccgcggcgaactacgcgtcgttgtggtcgcccaagcgcctcatgcagcgcgctgcccgcgctttccgccgcagcaggtcgcgcgcccgcgtcaggacggtcaaggacctcgccgaggaacgggcctcagtgctcgccgccagcaacaaggtctccgatgaagcggcggcggctaccgcggtgccgcctgcaggtgccagtgccaagacctccagcagcaacgatgcccgcgacggcgccatgggcagcgtgcaggacgagccgcggcagcagcgccacgatgactatcaccccgagatcgtccccgagaagatcatacacgaggacgcgttgccggtcgttgctgcagagaaggagaccgccgccgccgccgccgtctcgaaggaggaggaggtggagtcgcccaagaaaggagcggctctgtcgccggtgccggagactatcgtcatcgccaccgccgcaacctcgaaggaggaggaggaggaggaggtggagtcgcccaagaaagaagcggctctgtcgccggcgccggagcctatcgccgccgccgccgccgcaacctcgaaggaggaggaggaggtggtggaatcgcccaagcaagaagcggctctgtcgccggcgccggcgccggaggccatcgttgccgtagcagcagtggaagacgtggtggcggacaagttcgtgacggttgtgaaggaggcgatcaagaagcaggaggcggaggaggacgagaaggaggaggcaatgcggaggttccagggcagccgtgtgaggacggcgttggaggcgcgagcggagtcggagcagccgcgtcgccgagaggtggcgcggagcaacgacgtgatcgaggaggcgcgcacgaagctgctggagaagcgtcggagcaaggtcaaggcgctcgtcggcgccttcgagactgtcatcgacaccaagaaggacagcgacgac

SEQ ID NO: 14263 - DNA, 355 bp, Zea mays
  Clone ID: LIB148-066-C9_FLI
caccgtccgcctcactaccgagggaggcaccaagtccgtctacgacgatgtcatccctgccaactggaaggccaacaccgcctacaccgccaaataattaactttagtgctgacaatactttaagccggcctatgctagctatactagaattggttggatcccaagcaatgcattacacatgcatgcattggaccgtgatatctatttgctaccactaccctattacgacagtgatgctggcgccaacaatgatggtgtcatcctccttctccatcttcttcatctccatatatagctagagtgagacttcgctgttgtttaaaagagaagagttaagaaatggattgacaagtt

SEQ ID NO: 14264 - DNA, 750 bp, Zea mays
  Clone ID: LIB148-066-D8_FLI
ccgaaacaaaagaagctattttgacaccacacacacacacacagaggagagaagataagagaacgaggggcagggcagccagcgccgctagctgaagcaaggcagggcaagagaatccgtacgtcgaggacttcgacaagctccaccgcgcgctcggggacgccttcttcggcgcactgggaggccaggacgacgccaccgccgcggcggacggcgccggcgccggcgccggcgccgaggaggacgagcaggagatgcgggaggcgttcaaggtcttcgacgtcgatggcgacggcttcatctccgccgctgagctgcaggaggtgctcaagaagctcggcctccccgaggccagcagcatggccaacgtccgggagatgatctgcaacgtcgaccgcgacagcgacggccgcgtcgacttcaacgagttcaagtgcatgatgcaggggatcaccgtctggggcgcctgactgacctcatcgtcgtaccgcgtacgttctgacttctgagtgtgtggcaactggcatgatggtccccgcatttcgtcgagacagtcctgcgtctgcgtctctaattgaattctttagtatcgtccttcacatcactggtctagtggtgatgagaatgccctgtcctgtgtgtgtgtgtcacataaccatggtatgtaatgtcatactggaaattaggtatatgatgatgacagctgataagaaaatgtatcaaactgggctattgtaatcattgtcaacc

SEQ ID NO: 14265 - DNA, 1394 bp, Zea mays
  Clone ID: LIB148-066-E4_FLI
ctcgcgtgcacctcgtttccctcggcggtggatcagtggcggcttggtcgagatgggcgatgcggttgatgacatcatctgtgcaacggatgcggcggtcgccgtcgaggatgcggccagtgggaagcccgcaatgctctctagcttaggggggcagggtgaggaagagcatgaggagaaggacaatgaggacaagtcaggcgagagcgaggtgatcaacccgccagaagacgctggcggggaggccacctcacccctggaagggttgaagcctcgcctttccaaggggaatcaaagccatggacctaatgctgtcaaatcaaagagcccaacgagtggagacgaaggtcagacgaggaaaaaggctcccaattcttctcttcctaaggcacccattgtccaggtgtcccatggtgacgctggtgtcggcagtaataaagatggcaagaatgagtctcgctcatcttccgtggatgcaacattgctggatgactccaaggagaaaaggaaaactcaaaagccattagcacagctcttttccatcaaaagtgacgaagaacagtcaaatggtgagagtgcaaagcctcgaaaagttggcagcattccatcatatggtttcaccttcaagtgtgatgagagatctgaaaaaagaagagagttctattcgaagcttgaggagaagattcatgcaagagagttagaaataagcaatttgcaagcgaaatcaaaggaaactgaagaagcagaactcaaaatgctgagaaagagtttgaacttcaaggcaacaccaatgccaagcttctataaggaaccaactcctgtcaaggttgaattgaaaaagatccccccaacaagagccaaatcgccaaagtttggtcgttctaaaaacaagtccacaccagagactgaagaaaatgctaccgcggaccagcctgcccacctgagcctcgaggagaatgtttctcaaaccggtgtgaaaaaaccaaccccgttgaatccagcaaagaagccccagaggaagtcactccccagactgccatctgaagaaaccggtccgcttgatgccacctcaaggcaacttataaagagcgccaagctggatgcagttagtgctccggagacaggatcagctacaggacaggcacaactacaaggaagtcagacggaaacagattctggtcaggggccagttgaagctggagctaatcctgatgaacaagacgccagcgaacagagtgttgtttagtgaagatcacgatgaccaaaccagctgatttgtgatgtgcatggtgttcctcggctttgtataatatattgtgcttgcctgctagagtaacctgtagtctgtattatgttatgtgatatatactactactcctggtttattttcctgg

SEQ ID NO: 14266 - DNA, 2190 bp, Bos taurus
  Clone ID: LIB188-028-E1_FLI
gatgatatgcaaatgggtgaatttttaagcatattattttcctcattgtagggcccctgaaatcttgatgagaagtggccacaatcgtgctgtggattggtggagtttgggagcattaatgtatgacatgctgactggagcagtaggtgcacagttaaaagctgcatgtattattggtctgtgctgagtcactatagcaagagacctgtcctgtgctttctgaacatgttaccagtggagttttcaaagcccaaagatttgttattagcagtttaacactaataatgctgtatgattatatgggatcccatactttccgaaacattttcttttaaatgatctatgtcatggcaggcctgtgaaatagatgttgaatagataatgcccttattttataaatggagaaattgaagcataaaatcacatagctcacttatcacacagaaagttaatggtggaaacacaggcttccttccaggacactgctacttcctctgtcctgttgcttaaaaactgcacgtctgccggccacagtggtgcatgcctgtagcctaagctactcaggaggctgaggtgggaggatcatttgagctaaggattattaatacaatctagccttgacaacatagttgagaccctgtctgtaaaacaaaataaaggtctttagcagttagcccatttcacagcatacatttctgatctccatgtataactaatttaggaaatggataatattattcaaaatttgtttcttatatgctaatatttttctctccctgctaatatttttcacttgtcttctactcttagcccccattcactggggagaatagaaagaaaacaattgacaaaatcctcaaatgtaaactcaatttgcctccctacctcacacaagaagccagagatctgcttaaaaagctgctgaaaagaaatgctgcttctcgtctgggagctggtcctggggacgctggagaagttcaagctcatccattctttagacacattaactgggaagaacttctggctcgaaaggtggagcccccctttaaacctctgttgcaatctgaagaggatgtaagtcagtttgattccaagtttacacgtcagacacctgtcgacagcccagatgactcaactctcagtgaaagtgccaatcaggtctttctgggttttacatatgtggctccatctgtacttgaaagtgtgaaagaaaagttttcctttgaaccaaaaatccgatcacctcgaagatttattggcagcccacgaacacctgtcagcccagtcaaattttctcctggggatttctggggaagaggtgcttcggccagcacagcaaatcctcagacacctgtggaatacccaatggaaacaagtggcatagagcagatggatgtgacaatgagtggggaagcatcggcaccacttccaatacgacagccgaactctgggccatacaaaaaacaagcttttcccatgatctccaaacggccagagcacctgcgtatgaatctatgacagagcaatgcttttaatgaatttaaggcaaaaaaggtggagagggagatgtgtgagcatcctgcaaggtgaaacaagactcaaaatgacagtttcagagagtcaatgtcattacatagaacacttcggacacaggaaaaataaacgtggattttaaaaaatcaatcaatggtgcagaaaaaaacttaaagcaaaatagtattgctgaactcttaggcacatcaattaattgattcctcgcgacatcttctcaaccttatcaaggattttcatgttgatgactcgaaactgacagtattaagggtaggatgttgcttctgaatcactgttgagttctgattgtgttgaagaagggttatcctttcattaggcaaagtacaaaattgcctataatacttgcaactaaggacaaattagcatgcaagcttggtcaaactttttccagcaaaatggaagcaaagacaaaagaaacttaccaattgatgttttacgtgcaaacaacctgaatctttttttatataaatatatatttttcaaatagatttttgattcagctcattatgaaaaacatcccaaactttaaaatgcgaaattattggttggtgtgaagaaagccagacaacttctgtttcttctcttggtgaaataataaaatgcaaatgaatcattgtt

SEQ ID NO: 14267 - DNA, 1775 bp, Zea mays
  Clone ID: LIB189-001-C5_FLI
gtccaagctctcccgccctgacctcaagcaggtctgggctatcgcggacaccagaaggcaggggtatctgggtttctctgaattcgtcacggcgatgcagctagtctctctggcacaagcaggcaacgagattactcaagatagccttaagcgagatgatttgagcagtttgaatccacctgtgatggaaggtttggatgccctacttgcgaaatctaagcatttggtgaagcgtgttgatccagaaatggatggatatcctcaggaacaatctcctttaacaaacaaatggtttagctcaaagtcatcaaagaagatacctctgactgccgtcacttctgttatcgatggcttgaaaaaactttatatcgaaaagttgaagcctttggaagttacatacaagttcaatgatttcgtttcccctttgctgacaagtagtgattttgatgcaaagccaatggttatgctcttaggtcaatattctactggtaaaacaacttttatcaagcatctgctaagaacaagttatccaggtgcccatattggaccagagccaacaacagacagatttgtagttgtcatgtcaggacctgatgaaaggactattcctgggaatactattgctgttcaagctgacatgccttttagcggtcttacaacatttgggactgcatttttatccaagtttgagtgctctcagatgcgacatccactgctagagcatatcacatttgttgacacacctggtgttctttctggtgaaaagcaacgcacacagcgcagctatgatttcactggcgtgacatcatggtttgctgcgaagtgtgatcttatccttctcctgtttgatcctcataagctcgatatcagtgatgagttcaaacgtgtcattggatcattacgtggccatgatgacaaaatacgtgtagttttgaacaaggcagaccaagtagacactcaacagcttatgagagtttatggtgcattgatgtggtctctcgggaaagtattgaatacacctgaggtttcacgtgtttatattggatcattcaatgacaaaccagtaaatgaatcagctgttggtccacttggaaaggaactatttgagagagagcaagatgatcttctttctgatctcaaagatatccccaagaaagcctgtgaccgccggatcaatgaatttgttaaacgtgctagagctgccaagatccatgcttatataataggtcatctaaagaaggagatgcctacaatgatgggcaaagcaaaagcccaacaacgactcatagacaatctgcctgatgagtttgcaaaggtgcaacgggaataccatcttccgtcgggagattttccttatgtggagcacttcaaagaggtcttgagcgggtacagctttgacaagtttgagaaggtgaagcccaagatgatacaggccgtggatgatatgcttggatatgacattcctgaacttctcaagaacttcagaaacccgtacgagtgaacccatacaggcggttgaaagatgacttcgatctgcaacagaatgagggattgattatcaggcgatgtgaatcatagtggtcaatgtctcttggggcgttcattgccatccatgcttagccattgttatataactttatgcataagaatcatagagccattgctcaagctttcaccagacatctgattatgtaaaatccacaaaatagtgatgttagtgttaaagaatatactgtgatgttgtttcttcaaatgagtatttattcgtttggaac

SEQ ID NO: 14268 - DNA, 1592 bp, Zea mays
  Clone ID: LIB189-001-C7_FLI
gcgcgcccccgctccggaactacttcctcggtgatcgccacaaccggttcctctgcccgcgccgcacgcccgtcaggcaccgcgcctcggacgccgacagggtcgcgtgcctcgcgtgtgatctcgacgagatctactccgcggccttcaacggggaccgcacgccatacagccccgccaagtttctatatagttggtggcagcatgcatcaaaccttgcaagttacgagcaacaggatgctcatgaattctttatttccatccttgatcatatccatgaaaatataaaggatgatcaacaaaagtcatatgcccaaggccatggggattgttgcattgctcacagagtgttttctggtatcctgaggtcagatgtcacctgcacaagctgtgggttcacatccacaacttttgagccctgtatggacatttccttagacatggatgcaggagataacagttcttttggtgttgcaaacacaaagtcgcatgtgcgcaatggagagcgaggcttggctggcgtgaattccaaggtattaactctaatgaggtgtttggagaggtttacaaggtctgagagacttgatgccgagcagaagttcttctgtgaacactgcaacgagaggcaggagtccctgaagcaaatgtccattcgcaggcttccattagtttcctgctttcacataaagagatttgagcattcgtcagtcaaaaaggtgtcgaggaaagtcgatcactgtttgcagtttcccttttcccttgacatggcaccttacctgtcgtcatctattctcaggagtagatatggtaaccgtatatttcctgcagaagctagtgacgcggacgcagtttcagaagtgtcgtcagaattcgaaatatttgcggtgatcacacatagcggtaagctagaagctggccattatgtgacatatctgaggctaaacaatcattggtacaaatgtgatgatgcctgggtaaccagagttgaggagcataccgtcaggacttctcaggcatacatgctcttctacgtgcagaagacgttttactacaaagcttgtgaaagagcagccacagtctgatctgaagcaaacattgatgacacaactccagaccaccataaatttatttgtcaccgaatcagatacacatgtagtaagtagttcgtcaatcaagagggaaaacgggcgccgtatccacagcagcacagccatggcctgtcaaatcttttcgttctccactgacctatagttccaatcagagagaagctttttcggcggattttttctttacagacagacatctgcccaagcgaagatgcttgaatttatgcattgagttatattgtgctggctaatggatatgttgtggcgatttgcttaatactcaggtgcttcaccgtttggtacctgtggcggtgactggcgaggatgctcttaaccagttgcgcttgtgttcaatacaaggtcgagcaaggaagatgagtataaaacgtggaaagaaaacataaagggaaccgattttttttaatgtgttcctttcagcaattgcattcttgttctactgaaggtagagggtttcttgctgatacc

SEQ ID NO: 14269 - DNA, 524 bp, Zea mays
  Clone ID: LIB189-001-E2_FLI
ggtgggccacgccctggtcccgcactgccgagaacttcgctaacttcaccggcgagcagggctacccgggcggcaagttcttcgacccgctcggcctcgccggcaccgtcaaggacggcgtctacatccccgacgtcgacaagctcgagcggctcaagctggccgagatcaagcacgcccgcatcgccatgcttgccatgctcgccttctacttcgaggccgggcagggcaagacgccgctcggcgcgctcggcctatgatttgcatgctgccggcgaacgagtcagttctcgattgcgtggggtgggtgagctcctagggacgtacggctgcagcggatcagacgccttgcctcgcagattggaggcgaaagaagagcgtagcagcaatctactgtctgtgttggtggtttcttctgggtaacgtgcgtgaaccagatggggtgttcctctctgttttttttctttcttttctgtgtatgtatgtaccatgtaatgtatagtatggatcgatttcattgcatt

SEQ ID NO: 14270 - DNA, 1001 bp, Zea mays
  Clone ID: LIB189-001-G2_FLI
cacatcacacttcaactcaattcccattttatataccccaaacttctttactcttcataaacccacataatcgccacaatgcccatcaccgttccccaagctaccgagctcaaggacctcttcagccttaagggcaaggtcgtcatcgtcaccggtgcctccggccccaccggtattggcacagaggctgcccgaggatgcgctgagtacggtgccgacctcgccatcacctacaactctcgcgccgagggtgccgagaagaacgcaaaggagatgagcgagaagtacggcgtcaaggtcaaggcctacaagtgccaggtcaacgagtacgctcagtgcgagaagctcgtccaggacgtcatcaaggacttcggcaaggtcgatgtcttcatcgccaacgccggaaagactgccgacaacggtatcctcgacgctaccgttgagcagtggaacgaggtcatccagaccgacttgaccggtaccttcaactgcgcccgtgccgtcggtctccacttccgcgagcgcaagactggctctctcgtcatcacctcctccatgtccggccacattgccaacttcccccaggagcaggcctcctacaacgttgctaaggctggctgcattcacctcgccaagtcgctcgccaacgagtggagggactttgcccgtgtcaactccatctcccctggatacattgacactggtctctccgacttcgttccccaggacatccagaagctgtggcactccatgatccccatgggtcgtgacgccaaggctactgagctcaagggtgcctacgtctacttcgcatcggatgcctcatcctactgcactggttccgatctcctcatcgacggtggttactgcgtcaggtaaatgtgtcattccggaaggcagatacgagtggaggaatataataatggacgacgtcttgccggaagtcttgtgtccatgtaaatagcatcgagacatcaataaagcttcgcaggtttcacatc

SEQ ID NO: 14271 - DNA, 1350 bp, Zea mays
  Clone ID: LIB189-001-G3_FLI
cgaccacctcgacggccggccaatatagcaacctatacagggcattctcatctcatggcgacgacggagacgatggagatgggcgtcgtcgtcgacggcgtcagtagcaacgtatcaggcggctgcggcgggctggtggtgacggagctgagccacatcaaggagctggtgaggcagctggaggtgcacctcggcggctccccggacctgtgcaagcacctggcctcgcagatcttctccctcaccgagcgctccatcggcctcatcaactcctcctccagcggcctcgacggcgcccgccggaagcgctccgcgggcgacgccggcctcgcctcgccgctctcggccacgcccaccagcggcgtcaccgacgggccgttcaagaacaccaagaagaggaaggcgatggaacagcggaggcagagggtgagctcggccggcggcgagaacccggtcgacgacggccgtagctggaggaagtacggccagaaggagattctcggagccaagcacccaaggggctactaccgctgctcgcaccgctactcgcaggggtgccaggcgacgaagcaggtgcagcgcaccgacgaggacccgacgctgtacgacgtcatctaccacggcgaacacacctgcgccccccacaggccggcggcggcggcggcggagcacaacccggacgcgcacggccacctgcagaccctgagcgccggcctcacggtgaagaccgagggcctgccggacccgccgcggggccgaggccggggcgccgccacgcccttgtacctctccgcctcctccacgccgccgtccacgtcggagaactggggcgtgtcgcccgcgacctcgggctccacccacgtcgcctccttccggccgttcgaggccgccgagtggcgggggcaggccgagcaccaggaagtggtgtccgcgctcgtagccgccatcgcgccgccgcccgccgtcgacagcctcgacgacctgctcatcgacatagatctagacgacatcgcgagcttcttcgcgtgacccgcgcgttgtagctgaccaagggtagggaatcaaatcaaagcagccgatgtggcgtagtatgtgaccgagccctctggctctgcttcctgaaactggaacagaacagaggagggaagagcaccagagctctgcttcctggggtccatgcagatgcaggatgcaggcgtaaaaacctaggagatgaacaagagtagagactgcattttttacccctctttttttgttaatctttttcctcttccagaggactgagggtattgtgtttgtattgtattattgatttttaatgtcaatgggaaaaataagatccttcgtgcc

SEQ ID NO: 14272 - DNA, 531 bp, Zea mays
  Clone ID: LIB189-001-G4_FLI
gagggcgggccgggcgaggagatggagaagttcctcaagcagccggagacgacgctgctggacatgctgcccacgcagatgcaggccatcaaggtcatgacgacgctggacatcctctcgtcgcactcgcccgacgaggagtacatgggggagttcgcggagccgtcgtggctggcggagcccatggtgaaggcggcgttcgagaagttcggcggcaggatgaaggagatcgaggggttcatcgacgagtgcaacaacaacctggacctcaagaaccgctgcggcgccgggatcgtgccgtacgagctgctcaagcccttctccaagccgggagtcaccgggaggggcatccccagcagcatctccatctgatccatcctcagcatgcattagtccaattaattaaatcgggggttgtactattattgcatgcagaggctgcttgtcgaataaaacgtactatatgtacgattgtattgtacatgtgtgtcaatgcaacaagaggcacgtttgagactttgagttaatacc

SEQ ID NO: 14273 - DNA, 348 bp, Zea mays
  Clone ID: LIB189-001-G6_FLI
cgtccccagccgttcatgaaccccataaatggcctatattctcagccgtctatttgcacctctgtcagttaaggtcattgcgttatcgaagacctgcaatattttgggagatggacctttgcctttgcctttgcttagaggattggtatttggtagcagagattttctctatccaagtgagttgtgagcagcgagcatttagtcaaactgtacaaaagttttccgggataccctttttgtaataaaagaaactgatgtattccgcagtagctgtagcgctggatataatgttcctttgtatgttatatatgacagaatcataggaaatagcagatgttaagttaatcc

SEQ ID NO: 14274 - DNA, 517 bp, Zea mays
  Clone ID: LIB189-001-G7_FLI
gccgccggcggcacggcgaagcacacccgcacggtaaccaacgtcgggcagcccgggacgtacaaggtggccgcgagcgccgccgccgccggcaccccggtgacggtgaccgtggagccgtcgacgctgagcttcagcagggccggcgagaagcagagctacacggtgagcttcacggcgggcgggatgccgtcgggcaccaacgggttcgggcggctcgtctggtccagcgaccaccacgtggtcgccagcccgatcgcggcgacgtggacctaatggctagcggcggccgtaccgtagcaatagcgagataaaatcccgattgggggacggcaatggcgagcgcgcgccattctcgaatgcgagagagatggcggatatcgtcgaggatgtgctgttgtattgtgtgcatgagtccgctccggtgtgtaagctgccggtgtagtgtaatctatctgtagctgacccgattgtagcgatgcagcaattaaatctcaaaagggttgcagacttgagc

SEQ ID NO: 14275 - DNA, 764 bp, Zea mays
  Clone ID: LIB189-001-H3_FLI
gccagcggctgggcctcgccagggcgatcggcgtcagcaacttcaccaccaggcacctggacaaggtcctggccgtggccgcggtcccgcccgcggtgaaccaggtggagctgaacccggcgtggcagcagcggacgctgcgggcgtactgcgccgaccggggcgtccacgtcgccgcctactcgccgctgggagggcagaactgggacgggcggggcaacgccgtgctcgactcggaggtgctcgcggagatagccagggcgagggggaagaccgtggcacaggtggcgctgcgatggatacatgagcagggagtgacgtgcatcgtcaagagctacaacagggagaggctgaagcagaacctcgagatattcgactgggagctgaccgatgacgaccggctcaagatcagccacatcccgcagaggaaggttgtcgaggcgagcggcttgttctcgcaggagggtgagttcacctctgttgatcccgcggaactgaatattgtggaggaataggaactggactgcaaaatggccccgcctgtcggtgttgctccgtataggaacatacgaataataaggcaacgttcgccctcggtgtttcgggggtgtattccacgatgttttccatccccgttcagttcagtaaagattgtgatcgtataatattgaggacttctttggaacgatcgagctatagtacatggttccgtaaactttgtatgaattttctgatctaaataaagtggggttttacgaacaact

SEQ ID NO: 14276 - DNA, 704 bp, Zea mays
  Clone ID: LIB189-001-H6_FLI
cgtacgcacgcaccgggacaccagcaacccccaacagcgccactgtccagtgcgcgcgtcaagcttgcttagctagccgccatggcctccctcgccgccgtctccgtgaagcccgtggccatcaagggtctcgccggcagctccatctccggaaggaagctcgccgtcgccaggccgtcggcccgctccatccgcaggccccgcgcagccgccgtggtggccaagtacggcgacaagagcgtctactttgacctcgacgacatcggcaacaccaccggacagtgggacctctacggctctgacgcgccctcgccctacaacccgctacagagcaagttcttcgagacgttcgcggctccgttcaccaagagaggtctgctgctcaagttcctgctgctgggcggcggctcacttctggcctacgtcagcgcgtcggcgtcaccggacctcctgccgatcaagaagggacctcaggagccgccgcagccgggcccgcgcggcaagatctaagctcagcttctccatttgcatggtctagtagcttgctttgtactgctagcgccggtcgatccgtcgcaatcgtcatggatcatctctctatcttgttgttacgctgttcataatttggtatatttgccattccgctattgtgtactctttggcatacatacaataattaaaatggcgttgcgtggctctcatat

SEQ ID NO: 14277 - DNA, 1096 bp, Zea mays
  Clone ID: LIB189-002-A1_FLI
ctcccaccccaccccaccccacccgcaagcgaggcagcctaggacgcagcagcgcacccccgatcctcgcctgtcgcctccatctccattcgcaggcctgagaccctcgcccgcaccgcgctgccgccagccatgggaatggggcctctcgagaacgccgcgtcggccgctgagtccgcggccttgccggaggccggcgccgcctcggcagcgggctcgtacgcggtgctgcagtgcggcgaggactcggagtacgtgcggcagaagtacggcggctacttcgccgtcttccgcgcgctgctggaggaggacggcgagagctggcgcgtgtaccgcgccgtcggcggggagctccccaccgacgccgaggcggccggcttcgacgggttcgtcatctccgggagctgctccgacgcgcacggcgacgagccctggatcctggacctcgtcggcctcatccgccgcctccacgccgccggcaagcgcatcctcggcgtctgcttcggccaccagatcctgtgccgggcgctgggcgggcgcaccgggcggtcgaccaagggctgggacatcggggtgagctgcatccacccgacggctgcggcggcgcggctgttcgcgccgctgaagctgccggtgcacatgccggtgatcgagttccaccacgacgaggtgtgggagctgcccgccggcgccgaggtgctggcgcggtcggatcagacccgcgtggagatgttccgcctgggggaccgcgccatgggcgtccagggccacccggagtacagcaaggacatcctcatgagcatcgccgaccgcctcctccggcataaccacatcctggactgccaggtggacgtggccaaggcgagcttcgacgtgcggcagccggacaaggagctgtggaagaaggtgtgcaggggcttcctcaaggggaggctgcaggcgctatagcaattccactaaccgctgcagaggaggaaattgggatgtcttaggttaatttttaattcacccttgttttgtgcttcagagctcaagagttgtacataaactactattgtccgaagcattaataaactcaacaacatcgttctcgtac

SEQ ID NO: 14278 - DNA, 893 bp, Zea mays
  Clone ID: LIB189-002-A2_FLI
aaatcagcaaatcctatcttgtccgctgcccccgccgccccgcggttgggtcgtgtcgtgtccccacctcgtcttcgttctgctcctaccaattccagtcccagccatccgcccgcccaactatggcggcaacggctctgctactccccagcctcgcggcgctcacggacacgccgcgccgcgcccacaggttgctgcagccgcagctccagctccagcgcggctcccttgtctctcggtccctccggcctccgcggcgtcggcggctcgcggtctcggccgtgcaagagacgaaggagggggaggccaagacggccgacgagataaccgagaagtacgggctcgagttcggcctctggaaggtgttcagctccaaggaggaagagggaggcgaggggaagaagtcgcggacggaccaggccaaggaactcctggccaagtacggcggcgcgtacctggccacctccatctcgctctccatcgtctccttcactctatgctacctcctcgtcagcgccggcgtcgacgtgcaggacctgctcgcgaaggtcgggatcgtgacaggggaaaccggagggaaggtcgggaccttcgcgttggcctacgccgcgcacaaggccgcgtcgccgatcaggttcccgccgacggtggcactgacgccggtggtggccagctggattggcaagatcaggaagggcggcgactgatgcgccgccactcaagtacacttctcactgaatcatgtagtctatgcaaatagctatacataagcttatataggtgttctactagccggtgccagcgaatctatctggtgctgcttttgtaaaagctgttcgatgacgattttgaacaaccagtaatgaatgacgagtggagagagtttttgaact

SEQ ID NO: 14279 - DNA, 1264 bp, Zea mays
  Clone ID: LIB189-002-A5_FLI
gaggcgcggagcagccgcgaccgcgagaaagaaaaggaagccgacgccacgcacgccatcgccgcctctatcctctcctcgtcctctccctccccctctctctccctgctccacctccaccaaccaatacacacctccctctctaaataccacttcgtccgagagcacaaagcagggtatcttcctttcaaaagaaacttggctgggtgttgacgcacgcagccggcggcaacctgtgcggggagcgccaagggctccaggaaagaatcggccgcgggctcgcgatcgggaaggggagcggggcgcatgcgcgagcactggcacggcgacggcgacggcgaggacgagcatgagccccagccggggtgcggggagggcgcggggcaggcggcggcgaactgcgcggcggtgtgctgctgctgcccgctggcgctgctcgacgtgctgctgctcgtcaccgtccggctccccgcgggcgtcatgcggcgggtgaggaggaggagccggcgccgccgcggccacggaggtgccggagccaaccggaagaggccggcctccgcggcgcccgcgtcgccttcgggaagcagcggcaaggcgatgatcggagcggcgatgctagacatcgaggatgaggcgcgtggcgaggtggagtcggcggcggcggcggagctggagcgcgagatcatgagctcgcacttctacggcgccggcttctggcgcagcgtctcctccaactccagctcctcgtccaggcgctaccaatagaggccaggcgcgttctggcgtaaatagtgagtactccgtcgctactaaactacaaacgattactccgcgcctgtttggttcgtggctaactgcgccacactttgcctaaggttagtcgttcgaattaaagaactaactttaggcagaaaagttaggtaaagtgtggcaagttaggtagcgaacgaaacagtcagcgcagcatgcatggcaacaggatgcatggcagtcagcgcagcatgcatggcaacaggagcagcagccttcggcatcgtgcaagtgaccgtgcacttattctgaatggacacgtgcgaaactggcacgtgcgggttggatcattgtactgctacgccattgtctcgagcatggaccacgccagcagctgcagcttgggatggagaagcgaaaggggtcagtgattgtgcttaggtttttcatctctctcctaatcttttttttgtgtaactggagcaggaaatgctgaaacctcaagcttctgtcc

SEQ ID NO: 14280 - DNA, 621 bp, Zea mays
  Clone ID: LIB189-002-B10_FLI
tatgtagaagtacctagtgacagtggtattacattcaatgttgcacccaatatgaaggcgcttgaaattgctgagaaagccagggatgctctcctaagtggaaagtttgaccaggtacgtgtcaacctgccaaatggtgacatggttggtcacactggtgatattgaggccaccgtagttgcttgcaaggcagctgatgaagctgttaagattattttggatgctgtcgagcaagttggtggtatttaccttgttaccgccgatcatggcaatgctgaggatatggtgaaaaggaacaagtctggcaagccgttgctcgacaagaatgaccgtatccagattcttacctcgcatacccttcagccggtcccggttgccattggaggccctggccttcaccctggagtgaaattccggaacgacatccaaacccctgggctcgccaacgtagccgcaaccgtgatgaacctccacggatttgaggctcctgctgactacgagcaaaccctcattgaagtggctgacaactaaacactggccacctgtgtccaattttggttatatgtagttctgagaatggacattcaataatttatgtttgcaagcacgttgctcaaactc

SEQ ID NO: 14281 - DNA, 693 bp, Zea mays
  Clone ID: LIB189-002-B2_FLI
ggcctcttcagtagtagaaagaagggggagaaccgaaaagcaagtcatctttgaagattcggaacactcttcaacatattgtcttgcatttaaagtgattaatccaagtcatttgcctcctttgaaggagctgcaaaaattgatgagaatccagtcactgcgttgtcatgcactgtataaccatggcgccaccaggttatctgtaattccaattcatgcatcgcgatctcaggctctaaggtatttgtctatttgctggggcatagagttgccagatgctgtggtcattgttggtgaaactggtgattctgattacgaggaactgtttggaggtcttcacaagacagtcatccttaagggtggattcaacactcctgccaataggatccatacggttagaaggtaccctttacaggatgttgttgctcttgatagctcaaatatcattgcaattgagggatttagcactggtgacatcaggtctgctatgcaacaaaagcttggtatacccacacgatgacaccaagtgcgatctattttgttattaatagaaagaaacaaagaaaaaaatggccaatacaaatatacgatacaaacacttcgtttccattctattggaaatgcccgattttgcctgccagtcgtttaatgtatgtgtgccagtgtgtggtccctgcatgggttatgaatgcc

SEQ ID NO: 14282 - DNA, 575 bp, Zea mays
  Clone ID: LIB189-002-B6_FLI
gcgcgccacgctgagcgtcccggaccgcccactgttcggcctggggatgttcctcggtgccgtcgccgtgcggcacggcttcgacgccgggtgcaagcgcgccgagctgctcgccatcaacgacacgccgctgtaccacgacaagctcgttagattttacatgaggatgggtttcaaagcagttcatgaggttgatggatcatcaatcagtgatcttggtcacatgttggtgtggggaggtaggggtactagaatggatgctgatattgaagagcttcttattaagtggggaaacagattcagactacaagactaaaaggtggatggtaatactgatatgttttgtcgagacatgcagtttttgcagcatgccgcatacaaatcttgtttggatgcaataagcttatctaggatggatctatttttacccctggtgctttgacaatgtgatcgctgctaggagcatatatggatttgtacttgtatcttagacaaaatgacactctggtccttttttcatttgaagcaataaatctttgtgctggtggtgtcagctgccaacaatgattcttgtc

SEQ ID NO: 14283 - DNA, 442 bp, Zea mays
  Clone ID: LIB189-002-D1_FLI
tctggagccgtccgtgtccacgaggacatgcttctcgccgcatcgaaagcgctagctgatcaggccacacaggacaacttcgagaagggctccatcttcccacccttcaccagcatcagaaagatctctgcgcacatcgctgcagccgtggctgcaaaagcctacgagctcggtctggcgacccgtctgcctccccccagcgacctggtgaaatatgcagagaactgcatgtacactcccgtctaccgcaactaccggtagtgctgcggggatcaattttgcagtaataaaaaatctatcaacgcggatggtactctgttgtttatagtccctgctgctaaccacccttgttgctggtgctgctggagaggcattgtacctgtccatgcatatatgatatatatatgttgtaacgttgtgaaagcaaacaatcttgggtacc

SEQ ID NO: 14284 - DNA, 1398 bp, Zea mays
  Clone ID: LIB189-002-D5_FLI
cacttgcagctcagggtgcatttcgtggatttctggatacgaggacaccattgtatgctgtgggtgctggcaacctattaaatgcattacttgatgtggtacttatttttccacttggtctaggagtaagtggtgctgcactggccaccgtgacctctgagtacttgacagcaatcatcctcctttggaagttgaatgatgaagtagatctattgtcatggaatataattgaggatggagtcatccgctacctgaaatctggtggtctactaattggcaggacaattgcagtattcttgacactgacactagctacatccctggctgcaagggaagggcctgttccaatggcgggctatgagatatgcttgcaagtgtggttaacaatttctctgctcaatgatgctctagcccttgctggccaggctctacttgccagcgaatatgcaaaagggaattacaagcaagcccgcacggttttatacagagtcctgcaggttggtggtgtgactggttttgtccttgctgcttccttatttgttggatttggatctttgtccttgctgtttacagatgatccagcagttttagatgttgcacggtctggagtgtggtttgtcaccatttctcagccggtgaatgctattgcattcgtggctgatgggctctactatggtgtttctgactttgcttatgctgcatattccacgttttttgcgggagcggtctcatcaatattcctactattagctgctcctaattatggtctcggtggcatatgggctggtcttactctatttatgagtttgcgtgcagttgctgggttctggaggtagttagggagcaaaggtggaccttggaatgttatcttatctggtcagatagtaagtaaaacaaagatatgaccagattcgattgttcaattgatctcccaccggtagcaggtcggtagcaagaaatgtgcatcctgctgcaggccatatatagctgacaagcaatatatagcaagaaatgtgcatcctgcgtgacagggagctgatgcatctctgtggaagatgtacgcttgtagttggtgttggatagctgggctatcttgtggctgttgtacgggctcacagctttcaactgtgttgtaccatatactgtacaagaaagctctgttcagttataacgaaagaaagaaaactgggttcaaatagaatacaaaaggctgtgtaacgaaagaaagaaagccgagttcaaatagaaaatcccttcatgtaaatttcgttctggaaatcctccttgtgaatgaagctttatccaacattctaggattggtaaatctggtaatcattatttgtgtcattatgtaactcaatgatggtcagaaatataataatctgagttggttcttcc

SEQ ID NO: 14285 - DNA, 1614 bp, Zea mays
  Clone ID: LIB189-002-D6_FLI
aatgctaaatttaaacttcattcactgatttaccatatgtcacataattaacatctcaaacctaacaatagcacccaacgcgaccactccaaaatcatgaaaataatcacatcgcattcatcgaactaattcaataatactagacgcatccattcatcaatccaataattaagctaacaaaatatgaatcagcttacccataactaaatctgacgcgctatacgtgaacacggcaaggattccggttcggcccttgcgtcgagcacttgtgaacatcacactattagcttcgtcttcacctgactcttggaatttcttgatgacgcacggaacgacgacaatagggtcgagcacgacaaggagttctgaaaatcgacgtaggcagcacgcaattggaaaacagatcatcggagtcgacgagcacgtcgtggatacaacgtgggtcgacgacgaggttcatgacaagcgtcgctttcggacttcattttcttcttcaaccatagctccaattccacaccagatgaacgcaagaaccacacgggcttcgctttcttctccatcgactccattcttccacacacatacagacatgatggagttccggtgtcgagatgtcgaggaagacacacgtagagaccgagctgccagcgacgtggacagacgcgtacaagcattacagagccgacacgggtgtcgctggcggaccaaggtggactcgcaaggaccaagagcgcgcgcgacaccagggaaacagggagttgccgacagtgtagcagggacagggggaggagcgcggcgcgatggagattgaggggaaacagggagttgccgacagtgtagcagggacagggggaggagcgcggcgcgatggagattgaggccgagcgaaccgagagggcgtgctggcgggcaagaaggccgcgacgccatggacgaggtggagcgcgcacaggaaagactggcgagcacgcgcgcaaccagggacaaggcacggagctggagctgagcacaaccaagggagggacctcggcatcgcagagcagggagaacacgaaggctttcctcgatccgccacatttccacacggccgcggcgtgccatggtcgaacctaggcggattggtcggagcagggagcaagacggatgccgcagccagagggagtcaaggccgacgacgtccatggcagagggcagggcaagcgctagggagctcggcacggtggagcatgcgacccggggcgcggcggccatggcgtgcagaggacgccggcttggaggagcgcgcagagaaggggccagggcgcgacgcaggagggcgagcagggcgcttcggccgagcgagctgggaagcaggccgagctggagcaccacggcgcggagggagcttggcaagggcgcgacttccatgggcgaacaggggagggagtaaaagcagcagagagccatggatggaggagtggaggaaagtccggcacgcaggggaaaggggatccggtgcagggaggaaatgggacggtgctagggaggaggccgagctggcctgtgacgtggaggcgcgtcgcaggggagctcaccatggccacgagggagagatggaggtggaagacaggctgg

SEQ ID NO: 14286 - DNA, 1273 bp, Zea mays
  Clone ID: LIB189-002-D7_FLI
aaagaagctgctcagcgcaaagactcgagtgaaaatcaagggcagaatgatgctctagagctagacaacctccggatggagatgcaagctgacgaacgtccgttagaaccaggaaacaagagggacaggaagtggcagaaaaatgtatatggactcggatcagcttcgggacagaaggaaaccttgtccaggagagaaaatccacggtcagatagagggatggtccacagtaacgacagcaaaacaatttattacaggaagggtgggacggaagtcgataatgttgatgaccaccctttagaaaagcaagaccaccaggatacatcaagtgacggatctaaaaagagaagccgaccagtggacaacgcatctggtggcaacagaccatacttggatgagaacaagaagcgtaatctcagagaagatggaagatatgctcattatgaagactggagaagtgaaaggaatacagcagcagacacgtctggatataaggcccaatcagaagagaagcctgtatggacaaacactcgaacaggatcaagggagcattcactggacaggcaaaggatagagtgcggtgacagctatcgtggaacctataacaatagacaaagacatgaatggctgcacccgcacgctagtggtaattcctcgagaattggttgggatgacaggaggcagtggagttcatctcggtcaccatttccttcggctgaatttggtggtgaccgttcctgttctcgtgcccatccgagaggttctaaatacagaaccggcgggaggcatgatcacccccagtacctgggactgggaacacctcaacatggtacaagtagaccgcaccacacaatgggctgggacagggacaccttccatgatcaccagcatggcagaagaccgccgcaccacacaatgggctgggacagggcccccttccgtgatcaccagcatggcgaatacgacgactccaggtatggtgaatatgatgcaactgacaatggtcctgacagcgcgcatcgaccctacacggctgctggcgtggctggacgttcagcaccgagttatcagcttgctggtggttatggagagggatcaagggcttggcggccagttacggacaagtacgccccatggcccttgccttgaccgcacaaactaatattagccaaggagccagagtgagctacaagaacaccgtttgctattgtcggaaatgctttcttcgaggactgtctcagtacggggaattgatgggtcggtgttgaaaccc

SEQ ID NO: 14287 - DNA, 891 bp, Zea mays
  Clone ID: LIB189-002-E4_FLI
gaggaggccgagggcgagggcggcgcaggggcactcacggggacgctggtcgcaggagcgctactggttggtttcgtaggggggtttggggcggccggatacgtgtacaaggaccagatcaacaccttcctcacgcagttctcagggttcattgacggctatggtccagccggatatgctctgttcgtacttgtatatgcaggattggaggttctcgctattcccgcaatacctttaaccatgtcagctggtctattatttggtagtgtgaccggtacaattattgtttcaatcagtggaacactagctgcagcggtggccttccttatcgctagatacttcgccagagatagaattcttaaattggttgaaggaaataagaagtttctggcaattgataaagcaataggtgaaaatggattcaaggttgtcactttgcttcgtttgagtcccctgttacctttctcccttggtaactatctatatggcctgacttcagtgaagttcttgccatatgtcttgggcagttggttgggaatgcttccaggttcatgggcttacgtcagcgctggtgcattcgggcgagctataattcaagaggagtcggaaattggttggggaggaaatggacagctatggacattgggtgttgggttattgtttacggccatggctgccgcttatgtaacaaggctcgcaaaggatgctgtaaaggagatcgatgactagaatagtaggattctctagtagaaagggccctctggagtctgatagtatactagcacatcgtacatcactggcacctttggtgcaatcaaatctaatagaaattcagagcaattttctgagtgaatttgatctcttgatgtggtgccgattctcattgatcac

SEQ ID NO: 14288 - DNA, 1260 bp, Zea mays
  Clone ID: LIB189-002-F7_FLI
gcagagcaccaccaccatacgccgccaccgcaagcagacgtccccatggccatggcttccaccgccaccgctgctgcttctctccgcctcgccttccctctcctctcctcgccggcttcctcctcctcgtcctctaatacccttcgcttccctctccgccgccgcagcgccgcccgccccatcgccgtcaccgccttcaagaagctctccgaggcgtcccccgtgcccatccctcaggagcccaccgagcccctcctggtcgacgaggacgctctgcccccaaaggccggggtctacggcgtctacgaccccgccggcgagctgcagttcgtcgggatttcgcgcaacgtcagggccagcatcgagggccaccgccggaaggtccccgccaacctctgcgcctccgtcaaggtcgcggtatcagatgaggagacaccagatcgatctgcccttaacaacgcctggaaatcatggatgcaagaacacatagcggccaccggcaaggcgccaccagggaatgttgcaggaaacaacacctgggttggtggcccccagcggcctccagacctgcggctgacgcccggacgccacgtccagctgacggttccgctggagcagctgatacaccggctggtgaaggagaacagagtggtagccttcatcaaggggtcaaggagcgctccccagtgtgggttctcgcagagggtggtgggcatcctggaagggcacggcgtggatttcgtaaccgtcgacgtgctcgacgaggagcacaaccacgggctgagagaaaccctcaaggcgtacagcagctggccgacgttccctcaggtcttcgttggaggggagctcgtgggcggctgcgatatcgtttcgtccatggctgaaaagggggagcttgctgccctactaattcagaaatgaatgctttaccctacagtgacttgaattgcttcgatggttgtctgatccacacgtagtagcacggagatccaagttgttgtacctgctgtgcatgttggatgtggtacgtcccgagtttgaaaagcgtgtgatgtggtatggacgtgtggtttgcctgctgtttataggtagaagttgcctgaggacgacacacatattttttgttttatttatttgtggggatcggagagcgatcgagcctctgtttggttggttggatgtacgtagatggatgaaagagtcggccacagtttatataatgttcggatgaaagttaagtagagacgagttaaacactgg

SEQ ID NO: 14289 - DNA, 773 bp, Zea mays
  Clone ID: LIB189-002-F8_FLI
attaccattgtcaactgtcactcaagtgcaaaccattaccgtcgtcgtcccaatccccgtcgctgcacacgccttcaggacaaacccaagggaaagcagattataaatcactgagtgaagaggagtggaagaagcgcctgactgaagagcagtattatgttactcggcagaagggcactgaaagagcattcactggggaatactggaatactaaaacgccaggcatttatcagtgtgtctgctgcgacacccctctgtttcagtcatcaaccaaatttgatagtggtactgggtggccatcctattataaaccaattggtgaaaatgtcaagagcaagcttgatatgtcaatcatttttatgccccggaccgaggtgctctgtgcaacctgtgatgctcatctggggcatgtcttcgatgacgggccaccaccaacagggaagagatactgtatcaacagtgcatctctgaaattgaagccccaatagttgctggatactttagcaagaagtcaactataacgctggtccgccctatgtaaacttcgggtttctgtatataaactactcgagttgtagcatatttattattctctttgttatgtaatatatatgtgtccacaaaccgatgaaacaagcagccgctacttcactctggtattctggtctagaactaaggtattgtttggttgacgaattgtaacgtaaatgacaacggtaatggtttgcacttgagtgacagttgacaatggtaataaatttaaatagattttt

SEQ ID NO: 14290 - DNA, 1109 bp, Zea mays
  Clone ID: LIB189-003-A5_FLI
cgcgtcatcccaatcccaacccaattacgacacgcctgccgccgccacgccgcccgaaatccggaggggaagctcctcgacgacgtagcggccagtggcagctcggacgatggcctcgtccaactccgccgccccggctcccgccgacgggggcgacgacctcgaccagctcctcgacagcgcgctcgacgacttcaccaacctcgatctctctgcctctgccgcccccaaaagctccggcgaggcatcggggtcaggatcgggaggcaaggggccagtgaaggggctggggctggggcttccggaccccaaggcgccgaagcggcgcgcggggaagcagccgccgccgaggggcgcgtgcgccaaagaggcgctcgaggagctgacgcgcgagacgcgggaggctgtgcgcggtctcgagacggccactgggagtgtcccgtcactggacgatgacgccatgatggaggagtttgtcaagcagttccaggagttcgcaggggcacaggatatggactccattgttgaaacaatgatgcagcaacttctgtccaaggagattcttcatgagcccatgaaggacattgtagaaaagtatccaaaatggctggaagataataaagataagataagcaaagaagaatatgggcgttataataatcagcttgaactcatggtgaagcttattgaggtctatgaaaatgatcctgagaacatgactaggatttttgacatcatgcaaaacatgcaagaatgtggtcaaccccccagtgatcttgtccaagatattgtacctgatctggatctaagcaagttgggacaactgtctcctgagatgcttgaatcagctccaaattgttgcgtaatgtgaggaccaaaagcattccatttgggattcgaattccatgaagttttctttacctgtacgaacccccctttctggctttagtagattgaagataatttccatctggataatctgtaaagccttgcaaatatataatgagttcaatgttctttctggttcttgaatggaatctatattctttctgttgatgtactgtaacactcccttccctcttatacaatgagtacatgcattgcctttc

SEQ ID NO: 14291 - DNA, 877 bp, Zea mays
  Clone ID: LIB189-003-C1_FLI
gcaggtgtcttggcctcttgatctaattattaatacagaggcactgaagaagtataatcaggtaatgggattcttactgaaggtcaaacgagcaaagttcgttttggatgaaacacgaaagtggatgtggaaggccagaggcaggaccacgcacaatttcaaacaacacctaatagtggcacagaagctcctccattttgtcgatgcatttcatcagtatgtcatggaccgagtttatcatagtgcatggactgagctttgtgatggcatgacggctgctaccacactggatgaggtcatggaagttcacgaggcatatctctcttctattcaacgacaatgctttgtggcctctgataagctgtgggccctcattgccagtcgagttaagactattcttggattggcactggacttccacaatgtagaacaaactctcagtaccggtgggacggcttcagctgtgaggacacgatgcgagatggaaatcgaccggattgagaagcaatttgatgagtgtgtcatatttctcctgaggatcctatctttcaagctcaatgtgggtcatttcccccatcttgccgatctagttacaaggatcaattacaatcactatttcatgtctgatagtgggagcttctctgctattcctgggtcccggccacggtagtagactagtagttgagcaagcagtggacagaattgttggtgttgcacctgggtgatttttcctacccttttttgagaagaaccagaggcgtggtttgtttactttcgaaatagaaagctccagaacagtgctaatgcttctctctccaaattggaacaaaaaatcatgcctcgggcttgttacaatatctatatgtacattgttttc

SEQ ID NO: 14292 - DNA, 579 bp, Zea mays
  Clone ID: LIB189-003-E1_FLI
agaagagcgccgtgaagaggaagaaagctgacgctgcggcgaggcacgcggcgctgctgctcatgatggggcacgatgggttcacctccccagaggtgtgcctgcattacctatttgcatcagggaatgtggattccgtggtgcttggagcggctctggttgaacttgatggcggggaggtagtcaggttgatgagatatctcaacaagtggattcggaagtactggagcttctcagaagcgcacacttgcccggaggctgtgggaaacctcagattggagcagtgtgacagcgtgccgtcgtttggagcagtggctagggcgctaggagtgctgctggataatcatttttcacatcttgtgttgaatgctgatgtgagggaggacttgagggctgcggacttgatggtgagggagctcgctgccgaagcagagtcttctgggccaatcctagacttgctgcataggtttcaactggataagtgagagattgatcttattctgtcgaaactatttacttttgtacttccaaatgccgatgcatggaaatttttaactgttttattgcattgcagtgatg

SEQ ID NO: 14293 - DNA, 825 bp, Zea mays
  Clone ID: LIB189-003-E7_FLI
agacttcaactggccttggaagagcaaactgaaatggcaaatcatagccaacagcagtgtgataggctaagaaatgaacggatcttgtgtcgaatttgctttgaaagagacatatgcattgttatgcttccctgccgccatcatgttctctgcgagccatgctctaacaagtgtcagtcatgcccaatttgccgattgaccgttgagggcaggctatttgtttatgatgcagtgatgtcatccaatccatcatgttacgcagtttaaaagtgcacatgttgacagtatttgtagggtacctacttctggtgttgacaaagatggcccacacctgtttcctggcagtgaatgacaggttgtgaaattcttggtatgaaattaggaagaaagctaagaaagtcttctattatcagattgcagcacaaacaaaacaaaagccacgatgcacatccgtctccaatgatatgacacagaggaagacgaagtatatggactcttgctcatatatatgcaagcgtgaataaccacttaaataactgagtttgttctctagccatatatgacatctggccagtttcgattagtttgcaaacgagttctggttaacagttggatggataaccttgcaaacatgtggagcttcaggttgtttagaagttatttggagttcagcaaattggcaatatcccactgttcaactttgatgattccatgaattcacacaactgaggtaccaccttttccagtgatgttcacctgtaacggcttataaatacatctgtacagatgcgataataatgtctatcaattttatctccaaggcat

SEQ ID NO: 14294 - DNA, 982 bp, Zea mays
  Clone ID: LIB189-003-G1_FLI
cgtgcctccccctcgtcctcctgctcctagtcttctccgcggccccgtctccggctgacggctgcgaccgctgcgtgcgccggtccaaggccacctactaccaggcctcctcgctcgccctcaacgccgggtcgtgcgggtacggctccttggcggcgtccttcaacggcggcctgctcgccgcagccagccccgagctgtacaggggcggcgtcggctgcggcgcctgcttccaggtgcggtgcagggacagcgagctgtgcagcgccgccggcgccaaggtggtggtgacggaccaggcgcggacgtcgaaccgcacggccctggtgctgagcgccgcggcgtacgcggctatggccagcgccggcaacggcaaggccgcgcgcctcagggaccggcgcgtcgtcgacgtcgagtacaagagggtaccctgcgagtacgccaaggaccgcaacctgtcgatacgcgtggaggagaagagccggccgccaagcaacctgtccatcaggttcctgtaccagggcgggcagaccgacatcgtcgccgtcgacgtcgccaccgtggggtcgtccaactggcggttcatggcgcgggaccacgggccggcgtggagcacggcgcaggcgccgccggggccgctgcagttccggctggtggtgaccggtggctacgacggcaagtgggtgtgggcggagtcggaggtgctgccgcgccggtgggaggccggccgcgtctacgacgccggggtgcaggtctccgacgtcgcgcaggaagggtgctacccctgcgacacgcgcgagtggcagtgacgtgacgcgcgcacgggctggattgtagtagattgtacagttttttttttttttttttggtcgggaatgggacgaaagatatgaaatgatgatgagcggagccggagagccgaatcaaaccaaatcaaacaaacgtgccgttgcaagttggttcggccgcgttgctcgacccc

SEQ ID NO: 14295 - DNA, 1489 bp, Zea mays
  Clone ID: LIB189-003-G10_FLI
gaccgtatccgagcaggacagcaggttgttcagcgatcactcgagcggtcgagccctcgcgccgcggagagtgtctccagtctcaagtacagcggaggatggagagcggcttgcttgacaccgccgcggctgccggtctctgcccggtggcggccgggcgccgccgcgtcgggagcacgggcacggcgaggtgcttcctcagctgctcctgcgcttccagagactgcagggtgagcgcgtcctactcccactccatcagccggatgctgagcggggtgcggtcggcggcgcgcaagaggctcttcaggagcgacccggccgagctgctgggcgtcgccaactggtcggagacgggcggcggcggcgccgggggccaccagcactggtggacggcgctggagaacaacttcgtgctggaggccaccgacgacgagtacggcggggtcgtcgtcgacgccgatcggctgccggccgacagggccgccttcgcgcgctccctcgcggcgtcgctctcctactggaagtccgtggggaagaaaggggtgtggttgaaattaccggtggatctagccgagttcgtccctttagcagtgaaggaaggcttcaagtaccaccacgcggaggaagcgtatttgatgatgacgtactggatccccgatgaaccgaatatgctcccagcaaatgcttctcatcaggttggggttgggggttttgtgatcaacgaccaaatggaggttctagtggtgcaagagaagtaccgcggatcgtcgctggatggcgtatggaaactccccacaggcttcattcttgcgtctgaggaaatctacacgggggccagcagagaggtgaaggaggaaaccggggtcgacaccgagttcgttgacgtcgttgctttcaggcatgcccacaacgtggcgtttcacaagtccgacctcttcttcatctgcatgctgaggcctgtgtcgagtgagatcaagattgacgagacagagattcaggcagcgaagtggatggcgctggaggagttcgtgaagcagcccttcatccaggaagaccacatgttccagaagatcatggacatctgcatccagcgcctccgcaagtgctactgtgggctgacgccgcaccacgtcgtctccaagttcgacgacagaacgtccacgctctactacaatgtcgccgagcccgaggacgtgaactgcagcgccgcctgatgtaatatgatgtgagggggagggggagccaccccagcatctactagtctaatttttgctgcgcagaagtttcatgatgcagcagtgttagtcgtgcgattactgagagtgaaatactagtggcagactgcgcgaggcaatagagttgccgagcctgtacatatacgtgtagggcatatgcataaccagagagctgtatatcccggggcggatccccgggcaggaggaaaattttcattgccgccgtaaattacaatttaactttagctcgccct

SEQ ID NO: 14296 - DNA, 728 bp, Zea mays
  Clone ID: LIB189-003-H3_FLI
ccaccacttcctgcgcttcgctctccccagggaccacctagacttaatgtactcgtttgtggaatatatttgttattggtgccttcgtcacttgctgttttgcttccgcactggtaacttggggggatctagggtttcaggaggagagtggagatcatcccgatgatgatgcgaggtggaaggctcacgggtttgacctctcaggttctgaggtgcttcagcacggagatatttgtcagcagattatcattctatacgacagaggaagaattcaaagatattttttcaccatttggcaccgtagaggaagctcgacttatgagagaccaccaaactggaaggatgaagggatttggttttgtcaaatattcatcgcaagcagaggcagagaaagctgtcaaggcaatggatggcaggattctacgtggaagattgatctttgtggagatggcaaaaggacacgaaagcaagtaggacaccctccccacgagaggatttcactgaacatgaaacatgagagcgccatcagcttatgccagatggcaaatatcccaaattctcaattgatgttgcaacttatatacaaagcacaagttaattttagctagcttatctttgataacactgctaccttgccatctgaaaggttgccgtgtattggtatccgttgacctgtgtaagaaatgttggcagctctgtgccctacgaactagcctggttgattaacc

SEQ ID NO: 14297 - DNA, 701 bp, Zea mays
  Clone ID: LIB189-004-A9_FLI
ctaaagcgagcggcggtcttgcaccaggagttgctattcccaacgttgctgctgctggggagcagggacagcatatcaacagtaatacccgtgaccataacggcgcggtgaagggtgctgctccagctggtactggcccaagcaatgtgatcaacaacacagccagcatgccccccggcagaaacaacagcttcaagtcggtgagcagcagtccagctgctgctaccggtggcattgcggtgaactcgaaggtcgacgactccttccatcaactggaggacctcgacctcgacggcttgatcacaaacgaactgatggagagcgggttgttcggcgccggacaagggtggtgagcatgtcccaccacgcctcacactactatcgagttccttcaccgaaagcgccaagcaacaatataagctttgccacccttctctttctggagtttttgtgttgacagtttcagatgatcgtgccatatacaattatgtaaggtagcgagttggatttggcttgggagtcgggaacggcgcaatctatagagctgttagcgtgtgcgtatgacatgttgctgtggttatcattttcatgctatggaggagtgtcgattatagtctcctgttgtctggcacggcgtgagtgtgtgtttcccatggttctatgaaatcaaattatagaagaaacaagatctaatgtttagg

SEQ ID NO: 14298 - DNA, 970 bp, Zea mays
  Clone ID: LIB189-004-B10_FLI
ctccggacgaaatcagcggcggcggagatgggagcggagtgccggtacgaggtggcgcaggcggcgtacatcaagctggcgctgcacgcactgaagcacccggcgaccgccgtcaacggcctcctcgtcggtcgcctcgtcgagccttcgtcctcaccggccgtcgtctcggtcattgacgccgtgccgctttctcaccacccgcaccatctgccgctgctccccacgctcgagctcgcgctcaccctcgtcgaggaccacttcgcaacccagggcgaaggcctcgccgtcgtcgggtactatcacgccaacccgcgctgcgacgacaccgagctcccgccagtcgccaagcgcgtcggagaccacatcttccgatacttcccccgctccgcggtgttgttggtcgataacaagaagcttgaggaggccgtcaaggggaagttttctgatgcggtgattcagttacacaccagggattcatcaaaaagttggcgtcaggctggatcagatggaagcagtcagctgattctaaaagaaccttctaccaatgttgtcctagctgatcatgttacaacaaagaaatgggagaaaattgttgatttcgatgaccaccttgatgatattagcaaggattggtcgaacccaggcctccttgactgaattttcatgattgatctcgctatactgttttggaacttcgctagaaatgaggtggtgaagctcgtcctgctgtgctatggatttctctcagtcgcaacgagttgtaagcactaagcacggatttcattttaatgtaaatgagtgattttgtaacaattacagttcaaaatgctaaaattatgcagagaccatgagattgtttcaaggtcatgacaattattacgagttgtcacaaacaatttttgttcgtacatgactcttattttaaagaatgaaagttcacataaatttaagtgaaatgttgtagacg

SEQ ID NO: 14299 - DNA, 697 bp, Zea mays
  Clone ID: LIB189-004-B4_FLI
gcgaggactgcttcgtgctcaaggtggaggcggaggcgtccagcctgcgcgcgcgcaacagcagcagcgtcgagatcatccggcacacggtgtggggctacttcagccagcgcacgggcctgctggtgcagctggaggactcgcacctgctgcagatcaggtccagcggcggcgccggcgggagcgtcttctgggagaccaccatggagtcccgcctcggcgactaccgcgccgtcgacggcgtcaacatcgcccacgccggccgcaccgccgtctcgctcgtcaggttcggcgactgccaggacggcaacaccaggacgcgcatggaggaggagtggaacatcgaggaggtggacttcaacatctggggcctctccatggactgcttcctgccgcccagcgacctcagggagggcaaggagagccaggacgtcgccgtcgtcaaggccgacgcgcgcccgccgccgctgaggataccggcggtcaccgtgcgcgtcgggccctcgcaggtggctgccgtcaacatggacgactcggactcgctcgtcgcgaggtcatgactactcgtcacgtaccgtacgtacgtacgtacgtacttgcagtgctgagtgaagagcatgtatttgtacgtgacacttgtgttactataagatcatacatgtcgcaagatctgtaaatatattggaggttgagatct

SEQ ID NO: 14300 - DNA, 1253 bp, Zea mays
  Clone ID: LIB189-004-D1_FLI
cctcctcccttctctagttctctgatcctcagcacttagcatcaagcttagcacaccggcgagatggcctccacctccaccttcctgtccaccctcgccagcaggtccgcggcagccgatagcctgcgcagcgccgtgccgtccttcgccaagatcgtcaggttcttgcccgcgcaggcgcagatcagccgcaggcggcgcgcggcggtgctgcccacgccgagggcggcggtgtcgggcaccgagaaggcgccgtcgagcaagcacgagcgcgtggtcagggtgcacagcacccaggagttcgacgacgcgctcaaggccgccaagaaccggctggtggtggtggagttcgcggcgagcgacagcgaggacagcagccagatctacccgaccatggtgcagctcagccgcacctgcggcgacgtggacttcctgctggtcctgcgcgacgacgagtcggaggccaccgaggagctgttccgccgggagggcgtcacgaaggtgccccacttcaacttctacaagggcgccgagaaggtgcacgaggaggaggccatcggccccgagcggctcgcgggcgacgtcctctactacggcgacagccactcggcggtggtgcagctgcactcgcgggaggacgtggaggcgctcatcgacgagcaccgcggcgacaagggcaagctcgtcgtgctggacgtgggcctcaagcactgcgggccctgcgtcaaggtgtaccccaccgtgctgaagctgtcgcggtccatggtcgacaacaccgtcttcgcgcgcatgaacggcgacgagaacgacagctgcatggagttcctcagggccatgaagatcgtggaggtgcccactttcgtcttcatcagggacggccagatcgtcggccgctacgtcggctccggcaagggggagctcgtcggtgagatcctccgatacaacggcgtcagggtcacctactgaagtgaagtagtgaacaacaaaccagtcagagtcagagcaagcgcaagccgacaagcaacgcttcgatacaaaattgaagacgatacaaaattttagattactgcgacatccatcgacgattggccgatgtttagactgtttattgtgtaccattaccatacttgcccgttaatcgctactattcaatagtaatagtaggcttttgtagggctagcagctgcttgctgctttgcaactttaatcttgtttggtgatctatcagcttgattgtccaactagtgtcttgc

SEQ ID NO: 14301 - DNA, 880 bp, Zea mays
  Clone ID: LIB189-004-E6_FLI
actcgcctccacggctccaccatgtatcccaaggcggcagacgaaggtgcgcagccgctggccacgggcatccccttcagcggcggcggcggctactaccaggcgggcggcgcgatggcggcggcgttcgcggtgcaggcgcaggcgcccgtcgccgcctggtccaccgggctctgcaactgcttcgacgactgccacaactgctgcgtgacgtgcgtgtgcccgtgcatcacgttcgggcagaccgcggagatcatcgaccggggctccacgtcctgcggcaccagcggggcgctgtacgcgctcgtcatgctgctcaccggctgtcagtgcgtctactcctgcttctaccgcgccaagatgcgcgcgcagtacggcctccaggtgagcccctgctccgactgctgcgtgcactgctgctgccagtgctgcgcgctctgccaggagtaccgcgagctcaagaagcgaggcttcgacatgagcataggtacggtacggatggcatgcgaacatggagaggcaggggcgcgccgccgccgccgtgccgccgcacatgcatcctgggatgacccgctgacgctctgccgctcgcctcacttctgctgaggaaatcaagtgatttggtattggtccgctcccagcaggcagtatcaactactgtaaccaatccatgatctgtatgcggtatcgggctgaactgatactttatggacttgttgcttcaacttagtccgtaaaacgctcaagaccacatgaaaatatggtccataaaacttgttcaaaaatagacattttgcactatattttaattctatgagataaaccatgattatgtttaatctctactactattaaaaacttaaggggtagtttgccttcc

SEQ ID NO: 14302 - DNA, 717 bp, Zea mays
  Clone ID: LIB189-004-F1_FLI
tgtcgacggcggcggcgagatcggacggcaggctgtcgagcttgcggcccagctgcgccagcacgaacagcgcctccccgcgggcgtcgccgccgccgggcgcgtcgtcgccgtggccgccgtcgtcgccgccaccctcgccgccgtcgccgccgtggtggttgtggctgtcgtcgtcgtcatggccgccgaagccgccgccgccgccgacgtcggaggctgcggcgtcggcggaggcggagggtggtggcaggagcgcgcgcgggaggggcgtgcccggggggaggctggtgcgcgcaatgcggaggcgcagcggcggcgggagggcggcgcgcgagaaggggagcagcgggaggcggccgggcgccttggtcgggaggtgcaggtgcaggggcgtgggctgcgctgacgcggcggagagcgacgacggcgaggaggacggcgggagggccatggtgggtagctagctaaaggcgagcgggggtagctcaccgcggggcgcgagagggagcgctgtacgcggtggggggttatgtacgagtgggcgctgggcgggcggacgcaacgaggcggcgagggaagaacgttggtgccgccgtcaaagccttgatcagccaacgaggttactcacgttaacgagggaagcaaaggcgagcgcacgacgaggcgattggttgcacttgcacgcatgccccgcgccgcgctccaccagccagg

SEQ ID NO: 14303 - DNA, 1890 bp, Zea mays
  Clone ID: LIB189-004-G5_FLI
catcttcaagccagccgtctccttatccctgcgacgccgctcacctaggctcatcttccagccgccctctccacccagcagcagagcacaccatcctctccactcggatccccaagccctcgcctccatctcttgccacgacatctgtcccctgctcgaacctccacccggccgcgtcctcgccggtggccagcgccgctgcatcgcccttcctagcgtcggccttggcaccgcttccccgagcgccctagtcgagctcgcccatcctctgctctagccctttctcaacgccgtcgctgagctcgcccctcccctcagccatggacacgacgacctgcaacccttcttggtggccaagcccatcttcctgctcgcgccccgtctttttccacctctgcgcgtatcagctcgtccaacccccatggtgtttcctccctctcggctcccttgctccctccccatggcgttccccctggatgttggtgatctgttccccacggtgcaggcaaatgttctttccctccctgcagcagcaccttggtggttgtcgagcagcacatcgcacttgcgcagcctaggtcacgacgttgtccacctcgctaaccattggtgtcatacctcacgtgtcatgtgttcgacgaaatgcctaaacatgtagtctgtcgtcgtcgtatccacagtcaattttagtcatggtacgctaatgatcgagatgcgacagccagggtctaggttgaccccaagtggtgcaaaggatggcctacttcgagaggcgatgtcggcggaccaatctagaagattgatgatctctacataaaaataggattacattgattcaaatctgatctggtgtttggcatttgttttccccctacattagtttctcattattatatttgtatagattcatattcttgagactaacctaatcagcattctttacataataatattataaggaggattaatttcatatacaatactatatataatgagatgaatcatttggccttagatagataattggcagcctatcaaaaatttcataagtgtagaacaatttttttgccgttaacatagtgtataacatttgatgtcgtaatttgtttggaagaaaatttaatttcaacatagaattttttaccgataggtttatggtcttttaatatctacaggttgtggaaactgagatcattgtaactcaaatgagagcttggcacttagcatatagatgccactagaaccaatttggaattactgtgaggaaaaacggatatagagtgataaaaggcattaatgtaagtactacataaatgtactacttgtatttttcaataatcaatgcttcaaaagtctatatatatgctgactggtgtcagggttttcccattattgtaagtttgttacaagcaagtgctttccctcacacaacttcaccttttctttgcatgtttattacttttgtttgctggttttgacttacagcgaattgtgtatgcaactactgtggcatatcagtgaccttccgagaagatacaatggcgtttttagtagtaacgctgcttgatttctatagttggagtcatcacacagctaacatttgcacttgaactgtttagtgaaatgcttaggagaaagaggccagcaagaatggagtcatggaacatcggcagaaggagtgcagcagcggcaaccgatgtatcccttgaacaatctggttttgacaagatgcaaatcaatctagtgtacactggattccacacttgcaaagattgtttggctaattacaagattatctcattgttttggtttggattaagagtacacttatgtatgaaatattgattggtactcatttatattattttttattatattattattaaatat

SEQ ID NO: 14304 - DNA, 1223 bp, Zea mays
  Clone ID: LIB189-004-H11_FLI
ctaacctccttttttctctctctatctttctctccatctgtggacttctccggttttgtttgacgagatgcctgcgctcgccgtcgacgccgcgacacccgtggcgcacgccttcgcgtcctgcgacgcggcgcgcttccccgccccgcccgtggtgggccccgccgccgcggccgaggccgccccctggtcggccgacctctccgcggcgctctacaacgtggacggctggggcgcgccctacttcttcgtcaacgacgacggcgacgtggccgtgcgcccgcacggcgccgcgactctcccgggccaggagatcgacctggccaaggtcgtggccaaggccgcgggcccgcgcgccggaggcgggctcggcctgccgctgccgctgctcgtgcgcttccccgacgtcctgcgccaccgcgtcgagacgctcaacgccgccttcggctacgccgtccgctccaccggctacggctcaaggtaccagggcgtgtacccggtcaagtgcaaccaggacaggtacgtcgtcgaggacattgtggagttcggcgcgccctttgggttcggcctcgaggccggctccaagcccgagctgctgctcgccatgagctgcctcgccgcgcgcggcggcctggacgccctgctcatctgcaacgggtacaaggacgacggctacgtctcgctcgcgctcatggcgcgctccatgggcctcaacaccgtcatcgtgctcgagcaggaggaggagctcgacattgtcgtcgaggccagccgccgcctcggcgtgcgccccgtcgtcggcatgcgcgccaagctgcgcaccaagcacgccggccacttcggctccacgtccggggagaagggcaagttcggcctcagcgccgcgcagatactgtccgtggtcaccaagctcaaggccatcggtatgctcgactgcctccagctgctgcacttccacatcggctcccagatcccgaccaccgccctgctctccgacggcgtcggcgaggccgcgcagatctactgcgagctcgcccgcctcggcgcggacatgcgcgtcatcgacgtcggcggcggcctcggcattgactacgacgggacccactcggcgcagaccgacatgtcggtggcgtacagcctggaggagtacgcgggcgccgtggtggccgccgtgggccgcgtgtgtgaccgcaagggggtgcagcaccccatcatctgcagcgaga

SEQ ID NO: 14305 - DNA, 697 bp, Zea mays
  Clone ID: LIB189-004-H12_FLI
cgcgatctgagggagcgtgctctccgtcttcttcatcaggaagggcgtctccgtgggcgcctccggcgcgctcttcggcctcctgggagcgatgctgtcggagctcatcaccaactggtccatctacaccaacagatttgcagccatgctgaacctgatcatcatcgccgccatcaacctggcgctcgggatactcccgcacgttgacaacttcgcgcacatcggcgggttcgccacaggcttcctcctcggcttcgtgctgctgatccagccccagttcgggtggctggagcagcccttcggtgccaagaccaagtccaagtacaaggcatatcagatcatcctcctgcttgctgccctcgtcttgctggctgcagggttcgctgttggattggtaatggtgttcagaggagagaacggcaacgatcactgtagctggtgccactacctgacctgcgtgccgacgtcaagctggaagtgtgacaattgaactgatcagagattagtgacgggttagcatgcttgcgtcgtacagaagagaacatgcgtccccaccacgagagacaatgtcaagatagatacgtgcccctcaccttctatgacattgtcaatgtattgctttcaagtttgatttttaaagtctgcattgtacagaattctcctgcctccattggatccaaataaggagtttattggt

SEQ ID NO: 14306 - DNA, 1093 bp, Zea mays
  Clone ID: LIB189-005-B9_FLI
gtggatttcttcgacctcgtgatcgacgagctcaacaagcccgaccctataatgaacgagaacatcgcgttggacctgttgttcctgctcctcttcgcgagccacgagacgacgtcgatgggactgaccgcgatactcaagttcctcacggacaacccaaaggccctgcaagaattgaccgaggagcatgaaaaaatcgtggaaacaagggtggatccggactctgatatcacctgggaggagtacaagtctatgagattcacatctcatgttatacatgaatctcttaggctagcaaacatcgctccggtggtgttcagacaggcaaaccaagacgtatacataaaggggtacactatcccagaaggatcaaagatcatgatctgtccatctgcagctcacctgaactcaaaggtttacgaggaccccacggcgttcaatccatggagatggaaggatactcccgaaccagttggtggttcaaaggattttatggcctttgggggtggtttgcggttatgtgttggagctgactttgccaagctgcaaatggctatgttcatccactgcttggttaccaagtacagttggaagcccatcagcaaaggaacgatggtgttttatcccggtctacgatttccggaaggctttcacatccagcttcttgcaaaagcatgaaattttattgctggaaaagatttgcacacggggtactaaaaatatgctttttcgttagtaattatagttgtgtaataaaaaaactaaagagacaattgaatatgagtaggttttaattggtcatatctaatacacataaatatacgaacgtgctactaaacctcataaagaaaagcgaactagagcaagacttcaagatcacgcatcagcctactgtacgtgagatgcccaaagcacgtacgagcggtgaccagcaaatcagaaatgcgaagtacgcgcgtagatgaaaggcttttttttttgaaaaaatggtttatgtagtatggtttcccaattttcaagatgtatgcctttatactgaatgttgtaatgtaatgcatgtaattgtttccacttatatataataagttcagct

SEQ ID NO: 14307 - DNA, 1090 bp, Zea mays
  Clone ID: LIB189-005-C1_FLI
gcgacgacgaggaccttctgtactgcgtgccggtgttcgaccctatgctcgccgagttctacaaccccgtggccgacgagggggagcagaagccggcctgcctgatgctgcctctcgtggaaacatcgccggagttcgcctccggcggcttggcagaggcggacgggctctccggcttcgacgtcccggacatggatctcgctagcttcgcggcggacatggagagcctcctcatgggagtcgacgacgggtttgacgatctgggtttcttggacgaacagaatcctcaggtgaacgcggacgtggacttggaggccatggcggcgccggagcctgaacgagaggacaagaaaaggaagcgggacggctttgattatctgggtttcttggacgaagagaagccacaggtgaacgcggacgtagacttggaggccatggtggcgccggagcctgaacgagaggacaagaaaaggaagcggacggatgtgatactcaagctcaactacgagggcgtcatcgcctcgtgggttcgtgacggcggatcaccgtggtaccacggcgagcgtcctcacctcgacgatccttacgagctatggttggagttcccggcaacgggaagccggggacttttcggcggcaccatgacagcggtgaccggcggcgagcgtgaggcacgggtgtcccggtacagggagaagcggcggaggcggctgttcgccaagaagatccggtacgaggtgcgcaagctcaacgccgagaaacggccgcggatgaagggccggttcgtgaagcgcaccacgctcccgccgctgccgaggccgccgccgccgtcacagcagcaacagaagaagaaacaactgccacgcgcattgccacacgtgggcatggtgctcgcgccacctccaggagcggacgggcgcttccggttttgaatctttgagatcacgcacggaagcatggaaggctcggtatcaggtgcacaacggagggatagtgcacaaatgcacaaacttgatcctggccttccatctcccaatgaacggtcaccgtcaaaattgcaagaaggcccctccgcacctcctcctccttt

SEQ ID NO: 14308 - DNA, 670 bp, Zea mays
  Clone ID: LIB189-005-D4_FLI
tcccggatcccggcggtttacccctgcggcctccgccgctccgcggctctgcctcttcctccgcttctccttgccccgcgtgcgcgacgaacgccgccgcctccgccctaagagtcttcgtcggaccctccgtcaggattcttcggggcccttcgccggcgacgatctgacgtgacgatgtctggtcatacccaacctgaaggaccacgccaacttgattcaaaacatgctgtgaattcatgccgaaagaatgtacccggtacatcgttcgtctcagatttgagggatcacatccacgagttcatcaatgcatctgcagatgaacaccggacatgcttcacaaagactctcaaaaggatgttcaatatgtcaaagactgtcactgatagatcctctgaagcagaggaagctggacccgaaagtgtcttgccgcttcagaccacagtgtcgcggtagaagttccgccacttcatattgcctctgtagaaataggataaagctagaaagactcgccctccgcagatggagaaatttgttattttgtcactctcaattttgactctattattattacattatgtgtctatgactggtcggatcatctgtatctataatttgtggatctgattatagattggcgaagcccacaaataataatagcaaaattatc

SEQ ID NO: 14309 - DNA, 938 bp, Zea mays
  Clone ID: LIB189-005-E10_FLI
agccgagcagaagtagcgcgtcaggcaatggctccggcaccggtggccgctcccgtggcttcggtctcccgcgcggcagctgcgctcgcccccgccggcgccgtccgctccgccagggtagcctccctgcaccctttccactcttccaccaaaatcgtgctgctgccaccacggaccgccctgctcagatccgccaggcagaggcggcgcttggcggcacggagcagcacctcggagagcagcacggatgactcccaatccctgaaacaagacaaggcgccgttcgggtacacgaggaaagacgtgctgctgatcggcctcggcgtcaccgccttcggcgtcggcctcaagtacgggctcgagctcctgggagttgaccccttgcaggccggcaacgtcgtgcagctgctggtggtgctcgggatgacggtggggtggatctccacctacatgttccgggtggccaacaaggacatgacctacgcgcaccagctcagggactacgagaagcaagtcatggagaaacggctggagagcttgtcggaggctgagctgcaagctctgctcgagcaagtggaggaggagaagcagcgcgtgcctcaggtcccggaagagcctaacgctattaccttcaggaagaaatgatgatcgttctattatctgccaaatggacaccgacctagcttgtttatagcatagcttcgccttcaatagctagctgcatcgatattttaagatctgtacaatacgccccgctaagccactagtgctgtcaaacatgaaattatccattttctgccgcgcgccgttatgggacaataccgtagcaccaagaaccaaatccgttctttgagatatcattgtcgttgtaactatatcatccgcaaagctacagtttgggaggtcttcagcattgcctgtttgatcttccattggtt

SEQ ID NO: 14310 - DNA, 1524 bp, Zea mays
  Clone ID: LIB189-005-E7_FLI
tccaccccgaccgacctatcctaatcggcgatggcgacggtggcgatggacatctcgaagcccacgccggtggcgtccggcgacgaggccgcggcggcggccaaggggaggagcggcggagggggcgaggggctgcggcagtactacctgcagcacatccacgacctgcagctccagatccggcagaagacccacaacctcaaccgtctcgaggcccagcgcaatgacctcaactcccgagttagaatgctcagggaagagttgcagttgcttcaagagcctggctcatatgttggtgaggtggtgaaggtcatggggaaatcgaaggttctggtgaaggtacaccccgaaggcaaatatgttgttgatatagataagagcattgatatcacaaagatcacaccttcaacaagagtcgctcttcgtaatgacagctatatgctccatctgatcctaccaagcaaagttgatccattggtcaatctcatgaaagttgagaaggttcctgattctacttatgatatgattggaggtcttgaccagcaaattaaagagatcaaagaggtcattgagcttccaatcaaacatccggaactatttgagagccttggaattgcacaaccaaagggtgtcctcctttatggacctccaggcacaggaaagacattgctggcacgtgcggttgctcatcacactgactgcaccttcatcagggtgtctggttctgagttggttcagaagtatattggtgaaggctcccggatggttcgggaactctttgttatggccagggaacatgcaccatccattatatttatggatgaaattgactctatcggatctgctagaatggagtctggaactggcaacggtgatagtgaagtgcagcgtaccatgcttgaacttctaaaccagcttgatggttttgaagcttcaaacaaaattaaggttttgatggcaacaaacagaatagacatcttggatcaagcccttttgaggcctggccgcatagacaggaagattgagtttccaaatcctaacgaggactcacgtttcgatattctgaagatccattcaaggaaaatgaacttgatgcgtggtatcgatctgaaaaagatcgcagaaaagatgaatggggcctcaggagctgagctcaaggccgtatgtacagaggctggaatgtttgctctccgtgagagaagggtgcacgttacccaggaggacttcgagatggcagtggccaaggtgatgaagaaagacacggagaagaacatgtccctgcgcaagctctggaagtgaggctcatgccttgatgtacccaccaccacctttcacggcctctccctgaacggtgtaacggcatgctccggaccttttgcgacgtgccttgcatgtctgtgtttaaaggtttccttataacggttctaatatgttgttgccaagttgaattcatcagatcagctaggttacggtaccactgcatttgctagctcgcgatgaaccctgcataatggttactgctct

SEQ ID NO: 14311 - DNA, 798 bp, Zea mays
  Clone ID: LIB189-005-F10_FLI
gttcaatctgaagggcaaatggcacttggacgtagcatttgggtgcctgctattcccactagttaatctactctcacacataaacatcagcctagttccagcgtcaccaggtccagctgtcggggtttccagcgtagaacagtccatcgtggcccgggatccagtggcaatggctttgtatgctgtggtagtcacggtatgcgcgcctatatgggaagaaatcgtgttccgaggattccttctcccgtctctaacacggtacatgccactcccatggtcgatcctagcgagcgccgctgcgttcgcgctcgctcacttcaacgcacagagggtgatgccgctagtgtttcttggagtggtgatgggaggagtctttgcaaggtcgcgcaacctgctggcgtcgatggtgctgcacagcttgtggaatggatttgtgttcttggatttgatgaagtgagcagctgagctggagttattgtttcggttccaaccttggacatatctgcttgagcctcgtctgaaaatgttttggacaagattggttctattcttttttcaggattaaaagcaaggcatctaatgcagcggcggaacaggagtcgtgtaagtctgaagcgaagagggaacagttagtgcaggaaaatagaccacagaacagaagaaatgtttatttttttcagaattttgtgtagaatgatcagtcactgcagtcttaggacctgtgcccagcttccataagcatctgccacatttttgtaaattgcataggcgggagaatatttgtctcgtcgtgtatag

SEQ ID NO: 14312 - DNA, 972 bp, Zea mays
  Clone ID: LIB189-005-H8_FLI
gcaacgggtgccgcgtgcttcgcaaggggtgcagcgacgcgtgcgtgctgcggccgtgcctgcagtggatcgacggcgccgaggcgcagggccacgccaccgtcttcgtcgccaagttcttcggccgcgccggcctcatgtccttcctcaccgccgtccccgagccgcagcgcccagcggtgttccagtcgttgatgtacgaggcggccgggcggacgatcaaccctgtgagcggcgccgtggggctgctcggcgcgggcagctggcagctgtgccaggcggcggtggagacggtgcttcggggcggcgccatcgggccgctgcccgagttcgacgggggccgcgacaacacgtttgctctggcggcgacggcgaggcgggccgtggggtgctcgacgttctccacggcgaagcggggggcgccgacgagggcgaacgtgggggcggcgcctcccgtcccgccggagccgtcgtgcgacctcgggctgtggctcagccccgggtcgtgcccggcgccgggcgagcggcggcggcggcggcccggcacgccgtccatgacctccgaggagtccgtgacgacgacgagcggcggcggcggcggtggagggagggagcccgagctgctgaacctttttgtctgagactttagctacaccgacggcctggctaaaaggccagcggccgatcatgtttcatgtggcgcccctcggcgcgcggtgtgctgtatgcttgatctgatcccggcgaaaacgtctgtctagctagcggcgtctcgccggcgaggtacctgtagtcttcttcttccttttttgggcgcgtagaaaccatgggccaccaccgcccaccggtgccggcacctgcctgcctgactccgtccgtcaactgtttattttgtttcttcccaactttgttggcaagcacaaagcagcgttaccgctccgtcgctgaataatacaattgtaaaccaagggt

SEQ ID NO: 14313 - DNA, 599 bp, Zea mays
  Clone ID: LIB189-006-C11_FLI
cccacgcgtggggtttgtcatacttgccagtgatggattgtggaaggtaatgaagaaccaggaagccgtcgatctcgtgaagtcaatcaaggatccacaggcagcagcgaagcgattgaccactgaagcgttggcaaggaagagcaaggatgatatctcttgcattgtcatccgtttccgctgctgagttaccctctctccacggcactgatacccagtcttcgcctcatgatttagattgagacaatttgtctttgccgaattttccgatagaatatgctgtacctatcgtagctgtcgataggcctggaactaattaggatagtgaagacttgagagctggttggtgagtgtgtgcagggtgcccattcgcctgtgcatatgttgactctgcatccgttgatccggacttgggcgattgttaggaccttagtgcttgtgtgcttgtgatggtaatggacctaatggcttatggtggtaagggaacttgttgttaccaaatttggttaatttagttttttttcatggttcgcatttcgtagggtagatgcatctgatttcaaggaaacatattattagttcaaagtgttcttgatgtt

SEQ ID NO: 14314 - DNA, 542 bp, Zea mays
  Clone ID: LIB189-006-D7_FLI
ttttgaatcaaagttagctcgtccacatgcccggataagaacgggggagccagtgcgactggaggatgtcaaggattgggctactgatgtaatcgcagattcttttaccagagcagaagaagctaccaagaaaaaatgatttagaagaatctaaaacacccggtgtatctgctttatcgtttctctgaatctaaaacacccagttgtaaccgagttcttttacagatccatgaccatatgggtattacggccactatggtattctgagagtgaagccctgagtcccttggtctatgtttcggtgcaccatggtaaacaactgcttcacccgggcctcttggagaaagagcgatataataaagaatagtaggtgaattgacacggtgcaatttctcttaaaattttgcgccatgtattgatataaggttaatcgtaccactactttgttcttgtttatatactccctccaatgtagtaaatgtagtcgtttaggacatgattgtgcataccaaggagtgattaattatcatagagttttccct

SEQ ID NO: 14315 - DNA, 591 bp, Zea mays
  Clone ID: LIB189-006-D9_FLI
gtggcggcgcactgccggacgtgcccgggcggcgcgtacctgtgcggggggtgcgacgcggggcacgcgcgggcggggcacgagcgggtgtgggtctgcgaggtgtgcgagtgcgcgccggccgccgtgacgtgccgcgccgacgccgccgcgctctgcgccgcgtgcgacgccgacatccacgacgccaacccgctggcgcgccgccacgagcgcgtccccgtgcagcccatcggcgccgccgctgatcccgccgcggagaaggcggcgctgctgttcggccttgccgcggaagggaaggacggcggcgacgcggccaaggtcgtcgtcgacgccagtaagctggacctcctgttcgcggacgacgtggtcgacccgttcctcgcccaagacttcgccaggttcccgcacgccgacagcgtcgtgccgaacgatggatccaactgcggcgccgctgtggacttcgactttggtggcggcgtcgccgtcgccgccaagcagccgtcctacagctcctacacggcggcgtcgctgggccacagcggctcgtcgtcggaggtcggcctggtcccagacgtgatgtgcggccgc

SEQ ID NO: 14316 - DNA, 1128 bp, Zea mays
  Clone ID: LIB189-006-F4_FLI
gcgcggcctcgccttatcccctccgtcactcacctcgaccaccgccatggccatggccttggcctccgcgaccgccgccgcactcttccgctccgccctgtccgcgccacacggcgccggcgcgcgcgtccggccgcagcgccggcagccgttcttggctccgctccacgcggcgaagggccccggctcggcgccggtggtgctggagggcaaggccaagggaaagaagaagaaggggcccagctccgggaaccttcccgcagccctcgacgtcgagatcagggaggcgcaggagtacctcgacagcgaccagcaggaacctgttccagaaaactttccatttgaattaatcgacgaagagggtatgagcgtggttattttgagaagggactacaaggacgagaaggtcgaggttactgtcagcatgcctaatttagaaggaggccccgagtttggtgatgaggatggcgagggcgatggtgagagcgctgccaaggacgacggagaagcagaagaagatgacgagagtgccggggagagcagcatctctcttaaggtggtagtttccaaagactctggcccagagctcgagttcacatgcacagccttccgcgaggagatcaccatcgatgatatgctgatagtggagaaaacagacgacgacgacggagaagagaagttcccctacgagggccccgagttcaccgagctccctgtgaatgttcagaaaggcctgttcaagtacctggagcaaagaggggtaacgctgtcggctaccaactatatgcacgattacatggtgactaagcaggctcaggagtacatccggtggatgactaagctgaaggatttcgtggcgcagtgaggaacagcgtcgtgattcggcagcattgtttggttagcctagccttagcatgtgttacagccttacaggaacactacgactacaccgaattggccacactccccaaaaaacaaaaaagggggagcattgtatctgcttcaatgtatctgtatcagctggcaaaacagtagcaagtagatttccagtaatgtttagtggtgggcattaggtattacgatacgtatctggatgaatgttttggaattctggtggctgttagaaat

SEQ ID NO: 14317 - DNA, 956 bp, Zea mays
  Clone ID: LIB189-006-G11_FLI
agcttttaactttctcaggacacgggagcccttcttgccacaaaagttttagttccaactgggagagctagcatggcaagttcgcgctgctttgagaacccgccggtgctggagccggccagcggaggaggcgaggtggttgacgacttcggcgggcagaaggcctacgtcagcggctccgccgggtccaaggccgccgtcgtcctcatctccgacgccttcgggttcgaagcgccaaacctgaggaagatagccgacaaagttgcttcgctcggttacttcgttgtggtgcccgatttcctgcatggggatccatatgaccccagcaataatgcccatagcaatcctggaacgtggatacagtcgcacaatccgcaaacggcattcgaagaggcaaaaccggtaattgcggctataaaggagaagggtgtgtcgagcatcggagctgcaggttactgttggggcgcaaaggtggttgtggaactggcgaaagttcacgagatccaggctgctgtgttggcacacccttctttactaactgtcgatgatatgaaagatgtcaagtgccccatttccatacttggagctgaaatcgacaggtcagccccgcctgaattgctaaagcagtttgagcaagttctttcagcgaaccccgaggtcgatcactttgtcaaggtttttcctggcgtagcgcatggatgggctgtgaggtacagcgacgacgacgcagcggctgtcacgagtgcggaggaagctttgcgcgacatgagccactggttcaacaagtacctgaactgaattatgtggcggcatatgtgcgtgcaataagctcctaatggtgaacattatgcagggcccccatgctatgcgtgtgttttaaaagtcctcttagtggtggtatttgtactggtctcttacgcaatttttataacatttatcgagaataaagtgatgac

SEQ ID NO: 14318 - DNA, 813 bp, Zea mays
  Clone ID: LIB189-007-A12_FLI
attgtttaccatggaccagattttgttaggaagatctgatgttgcaggttggggtgcattcattaagaatcctgtaaataaaaatgattatcttggagaatatactggtgaattgatctctcacaaggaagcagacaaacgcggcaaaatttatgaccgggcaaactcatcttttctgttcgatttaaatgaccagtatgtgttggatgcttatcgcaagggggacaaattgaagttcgcaaatcactcatctaaccccaactgctatgcaaaggtgatgctggtggctggcgaccatcgggttggtatatatgcgaaggagcatattgaggctagcgaggaactcttttatgattatcgttatggacctgaccaggctccagcttgggctaggagacccgaaggatcaaagaaggacgaggcatccgtctctcaccgtcgagcacacaaagtggctcgatagctgaagagtcgctccggatgatacaatatgcagtaaacttaatacttaatacatgattcagtcctagttcattggtagataaacatgctatatactatccattagtaaataaactctcattcatcgagttggagaataaatgcgtataaacatatgtggacctcaggtcgggaaggtggcaaccttgttagtttgagcaccaacaggttctcaaacttgagtggctattgctagagtatcaaataatggctgcgactatagccttgtttgtatattttcttggtgagatgaaataatttgtcaaacactcaaatgtacactttattcctgaaagtatttgatgattcatt

SEQ ID NO: 14319 - DNA, 504 bp, Zea mays
  Clone ID: LIB189-007-A3_FLI
gcggatggcgcagctgggcgtggcctcggcctcagcgagggagggccgctgttcgggttcaccaagtcgaacgagctgttcgtggggcggatggcgcagctgggcgtggccttctccatcatcggcgagatcatcacggggaagggcgcgctggcgcagctcaacatcgagacgggggtgcccatcaacgagatagagccgctcgtcatcttcaacgtcctcttcttcttcatcgccgccatcaaccccggcaatggcaggttcatcatcggcgaggaagaggaataggctgctggcctcggacatgagtcgtgtgcgtttacttttacctgtgactgtgagtgatcgatcggtgcgtctcggtgcgcgcgcgtaagtgctttgctgtgtgtatcaattactcgtgatgagacctcgaaggtagggtgtcgcgttgggttgtcttgtagaaacaagagcttatatataaattactactagctaatatgccatggttcatgattc

SEQ ID NO: 14320 - DNA, 747 bp, Zea mays
  Clone ID: LIB189-007-C7_FLI
acaccatgaaggtgctgatcgttgcccttgctctcctggcgctcgctgcgagcgccgcctccagtacaagcggcggctgtggctgccagacaccaccgtttcatctaccgcctccgttctatatgccgcctccgttctatctgccgccgcagcagcagccgcagccatggcaataccccactcaaccaccgcagctaagcccgtgccagcagttcggatcctgcggcgtcggcagcgtcggcagcccgttcctgggccagtgcgtcgagttcctgaggcaccagtgcagcccggcggcgacgccctacggctcgccacagtgccaggcgctgcagcagcagtgctgccaccagatcaggcaggtggagccgctgcaccggtaccaggcgacatacggtgtggtcctgcagtccttcctgcagcagcagccgcagggcgagctcgcggcgctgatggcggcccaggtagcgcagcagctgacggcgatgtgcggcctgcagctgcagcagccaggtccctgcccttgcaacgcagctgccggcggtgtctactactgaggaaactatgtactgtagtaataatgtaatggagccgctggctagctacctagctcgctagtttactcatttagcggcgatgagtaacgtagtgtcacccatcaccatgggtggcagtgtgagcaatgacctgaatgaaccattgaaatggaaaggaataatatataaggaaaaaagatgattggaaact

SEQ ID NO: 14321 - DNA, 1411 bp, Zea mays
  Clone ID: LIB189-007-D11_FLI
ggacagggaagatataggagagagcatgacagcaacagaaggacttcagatgtgaggaagtgggatggtgatagtagcgagttcgaggcatcagatgaagaatgggactctggtgatgacaggggtaatgctctgggcttcgacaatgatagaggttctactgatgagcaccctcggcgatttggaagcatgaggaacgagaagagtagatccactcgggcacaggattttgtccctaggggaggcgtgggtgaggggaagggtttcaatagaagctatggcaacccagatgctgatgttcacaatagaggccagggaagacataggagagataataaaagaacatcagatgcaaggaggtgggatgataatagtgagatcgaggcgtcaggtgaagaatgtggctctggtgatgacagagatagtgttcttggactcaacaatgatatagacacaggtgatggtcatcctcggcaattcaaaagcatgaggaacgagaggagcagatccagtggcaggcagatttccattcctgggggattcagaggttccaatcggattccagggaattcagccgatgcttccgacggcactatgttcagaggcagcaacggtgatgagtcggacacggaagacgatgacttgtggatgttagattacaagggggaagaggcaaactcaagagccccaaaggtgaatttcccgaatttccacagcagcagtgaggatagtgatgacaacaggaaaaacggtggcaagattggtaaaacgaagaaaaatactgatgaaagttgggacagtgactgactgagggctcaagaaagagtaatgttgatccgtgatgcatggacgaaggtcggcaccaatggttgtcaatgtaggttcttccatcggtgatgttgctcgcatacttgactacttgtccaacggaaacttggaggaggaagaagattaggcatggtttccgtgagaacaactgtttgaacgtttgctgcatgttttcagacttgttccattccagttggcatggtaacctgaaaagttgttgaagcggatgacaaagccagaacaacactgcacgacttgcacaagccggaggacaaagtagccagagttcgctgccgacaaacttgataggtcgaggttcctgaaggtttcagaaatgtgaaatcctttctgcgatcacatttatattctcatattcttgaagttttgatgtgagcgaaacatgcacgcagatgtgtcttgcgtgggagagttgtcttatttgaggtaaattgcccggtacacgttcttcagagttcagagtgtgtgaagcttttactctgttttaatatcgagtgtttcagcgtcatcatctaacgtaagaacatctcaaatgggcactgggagcaacctacttctttctgac

SEQ ID NO: 14322 - DNA, 613 bp, Zea mays
  Clone ID: LIB189-007-D7_FLI
caatttgttatctgccatgcataactagactggatggtcatggctcaaactaacttactttttgcctacggctgaaacatttagacaggcagcttaccatataaatgtcacctcctaggtggctaccctgactaccttttcgcgggggggggggggtgactttttttttactgcaagatctaataaactactgtggcgtttaaatttgtatatttccagatgacattcatcctgcgcatgatgaacaataaatcaaggttgtcggtaagtgaaaatagagatcaagattcaacgaacacaacacagatcctgatgtttagtggaagtttgctgcctgtaatgtttctgtcaggcttattgggatgtggagctggaattttagcatggaccaatgctttaggtgtataggtgagagattaagtagagttacataaacccaaaaaaaatcacctaggacgtagcagttatagcacagagagaatacttgatggacttctcatttttaggaagatgacccggcttaaagttattttgaactcctggtcttgtaatatgcctttttaatattttaagctctattcacagacatatggaaacatgatgctataccggg

SEQ ID NO: 14323 - DNA, 1849 bp, Zea mays
  Clone ID: LIB189-007-E1_FLI
ccaagtttttgagcctttcagtattcttggactggaatctggggcatctgaatctgatatcaagaaatcatataggaggctttctattcagtaccatcctgataaaaatcctgatccagaggctcataagtactttgttgaatatatatccaaggcatatcaagcattaactgatcctatatctcgagagaattatgaaaaatatggtcaccctgatgggcggcaggggttgcaaatgggcattgctttgcccaagttcttactaaatattgatggtgcatctggtgggataatgcttcttggaatagtcggattttgtatattattgcctttgatgatagctgttatttatttgtcaagatcgtcaaaatatactggaaactatgtcatgcatcaaactctgtccacttactactactttatgaagccatctcttgctccaagcaaagttatggatgtcttcatcaaggctgcagaatatatggagatgccagttcgacgcagtgatgatgaaccccttcaaaaattgtttgtagctgttagaagtgagttaaatctggacttaaagaacattaagacagaacaagcaaagttctggaagcagcatccatccctagtaaagatggaactgctgattcaggcacatctcactcgtgagtcatttgctttgaccccagcacttcttaaagattacagacacatgcttgaacttgcacctcgtcttttggaagaactcgttaagattgcagttctaccaaggaatccccatggttttggatggctccggcctgcaattggtgttattgagctttctcaaaatattgtccaggctgttccactcagcgcacgaaaaactagtggaggtaactccgaaggaatagcacatttcttgcagctgccacatttcacagaagcaactgtgaaaaagattgctcgcaagaaaatccgtgccttccaagaactttgtgacatgtctgtggagggtcgtgctgcattgctcacacaagttgctgggctttctgaagaacaagttcgggatgtggagcttgtactggagatgattccttgtattgaagtagacatcaaatgcgagactgaaggtgaagagggcattcaagagggtgatgtcgtgacaatgtatgcttgggtctcgctacgacggcgtaatggactgactgctgctcttccccattgtcccaacttcccattccacaaggaagaaaacttctggctgcttctagccgatgcggcatcaaatgatgtctggttgtcacagaaagtgagcttcatggatgaggccactgccataactgcggcatcaaaagctatacaagatacccaggaagcactaggtgcaagtgcaaaggaaataggaaatgcagttaaggaggcagttgacagggtgaagaagggcagtaggctggtaatgggcaagttccaagccccagcagagggtactcacaacctcacctccttttgtttatgcgacgcttggataggctgtgacatcaagaccagcttcaagctcaaggtcctaaagcgcagccgtgctggaacaagaggccatgtgcctgaagaagggtcagcagcagccgtagaagatggtattgaggacgaagaggaggaagatgaagaggagtatgatgactatgagagcgagtacagtgatgacgaggaggatgagaagaacaaggggaaagggcaggggaaggtcgtgaacggatcggcccatcaaggggctgaatctgatatagattcaggcagcgatgagtgattctacactgtattatgttgagaaaatcatagaacttaaccccatctatttttttaatttgaacatatccctatt

SEQ ID NO: 14324 - DNA, 751 bp, Zea mays
  Clone ID: LIB189-007-F11_FLI
agtcagggcgccatggcgacagagacggagaccttcgcctttcaggctgagatcaaccagctgctctcactcatcatcaacaccttctattccaacaaggagatcttcctccgggagctcatttccaactcttccgatgcgttggacaaaatcaggttcgagagcctcactgacaagagcaagctcgatgcgcagccggagctgttcatccacattgtaccagacaaggcttcgaacacgctctccatcatcgacagcggcatcggcatgaccaagtccgaccttgtcaacaacctcggtaccatcgccaggtccgggaccaaggagttcatggaagcccttgctgctggcgctgatgtgtctatgattgggcagttcggtgtcggtttctactctgcctacctcgtcgccgagagggtcgtcgtgaccaccaagcataacgatgacgagcagtacgtgtgggaatcccaggcgggcgggtcgttcactgttactcgtgacacgtctggggagcagcttggcaggggtactaagattacacttttcctcaaggaagatcagttagaataccttgaggagcgtcgcctcaaggatttggtcaagaagcactctgagttcatcagctaccccatctccctgtggaccgaaaagacaacggagaaggagatttctgatgatgaagatgaggaagagaagaaagacgctgaggagggaaaggttgaggatgttgacgaggagaaggaagagaaag

SEQ ID NO: 14325 - DNA, 426 bp, Zea mays
  Clone ID: LIB189-007-H2_FLI
gggggaggcgtggccgccggcgagcttcgggcggtacaggacgcgggtggagctgccggagaacgtggacgtggagaggatcgccgcagaagtgaaggacggagtgctgtacctcaccatccccaagctgtcggcgggggccaaggtcgtcaacatccaggtgcagtgatgctgtgggtcagattcatcaggacgatgagcacctgctgccgtgcttttcgcagcttctagaatctggatgcttgggacgagagcgatatcgatctagctaccactcttcttttcactcttctttttctgtttcgttcctcgattttgtttgctatgtcacacatggtaaatcttggtagttggtgccagaagataaggtgtaatctttgacctgtttggaacaaattccagaatcgaacgcaagagaatttaaat

SEQ ID NO: 14326 - DNA, 621 bp, Zea mays
  Clone ID: LIB189-007-H7_FLI
gcgggagaacatgtacgaggcgatgtcgccgcgccgggcgctcctcgccatcctcctcgccgtcgccctcgcctccgcttcctcggcaccccagcccccgccgtgcagccgctcgtgcgcggccctcaactgcgactccctcgggatccgctacggcaagtactgcggcgtgggctggagcggctgcgacggcgaggagccctgcgacgacctcgacgcctgctgccgcgaccacgaccgctgcgtcgagaggaaaggtatgatgagcgtgaaatgccatgagaaattcaaaaactgcatgaggaaagtgaaaaaggcaggcaaggttggcttctccaagaaatgcccgtacgagatggctatggctacaatgactcaggggatggatatggccatcatccttagccagttgggcacccagaaggtggaactctagcgttagctagctccgcctcagctgcatgttgatttattctcacggaaatatttatatactccactgaagaatagaatttgcttccatatgattactgttgtttcatcgaagtcagagggatgcatagcttatctttcttctgccaaattgaaaaagaaaggaaaagacttcagtttattttctgt

SEQ ID NO: 14327 - DNA, 1088 bp, Zea mays
  Clone ID: LIB189-008-B12_FLI
ggaggagcctcttgcttcggcttcggcttgactcagctgcagcccgccgccgttaggctccggttgccgcctgctcgcgccgcggacacttcgtcctcccagtcgccggcgcgcctgacggcggtgctggagcaggtggaccagttgctaagccaggggaacgacatggccgcgctctccctcgtgcgcagtacgcaggggggtgacggcgggctccgggcctttggcgccgccaggcaggtacctcaacgactttataaattggatgagcttaaactgaatgggattgatacttctgctttcctatcacccgtagatctgacactaggatcaattgagagaaatctccaaatcgctgcagttctgggagggctttctgtatcagctgcattggaactttctcaactccaaatcctgtttctcatactaggtctactatctttgtggtccgtggactttgtatattttggtggtggggtgagaaacttggttcttgatacaattggtcactatcttagccagaagtatcacaacagagttatccagcatgaagctggtcacttcttgatagcttacttgcttggagtgcttccaaaaggatacacaatcacaagcttagatacacttatgaatcaaggatcgcttaatgtgcaagctggagcagcttttgtggactatgagttccttgaagagatcaatacaggcaagctatctgccacgatggttaacaagttctcgtgtatagcactagccggagttgcagcagagtatcttctgtatggacgtgcaggaggaggattagccgacatcaataagcttgatggattgctcaagggtttgggtttcacccaaaagaaagctgattcacaggtgagatgggctgtgctgaatactgttctcatactgcgtcgccatgaaaaagctagatcgcagcttgcagaggcaatgtctacagggaagtcggtgggctcttgcatccaagtcatagaagagtgtataagcactgacgatatttaacgtggatatgttgctgaccctacgttgtctcaatggcatgttatcaacaacaaatcaaggcttgtcaatcc

SEQ ID NO: 14328 - DNA, 373 bp, Zea mays
  Clone ID: LIB189-008-B6_FLI
ccgactatggatgccgtggtaactatcctagaggagcttcaagactctggtgaggccgacaagcgtcaaggacccaaggctggaaccaaacaggcgcctgctgctgctgccgcgagcgctagcaagagcagtcgcaagcttcgccggagaaccctgggagggacgaaggagacgactgttggtccaaatccaaaaccattattggcccgttctcgttagcgaggaaagggaaagcgttgcttggtcaggtggtttgggtaggtagactgtagcttgtgaatatgatctgtcctgtgtataatgagggtaatcggattcttttttggcaacgagtcttgtttttttttttaatcgtgagctgctcggtttctgc

SEQ ID NO: 14329 - DNA, 668 bp, Zea mays
  Clone ID: LIB189-008-D1_FLI
gactagttctagcagcgatccgaagctcaatcaattcactcaaacctcttccccaaatcttcgattagattctcgttgacaagaagactagaaccgaacctgaccatgtcgctgatccgccgcagcaacgtgttcgatcccttctccctcgacctctgggacccctttgagggcttccccttcggctccggcaacagcagcagtctcttcccctcgttcccgcggaccagctcggagaccgcggccttcgctggcgcgcggatcgactggaaggagactccagaggcgcacgtgttcaaggccgacgtaccggggctgaagaaggaggaggtcaaggtggaggtcgaggacggcaacgtccttcagatcagcggcgagcgcaacaaggagcaggaggagaagacggacacctggcaccgcgtggagcggagcagcgggaggttcctgcgcaggttccgactgcccgagaacgccaagacggagcagatcacggccgccatggagaacggcgtgcttacagtcactgtgccgaaggaggacgccaagaagcctgaagtgaagtccattcagatctccggctagacctcggtctgcggtcgtcgtacctgcgtggtttgaggaacggcagttcgcctcggtcgttctgtgaaataaaattgggttacaag

SEQ ID NO: 14330 - DNA, 951 bp, Zea mays
  Clone ID: LIB189-008-D8_FLI
cctccccgggcaggcgctcttcgccgggcagcccacatggatcgcctctggcctctcctccgcgccgtgcgagcgcgcgcgtcaggcctacaacttcggcctccgcaccatggtatgcttccccgtcggcaccggggtgctcgagctcggctccaccgacgtcgtgttcaagaccgccgagagcatggctaagatccgctcgctctttgggggcggagcagggggtggctcgtggccgcccgtgcagcctcaggcgccgtcgtcgcagcagcccgccgccggagccgaccacgcggagacggacccgtccatgctatggctcgccgacgcgccggtcatggacatcaaggattccttgtcgcacccgtcggccgagatctccgtctccaagcctccgccgcatccgccgcagatccattttgagaacgggagcacgagcacgctcacggagaaccccagcccctccgtgcacgcgccgccacccccgccggcgccggctgctccacagcagcggcagcaccagcaccagaatcaggcgcaccagggcccgttccgccgggagctcaatttctcggacttcgcgtccactccttccttggcggcgaccccgccgttcttcaagcccgagtccggcgagatcctcagcttcggcgccgacagcaacgcccggaggaacccgtcgccggtacctcccgccgccaccgccagcctcaccaccgctcccgggagcctcttctcgcagcacacggcgaccatgacggccgccgcggcgaacgacgcgaagaacaacaacaagcgctcaatggaggccacctcccgggcgagcaacaccaaccaccacccggcggcgacggcgaacgagggcatgctgtccttctcgtcggcgccgactacgcggccgtcgacgggcacgggcgcgccggccaagtcggagtccgaccactcggacct

SEQ ID NO: 14331 - DNA, 1909 bp, Zea mays
  Clone ID: LIB189-008-E5_FLI
atggataattatggaatactgtggtggtggaagtgttgctgacttgataggcatcacagaggagcctcttgatgaatcccaaatagcttacatttgtagagaagcactaaagggccttgcttacctgcactccatttttaaagttcacagagatattaaggggggcaacatccttctaactgagcaaggcgaggtgaagttgggtgattttggtgtagctgcccagctgacaagaaccatgtcaaagcgcaacacgttcattggtactccacattggatggcaccagaggtcattcaagaaagtcgttatgatggaaaggtagacgtttgggcattaggtgtatctgcaatcgagatggcagagggcatgccaccaagatccactgtgcatccaatgagagttatcttcatgatatctagtgaaccagcaccgatgctggaggataaagagaaatggtctctcctcttccatgattttattgcaaagtgtcttactaaagaccccagacttcggcctgctgcaattgagatgctgaagcacaaatttattgagaagtgcaatagtggagcttcgaaaatgttggcaaagatcaaggtagcgaagaagattagagccacactagctgtgcaaaatgagctgtctgaccctgacaatacaacgcaagatgtgccttttcgaataaatgaggactatggggaaactgtccctacaagttctcagcaacacatgaaacatggcacatataatgattgtcaggcaggtgattttggtactatgattgttcatactgaagatggggacgaagtgacagaatcacccattttcccaagaacagaattcatacccggccttggtagcatcaattctttcacacatgatccaaagagagcagaacttatttcaagtttttgggcggagaacataggtgatagtgatgccaataaagaccgagatacagattatggtcctgacatgcaggaatcaaaagtgatctcacctttaactggaacagtgaagaagaatattggtgcagaagggactataaggtgccatgataatcaaattaacttgtcaccaggacttgcaaacacaacaactaaattgaacaacagcccaagccgtaaagcgttttcagttcaggataagctctggtcaatttatgctgccggcaacactgtaccaataccatttcttaaggcaattgacatttcaccactagctctagtatcagaaaatgaatcaggaaatggcctggctgggtcaagtacaaatgatgctttggaggcagttagggagctgttcagtggtgatgggcaggcaaagaaaggacggaaagggcaaaacgaagtccctcttcctccgggtgtgcatcacaggctgacgacaagccccacattgatgaacctggcccaagctctagcttatcataaaacgtgctatgaggacatgccgctacaagattcacaagcgacgcaagagcagcaaacgatacaaaatctttgtgacacacttcgcacaatactgaggttgtagatctgcaagagtgaaggctgcaacctttggagttccgaagcctgcatggagccaagggtgaacgtggcactgatcctgctcgtggtggagaactgaggatcgaaggaacgcatgacatgtgcctaccgtggagcaggcctaatggcttctgcgttttagcctgtggacgctttggtcactggaagctgggttgacacaggaatctctacggaagtggaaatttctgtccctgttaatagcctcttggagtttcactatgtagagacggcatcaaattttgctaatcagattttgtggcactaacgcatattgtagcctggttttgtatcgttgtcaatgcatttgttctccaaataaagagaaatagttaagcag

SEQ ID NO: 14332 - DNA, 2099 bp, Zea mays
  Clone ID: LIB189-008-E8_FLI
cacagccacactgcccttctctccccttcctctctcctctgcgtcgcttccacctctcaatctcaccccacgcctgccccgagctccaaccctaaaggaacacacccctgcttgcggcggcggggagcggtcttgggcgtccgccgttgctgtggcccagccgtgacagatccgggccccgcgccgttaggtcggtgtttcttcggcgacggtgcagccgctggatgttagtctggcggatcggggcccgttgttcgcgtgattcgaggcggtgttgagttgtaacatttgtatcacatgaatgaactcagagcatctcagtgttaaaactgtgagcatatcaattcccctcctttaagcaatatgggagctaattgctgcattgctgcaaaggagaggacacaaccatgcattactccattagaagtatcagcgtacaggaatgtgagacattcaccatcatggagctttcggtgggacaatcgcacacatatagaagacataatggaaatccctactctgttctccaaccatagtagtggaagcattcggcctgatacaaagagtggttccattgccccaactgaagggttttctaatggaaatagccttggaactagcccttccaatgtgtctcacggaacaaagtggcacaaatctgacaaaaaaatggaagcatctaaggttacaaaggctgatcctcgagctgaccaccccactgcaagtaactcttcccttgaggcaaagctttccaggaaatcgctggacatgtcaagtgttgcttcagatttgaagacatcagggtctgttccttcaacaccacccttagtatccagagcagatccatcatcctccagggggcattctcaacctacagattcagattcgatgaagaaagcacggcggtcaccagggtatcaattatacagacaagtttcggacagcaaaattccatctctcagatctctcaatgagataagctcccctgaaggaaggccttcgtcttccatgctatcagtctgcagcaatgacttgtcagcagcaggatcctatgctgagtcatctgatggttggtcaatgcgcacattttctgaaatggtcgcaacatcccaaagagagaggtggtcacttgatagtgaactcttgggatccatttctagtaaagtgacaagaactagtgcttcaaattctactacacttccccctgaccaagaggtgtgcaagctgtgcttgaagctgttgaaggagagatcaacatggaatgctcaggagctggccgttgttgctgttctgttgtgtggacatgtgtaccatgctgactgtctggacagcataactacagaagctgacaaatacgatccgccatgccctgtatgcacgcatggtgagaaatgtacagtgaagctatttgggaagctggaatccaaggttaagaacaagataccaaaaaatgtggcagctgatatcaatccagatgggaacagtaataagcaccagaagaaaggtagaagagagcccaggttaggtacaagctcaagcatgaaggtcccattcagtcgcccgtttttgaggaggcatttctccattgggtctcgaccgcctcggtcagtctcagaaactgattcgacgagaaagaagggattctgggcaagacactggagggagtagaatagcctccaattgccattaggtgtgctggtttccattagtgtgttttggaagggtcttcgagaggaggtgaactctccagcatgcaagctcacggagttcagactggcacaagggctgccgtcctggcgggcaaccaacatatttggaagtttctcccagccataatattcggatactggtgcagagcgcacgctagcgccggtcccagcagatccattatagtagaataacaaggttttttataccatgcgagatacggttgttgtaggccctggttgcagcttagtaatagtagcaatctaacagaaacggtgtggccttcatggatgtaaggcccaacgctgggttacacaaccagcttgctagattatttattgtactcgatgttttttttaatgacgattgactaaggtacttcgtattgttgg

SEQ ID NO: 14333 - DNA, 1289 bp, Zea mays
  Clone ID: LIB189-008-G12_FLI
gactaagttgggccaataataccaggcccaaaggcctaggaggaagaagataagggtgcccgtttctctcctcgacgacgacattctcaactctgaaacggcgatgtcacggctactcccgcccgtgctctctcctttaccggcgttctcgctgccgccgccgcttcttcctcgcatccacatccgcacgtcggcggtgagaggcggtgcggcggagaacgcgatggcgtccgggacgacggcgagggagcggcgcctggtcaaggtgcgggaggagcgccgccgccgcgagtacgaccgggagcacacctaccccggatgggccaaggtactggagaacgcctgcagggatgatgaggagctccgcgccattcttggtgatagcatcggcaacccggagctcatgaagcaacggatccaggaaagggtgcgcaagaaaggcagggcccaattcaataaatccaagacaggctccattgttgcttttaaagtcagctttcgagactttaacccattgaattctttcatttggtttgagctctttggagaaccaacagatcgagatgttgacctgcttggtggtgtaaagtggcattgtacaatttcattggattctccttattcagaaaacaacatactgtcttgacgtgaagtgttctttacaggtagtccaagcttggtatgtcatgggaaggctaggagcttacaattcttcaaatttgcagctggccaactcaatgatggactacgacccttcatatgattctgaagaagcttccacagtaatgccatcatctttccatgatatcagtgatgttgagttccaagacaattgggccagggtttgggtggaccttggaacctcggattaccttggcttggatgtattactaaactgcttaacacagttgagctcagagcacttgggtatcaaacaagtggtttttggaggcaagaaaatgggtgactgggaagagggcatgacgagctctgattatggatacaagcacttcaagatatgataaatttacaggtgacaagcaacggtggtgatgcaaggctggccgagaaatttgatcaagactgcatgcatctcgatgtgcccttgtatgtaaataaataaattgtcatgggttttattttatcgtcgtgatagcagtgaattttaactaacagctcaaggcaggctagcagaatagaaaaatataatatggatgcatgtcttgtttcagacacgtctgtttcttgatgatgatgatgataatgatgatgattcttgcaacgtcagg

SEQ ID NO: 14334 - DNA, 859 bp, Zea mays
  Clone ID: LIB189-008-G2_FLI
gacgagggaggggaaaagagagatggtggaggcatcgccggagtccggcgccgcggcgaccggaggtgcctctagtacggcggcggtgcggaaggggaagtcatgcaagggctgcctctactactcgtcagtgctcaagtcccgcggttacaacccaatctgcgttgggatcccccgctccatcccccaagttcctaactacgtggtggatgaacctaaggaggaggcgacggcgcaggggcatgacctcaggcggttcaggtacgggtgcgcgggttactccatgttcgtggacaacagggacggccagggtggtgagagcgagggcaagacgttgttgccatattgcaggggcctcgagttattggtggacagcagattggtcgagagaaagccatcggcaactgaacaagctccagcacatgttgcaaaggatgcagctaccatccgctctcaccaacaaggacaacagagacctcagaacttgtcgaggcaggaattcttggacaggtttaagaggagcgctggactggtcgcttcaggtgttgcgaagaatctaaacaaaacagccaattatatcaaagaaaatattcaggacatgtacaccgatcgtcgtccaccaaagtagcaaccatgccgagtgattgtcgtcaagagctgaagaaatcgcttgctactggaaactttacatcaggactacctggaaactttactccactctcctcacttgttaaacgaaatggagcttttctgggataccaacttccttttctttacctgcataatcttgtaattttgcggctgtatatgtacatgcaaacaacttctttgaagcgaaaaatcagatctcgtttggtgt

SEQ ID NO: 14335 - DNA, 545 bp, Zea mays
  Clone ID: LIB189-008-G8_FLI
ctaatcagcttactaggatgaagcctgcaacggtggcactgctcattttgttgaacatgatgtgcatagttgcatactttgatcatggaacgatggctgaagaaaccaccttgctggcaaattcgtatggaagaaatgaaggaaccaagggcatacatcatggaagaaagctgatggacaatagtattggttcaaaccgtgagtattcaatcgatgatatgtctcatccaaaggcaccacatactgagctcaagcaaccctcatacttagctcctggttgctcaagcaaccctctcaagcaaccctcaaacttagctcctggttgcattccctaaagttcatgcatacatatatagccttccactcatcatatgctggtatccgatctatatatagacacatatgatatgttgcatatcgccaggttctcagatcaagtcccttgtgtagtatgagtggaaacctatctaaataatgtgtgtggcttctgaaatatgtggtgttattgtactgagctatgctcaatagtaaacaacaaattattg

SEQ ID NO: 14336 - DNA, 1112 bp, Zea mays
  Clone ID: LIB189-009-F4_FLI
gcagcagaggcagcgacacgatcgcgagcgcacgcacgtaagcacgttgtcggaagctcaagttagaagaagcaccagtgactgatcgatggcggcccaggctctcctctccggccggcagctgctgggccgccccgtgcagtcggccgtctctaggtcgtcggcgaggaaggcgcccttcgtcgtcagggccagctccagccctccagccaagcaaggttccgacaggcagctgtggttcgcgtccaagcagtccctctcctacctcgatggcacgctgcccggcgactatggcttcgacccgctgggcctctcggacccggagggcaccgggggcttcatcgagcccaagtggctggcctacggcgaggtgatcaacggccgctacgccatgctaggcgcggtgggcgccatcgccccggagatcttcggcaagatgggcatcatccccccggagaccgcgctgccgtggttcaagacgggcgtcatcccgcccgcgggcacctacaactactgggccgactcctacacgctcttcgtcttcaacatggcgctcatgggcttcgccgagcaccgccgcctccaggactggtacaacccgggctccatgggcaagcagtacttcctcggcctcgagaagttcctcgccggctccggcgacccgtcctaccccggcgggcccctcttcaacccgctcggcttcggcaagaccgagaaggagatgaatgagctcaagctcaaggagatcaagaacggcaggctcgccatgctcgccatcctcggttacttcatccaggggctcgtcaccggcgttggcccgttccagaacctgctcgaccacctcgccgaccccgtcaacaacaacgtgctcaccagcctcaagttccactagaacgttggtgcatcagcatacctgctgccgccgccgccagttgtttgctgtggaaagctagatgcatgcgtgttgtaaaggaacctgaagcgttgcatcggtcatgattcatgcatggccagcctgctgcctgtaacaacaaactagtattgatcttattgagaccggaaactgtattgcacatggtaaatcaatgtacaattcctccctagatgcggac

SEQ ID NO: 14337 - DNA, 1387 bp, Zea mays
  Clone ID: LIB189-009-H5_FLI
agcacctctgttgttaccacttgcatccctattgttgaagctttgaaattttagctgtattttctttgcaaattctatttacaattaaatatcacaagcttaattgattagttttgcatgtcgggacatcttaaatcgaataagttgttgttttgttactacaatgcgaccttgatttttacaggtgagagcaagagctgcggacctcaatttgtcacctacttctgatatcaacttattggagagccgtgatatccacatacattttcctgctggtgctgtgccaaaggatggcccttctgcaggtgtgacattggtaacggcactagtgtcgctttttagtaacagaaaagtgagagcagatactgctatgactggcgagatgactctaaggggccttgtattgccagttggtggtgttaaagacaaggttcatgatcattgccttaccccgttctctttttttttatccttctactttgaaaatgtggaaggtttaatcatttttgagccgctacccttctgctttgtgtaattccacaatcctttggaatttaggtacttgcggcacatcgttatggaatcaagagagtaattttacctgaaaggaacttgaaggacttatcagaggttccattaccaattctctccgacatggaggtatgttgttgcattgttgtttgcatgtttcttgggcagctttttggtactaaggtgttgtttgatcttcgacggtttctgagccttggagctactaaaactaaagctagatttacctgcagtttaggggcatccacaaactagattcaaacataaaacctcttgatatgtaattttggaagtagttggtgaaaccggccttttaattcagtgcttatcaaatatttttctgctgtcagattctgcttgtgaagcgcatcgaggaagtactcgaccatgctttcgaaggcggatgcccacttagatcacgctccaagttgtagcacccaactcgcgtttggtatggatgtttgcttgagaggatcatcgtcacagtaccacgaatggtcaacagtgtgagattccctgctggtcttgccacgcccttttcggtttggcttcgcgtctggaatgtgtatacaggattactggtcagaattctgagaataacgagaagattctctgctgggatagtgggattccctgcatatttatgtgaaaccagctgtcggtctttatgcacagatgcaacagcaacacaaatctggtaggaacactggtgggtttctgtcgataatttgagtgtatatgtaatattatgtaatctattccagggaaacatagttaaaccgaggttgtgaaagccaaagagattgagaaaatatcatacgtactttagggttgggtg

SEQ ID NO: 14338 - DNA, 757 bp, Zea mays
  Clone ID: LIB189-010-A5_FLI
ccagaggcacagacgagacgacagagatgaaggacggaacgtcgtcggggggaggggcgttcgctgcgggcagcgatccaaggcagccgtcgacggcgaagccatacgcgccgccgaagctgtcgccccaggacctacccatcgactatgcaggcttcctcgccgtcgccttcggcgtcctcggcgtcatgctccgctacaaggtgtgctcgtggatcgcaatcatcttctgcgctcagtcgttggcaaacatgaagaactttgagaacgatctgaagcagctttctatggccttcatgtttgctgttatgggtctggtgacgaactattttggccccgctcgtccaggcagtacaaagcgctaaactgcggaagaacatgtgctacattcttcataggactttttggtgcttccgatagctttgccatcggtgctgacattatgtatgtccaatttgagcaaacgtcataggtatgggcatcaaattaatggaccggtacatgtatgatgctcaataatttatttgtgcaatactagtaaacgcatagactgtttgaacgagtacttggtttctccggatatgttgatcaatgttttctggacttgatgcttcggtcttatcagtttaccccaaaatgccggtagatggactgacgttttggctttttaaaatatgttacttttattatgtatctagatataatttatgtttagatatattgtttatctaagtgtataataaaatctatgtatctg

SEQ ID NO: 14339 - DNA, 1586 bp, Zea mays
  Clone ID: LIB189-010-A6_FLI
ggcaaagcttcgagcaacaacagcttgctcgactcagcgcccatctatctctcttctcccccgcctgtctagccagcggcggccaccaccaccgttcagttattatagcaagcatgacgaagcacggcgtggtgatcggcccggaggacgtcgcggcggcgcggcatttctcgttcccgccgccgaggacggcggcgggcggcgagtcgtgcaggaagctggcggcgcaggtggacctcggccccgccgtcgtggggtcctggctcgactccatgaaggcctcgtcgcccaggcacaggctcatggcgcccgtgcccggcgccgccgacgcggagcacgacgactggatggagcggcacccgtcggcattggaccgcttcgacgcgctggcggcggcggccaaggggaagcaggtcgcggtgttcctggactacgacggcacgctgtccccgatcgtggaggaccccgaccgcgccgtcatgacggacgagatgagggacgcggtgcgcggcgtggcggcgcgcttcccgacagcgatcgtcagcgggcggtgccgggacaaggtgttcagcttcgtgcggctagcggagctctactacgcggggagccacgggatggacatccgggggcccaccgccgacgccaaccaccaccacggcaacggcaaggcggaggcggaggcggaggcgtcgtcggtgctctgccagccggcgagcgagttcctgccggtgatgcaggaggtgtacgcggcgctggtggccaaggtggagcgcgccatcccgggcgccaaggtggaggacaacaagttctgcctgtcggtccacttccggtgcgtggaggaggcgtgctgggccgcgctcttcgagcaggtccgcgccgtgctgagggaccacccgggcctgcgcctcacccagggccgcaaggtgctggaggtccgccccatgatccgctgggacaagggcaaggcgctggagttcctgctccacgccctcggcttcgccgacgccgacgccgaccgcgacgacgtcttccccatctacgtcggcgacgaccgcaccgacgaggacgccttcagggtgctgcgcgcgcgcgggcagggcgccgggatcctcgtgtccaggttccccaaggagacaagcgcgtccttcacgctacgcgaccccgccgaggtcaaggagttcctgcgcaagctcgtcggcgccaacgacgacagctgatgatcccgcgattcgtttcccgccgtgaccagctccgatccgcctgtgtcaagccgctaactcaacctcggctacctacctgctgcaccggcagagggcttccttgttgttgcaactgcatctccatcgagcagcttgctttgggacaagaacagacctagctagtagtacagtagagcccttttgtatcttcgtttcttttttttggtttccatctctcttgttcatcatgcctgctgttgtttaccatttgcctcggctgaaaaggcttgtattttcggcgcccttcccgcgaggcactgtaactagttgctttgtctgctgaacgtacgcgtaccatgttgaaataatatgtcatgttgaggagct

SEQ ID NO: 14340 - DNA, 608 bp, Zea mays
  Clone ID: LIB189-010-B1_FLI
ccaaccttggatcagcttcgagttcttcacagatgtattgcaagggtcacggaggaaattcaggaaacaagatttaacactgcaatatctgcaatgatggagtttctgaatgctgcatacaagtgggaaacccagccaaaatctgttattgaatcctttgttctgctgctttcacccttcgcgccacacttggctgaggagctttggtttcgcctcggacatccacaatcattggcctatgaacagtttccagaggcaaaaagtgagtacctggaggaatcaaagcttgtactccctgtccaaatcaatggaaagaccaggggtacaatccttgttgacaaagcgtgctctgaggatgatgcttttcgaactgcagcctcggatgagaaactctccaaatatcttgatggaaaaggcatcaggaagaaaatttatgtgcctggaaggatcttgaatgttatcttagatcaacaaaagtcaaggacctgataattgctcttgcttgtccatttatctcgttatgagtcgggaatagagatcaataagacatgacagatctgtaaatttgttttttagcacttgcagtttactgtcaatctgccaacatc

SEQ ID NO: 14341 - DNA, 1785 bp, Zea mays
  Clone ID: LIB189-010-B6_FLI
cggatgctaagaaggtggatttgtcatccacttaaagacattgatgctatcaataaaaggcttgatgttgttgaggggtttatccaaaactgtggactaggccctacaacacttgggtatctccagaaaattcctgatcttgagagattattaggacaagttagatccactgttgggttatcatctttgcttcaactgccctttattggagaaaaaataataaagaaacggattaaaacatttataatgcttatcaatggcctccgcaatggtattgacttgctaaatgatttacaaagagcggaccatggtatcttggcgctttataagattgtggatattccatcattgagctatcttcctgagttaatccataagtttgaagagagaatgcaaaatgagtttccatgtggccaggtttctgatgtcaatgccaatggtgccaacgatttggctgctctgatggacgtttttatcggaaaggcttctgaatggtctttggtgatcaatgccgtcagcactattgatgtgcttaggtcctttgctgcaatgacattgtcatcatttggtgccatgtgcagaccacaagttctgctgaaagatgatgtgcctgtacttcgtatgaagggtctgtggcatccctacgcttttgcgggaaatgcaaatagtctggtaccaaatgatttaacccttggtcaggatttatctggtctcaatcgttttgcattgctgttaactggtccaaatatgggtgggaaatccacaatcatgcgtgccacctgcctggctgttgtacttgctcagcttggctgttatgtcccctgcacgtcatgtgagttgacccttgcggattccatctttacgcgcctcggtgcaacagatcggattatgactggggaaagtacttttctcgttgaatgtactgagactgcctctgttcttcagaaagcaactgtggactcgcttgtcttgcttgatgagcttggcagaggaactagcacatttgatggatatgcaatcgcatatgctgtgtttcgccacctagtggagcgagtgcgatgccgtcagctctttgctacccactaccattctcttacaaaggagttcgcctcgcaccctcacgtgagcctccagcacatggcctgcatgttcaagccaaggagcgacggcaacggccagaaggagctgaccttcctataccggctgacctcgggggcctgtccagaaagctacggcctgcaggtcgccgcaatggcagggatcccgaagtcgatagtggagaaggcgtctgtcgcgggccaggtgatgagggctaagatcgccgggaacttcaagtcgagcgaacagcgagctgagttctcgaccctccacgaggaatggctgagggcggccctggcggtgagcgcgatggacggacaaccggacgacgacgacgtcatggacacgctgttctgcatccagcaagagctgaagtctcacttcaggaaggcgagatgagcattcgccgccgccgctgatcgcgtacgtgggagtactaattatcaatgcctagattcttcagtgatgtcgtatctttacaaccatggtagatataatgtaatccgcgttttttttccatggcacgaatcctgtactttaaacaaagtatcttgtgtatatatgttctgtgctatgtcttgtttgcattgggcagcaaggaccactatccttaatcacttccaccgtttatgtgcatcatatacatttgtgtttggtttgaggaataaaatagtttattatcttttc

SEQ ID NO: 14342 - DNA, 1247 bp, Zea mays
  Clone ID: LIB189-010-B9_FLI
agtggaagcgggcgttcacgcacgggcccgacgccaccgacgcctggctgtggaagctggccaaggcgcacgtgctgacccacgacacggggtaccaccagctggtgagccactggctgcgcacgcactgctgcgtggagccctacatcatcgccgccaaccggcagctgagccggctgcacccggtgtaccgcctgctgcacccgcacttccgctacaccatggagatcaacgcgctggccagggaggcgctcatcaacgccgacggcatcatcgaggagtccttctggccgggcaagtacgccgtcgagcttagctccgtggcgtacggcgcgacgtggcagttcgacacggaggcgctgcccaacgacctcgtcaagcgcgggctggccgtgcgcggggaggacggggagctggagctcaccatcaaggactacccctacgcccacgacgggctcctggtctgggactccatcaagcagtgggcgtccgagtacgtcaacgtctactacaagtccgacgaggccgtggccgccgaccccgagctgagggcgttctgggacgaggtgcgcaacgtggggcacggcgacaagaaggacgagccgtggtggcccgtgctggacacccgcgacagcctggtggagacgctgaccaccatcatgtgggtcacctccggccaccactcggccgtcaacttcgggcagtaccacttcgccggctacttccccaaccggccgaccaccatccggaagaacatgccggtggaggagggcgggccgggcgaggagatggagaagttcctcaagcagccggagacgacgctgctggacatgctgcccacgcagatgcaggccatcaaggtcatgacgacgctggacatcctctcgtcgcactcgcccgacgaggagtacatgggggagttcgcggagccgtcgtggctggcggagcccatggtgaaggcggcgttcgagaagttcggcggcaggatgaaggagatcgaggggttcatcgacgagtgcaacaacaacctggacctcaagaaccgctgcggcgccgggatcgtgccgtacgagctgctcaagcccttctccaagccgggagtcaccgggaggggcatccccagcagcatctccatctgatccatcctcagcatgcattagtccaattaattaaatcgggggttgtactattattgcatgcagaggctgcttgtcgaataaaacgtactatatgtacgattgtattgt

SEQ ID NO: 14343 - DNA, 1296 bp, Zea mays
  Clone ID: LIB189-010-G7_FLI
acgacacaaacacaatcatggccgacattgactcacgaccgcgcaaatcggtcgcattcgccgagggcgagaccattgtcgactccaacggcgaggtcacccaggccgtctcggagaccgaaaaggacaccaccgccgaatcacactcaaagcctgacgccgccgtcgacgaggccaccgacgactttgaggctctcgcgctcagctcgaagaaaaagaagaagtcgaagactgaggatggcgaggtcgacctgagtgcgctcaagaagaagaagaaaaagcccaaggcgccgctcgtcgacgacttcgaggccaagcttgcggctgcaggtggcgacgaggagaaggtgctggccgacgatgcggctgagaagcagtccgcaaaggtcgaggccggtcttcaggagggcgatctcattcagggcactggaatctgggcacacgacgagacaaagccgatcaactacgagagcctcctcagccgcttcttcctcatgttgtccgacagccaccccgacctcggcggcagcggaatgaagagctacaagattcctcctccgcagtgtctgcgtgaaggtaacaagaagactatcttcgccaacattgccgagatttgcaagcgcatgaagcgtaccgacgagcacgttacccagttcttgttcgccgaattgggtacttctggttccgtcgatggtagcaggcgtcttgtcatcaagggtcgcttccagcagaagcagatcgagaacgttctgcgtagatacattgtcgaatacgtcacttgcaagacctgccgcagccccgataccgagctcaacaagggtgagaacagactgtacttcgtcacctgcaacagctgcggttccagacgttccgtcaccgccatcaagaccggtttctctgcccaggtcggcaagagaaagagaatggtcaagtagaccactcgcccgccaaaccaccagacgtagcgcacctctgccaccctgtcgagaagtcgaaggcgcgctgctcacgcgcgtgccctgcgacaaagactccatgcctacgcattacgacacgacacggccgggattgttgcaacacataccgtcgcccttactggcggcactcgtcacactttgcgaaagacacatgttctcatttcgttggcgagacccccagcttcgatgcacaaaactgcatttctaggaccaaggcgttttacggggatatggggacggccgagatgccttccgttgtgttgatatcttcagataggccgtgcatacgccgtgcaacgaacaaaattctcttcacgtc

SEQ ID NO: 14344 - DNA, 748 bp, Zea mays
  Clone ID: LIB189-010-G8_FLI
tgaagaaaatgttaaataatgcgccagagtatttgcagaatgttgttgagctatgccaaaacagagtggttgtcttcgataacgtgactgaagaccgaaggctccaagcgcagcaacttgacaaattgctcgatgtagtggattcagtttgtgcaaaaaatggaggaaaaccattttcagatcaaatgttcactagcatcaaggaggtgcatgatagagaaaaagaggtgcatacctcgggatattcagatgagcagatatctgaattgaaaaaggagattcatagaactagggatgaacagcttgcgcacataaccaacatggtcgaggaaaagttaaactgcactgtggagaagttgcaacagcagctcatggaagaacagaacgcaaggctggaagctgagaaggtggcgtacgaagctaggctgaaatcagaagcggagatccagaagctcaaggagagcctcaagaaagctcaaatggaaaatgatgagttccggaggatggcgcagagccagggcagtaaatgtgctatcctataggcattagtacttgctagaaattggtggagctatcgtgctgacgcgtctcttgtacgtagtactttctctgttccaaaaatatatagttcaatacaccttagtagagatgactacgagagtatccaaacaagacctcgtcggacatgttagcctgaagcttgcttatggacatattggatatagtttttgggtgagaacttttgaac

SEQ ID NO: 14345 - DNA, 2257 bp, Zea mays
  Clone ID: LIB189-010-G9_FLI
agcagctgaacaaacatttgactgtatatcaagctgttcaaagacaagtagttcatgccgaggatgatgaagatcgattcggtggatctgatttacctgatgatggtaaccacttctgggatgatataaggggtgatgtgttcactataacgtatcagaaggctgataacacagcggagaaggggtctgttggaggttcagcttcagtgccaaaatcttccaaatcagattcttgcagaactttgtctgaaaaacagtgtacttctcttcttgatagtattttgcaaggagagcttccctgtgatttagagaaatcaaaccaaacctacaatatcttatcactattacatgtgttggagggtttgaatcagttatcacctcgtctgagactgcagtcagcctgtgatgattttgctgaaggaaaagttgctacattaaatgggctatacgatgttggagctaaggtaccctcaaaggagtttatcaacagtaagatgaccccaaaacttgctcggcaaattcaggatgttcttgcactgtgtagtggcagtttaccatcttggtgttatcagctgacgaaagcttgtccttttctgtttcctttcgaaacacgaaggcaatacttctattccacagcttttgggttgtctcgtgcacttcatcgtcttcagcaacaaccgggcaatgataataacactgcttttgaaagagaagtcaggattggtagattgcaacgccagaaagtccgtgtttctcgtaaccgtatcttggattctgcagctaaagttatggagatgttctctaatcaaaaggctgtcctagaagttgaatactttggtgaagttggaactggtcttggtccaactttggagttttatactctcttaagccgtgagctgcaaagggttgacttaggattgtggagatctcattcttcagataattctgggatgcaaattgatgcgaatgctgatgatttaataagaagtaaaaatcatgaatcagaatcacttactgagagcaggaacatagtacaatcacctcttggattatttcctcagccttggccacctactgctgctgcatcagaaggtagcaaattcttcaaagttgtcgagtatttccgcttagttggtcgagtgatggcaaaagcattgcaagatggaaggcttctcgatttgcctttgtcgacagcattttacaaacttttgcttggacaagaacttgatttatatgatatattatcttttgataccgagttcggaaagacattgcaagaattgcaaattctcgttgcacgtaaacaatttttggactcctgctctagtgagagccaaaagatagatctatgtttccgtggtgctcccgttgaagatttatatttggacttcactcttccgggctatcctgaatatgttctcaaggaaggtggagagaatgcagaggtcaacatttgtaacttagaagagtatatttctttggttgtggatgctactgttaagaccggcataatgcggcaagtagaggcatttaaggcaggattcaatcaggtgtttgacatatcatcactgcaaatattttctcctcaagaacttgattatctgatttgtggtcgctgtgaactttgggagccggaaacactgcctgaacatataaaattcgaccatggttatacctctaagagtcctgcaattattaattttcttgagatcatggcagaatttactcctgagcagcaacatgctttctgccagtttgtgaccggtgctcctcggcttccacctgggggtttggctgctctaaatcctaagttgaccattgttaggaagcactcttctgtggcaaataataattcaaatgcaactggagcgacagagtctgcagatgatgatttgcctagtgtcatgacttgcgccaactatcttaaactaccaccatactccaccaaggctatcatgctaaagaaactgctttatgcgatcaacgaaggccaagggtcatttgatctttcgtgaatctcaacactaacataggtattggtccacctagaaatctgcgtcattgttacccagagttagtttctacctcattcatgtatgacataggttaaactcagctctccggagtcccaccgaaggtttggagcccgtacctttgggtgtggatgtctatactctcttttcttcttggttgtatattcttgcggatctttatagtgaataatagtaataaattgttttgcgcttcttactatgct

SEQ ID NO: 14346 - DNA, 2176 bp, Zea mays
  Clone ID: LIB189-010-H6_FLI
gacttcttggtgagagcgatatgagtgtcccaggtcaatgctcatcccagccacaatttatcaccagcgttgggaggagtaaccgctccaatggccccggcactcctcttatcgaaagcatagatgttgatcaaattgttattccagagaaaaacagttggaagaacttattctcatacatagggcctggatttctcgtctcaattgcatatattgatcctggaaactttgagacggatctacaggctggagcacagtacaaatatgagcttctttggatcatacttgttgcatcctgtgctgctcttattattcaatcacttgcagccaggctaggggttgtgacagggaaacatcttgcagagcattgcagggctgagtatcccaaggtcacaaattttgtcttatggattcttgcagaacttgctgttgttgcatgtgacattcctgaagtaattggaactgcttttgctctaaacatgctgttcagaatcccagtatggtgtggtgttctaataactggactcagcactctaatgctcttattgctgcagcaatatggggtccgtaagctagaatttctgattgcatttctggtgttcttaatagcaacatgtttcttagttgaacttgggtattctaaaccaaatgctccagaagttgttaggggcctttttgttcctgaacttaaaggaaatggagctacaggccttgctatctcattacttggtgctatggtgatgccgcacaatctttttctgcactcagcattagtattgtcaagaaaagtgccacggtctgttcatgggattaaggaggcctgcagattctatacgattgaaagtgcatttgcccttacagttgcttttctcatcaacatatctatcatatctgtcagtggttctgtctgtggttcaggtaatttaaacccagaagatcaagcaaattgcagtgatctggacctaaataaggcttcatttttgttaaagaatgtccttggaaactggagctcaaagttgtttgcagttgctttgttggcatctggtcagagttctacaattacggggacatatgctggacaatatgtcatgcaggtttttggaacttataccttatttcagttctagttcgcaagttgaatggcaggttgttttatgatgcatattactcgaggcatttgatgttgatcagaagtaatcaagcatttgcttgcttgcaacattagtttgtttagctgttagatatgaaaagtacagaaaataaattagtacataactcttagatttgcaatgaacaagcttgggcttatgagtttcagtgccaacctccaaggttctcttggtcagctagattgcagagaaaaaggacagatacggggggtttttagatcttcggatgaaaccctggatacgcaatcttgtcacgaggtccttggctatcctgccaagtttgatcgtgtcaattattggtggttcttcagcagctggccagttgattatcattgcatcgatgatactgtcatttgaactcccttttgctttagttccactccttaaattcaccagcagcaaaacaaagatggggcagcatacaaattcaatattcactgctgtgctgacatggatgatcggctcgtttattgttgtcatcaacacctactttctgataacaagctttgtaaattgctcgtccacagcgggctgaccaccatttctcaagtattttccggtattttcgggtttttgggcatgctgatttacatagttgcgatcctatacctcgtctttaggaggaacaggaagtccacccagccattgctggagagcgatgctgagcttgcagtatcgggtagcagtgctgatgccggagcagaatgctcgctgggccatttgccccgtgaggacatctccagcatgcaacttccgcagcagcgttcagcttctgatctagattagataacagctgccaggaaaataaatgttttttttgttttttatatagtatagtaattacagaatagggtacgtcaggtattggcttctgttcatcctactgatgatgcttaaggaatgtatacaagaggacggatatctatgctgccaaacaaaaaaatggggcacaaaagaatttagtgcctgtttttgggaagtgatgtgaactgaatcctggaaggggc

SEQ ID NO: 14347 - DNA, 800 bp, Zea mays
  Clone ID: LIB189-017-H5_FLI
aaatatccccaaaccctagctcccgatctcgatggcgaaccctcgcgtcttcttcgacatgaccgtcggcggcgccccggcgggccggatcgtgatggagctgtacgccaacgaggtgcccaagaccgcggagaacttccgcgcgctgtgcacgggcgagaagggcgtgggcaagtccgggaagccgctccactacaagggctccaccttccaccgcgtcatccccgagttcatgtgccagggcggcgacttcacccgcggcaacggcaccggcggcgagtccatctacggcgagaagttccccgacgagaagttcgtgcgcaagcacaccgcccccggtgtgctctccatggccaacgccgggcccaacaccaacggctcccagttcttcatctgcaccgtcgcgaccccttggctcgacggcaagcacgtcgtcttcggccaggtcgtcgagggcatggacgtcgtcaaggccatcgagaaggtgggcacccgcaacggctccacctccaaggtggtcaaggtcgctgactgcggacagctctcctagatctctctgatctggtctgttcggccgccctccctccgtcatcgtcgactccccctgcgtccgttcctttggatctgaataagatggtggtgatctgagtggtggtcttagtttatcatgtatcgctcgcagtttaatttagcggtttaggtgtggatctgtgaaccccatggcgcctctgcttgattcgtgtttcacctgttatgttctgagattcatgataatgctatgagaactgaaattcccgttt

SEQ ID NO: 14348 - DNA, 805 bp, Zea mays
  Clone ID: LIB189-018-A12_FLI
agagaacttctcttccagaagggggcaaagctcgcggcctcgcgtcgcgccggtcgttccggtccaacgcggcgacgccaaaggctgccgtccccgggcttcctcctccccctcgccaaaccacaggaagaagcgagcagggcaccgtgttttctcgatcgatggcatcggcgcctgccgattcctacgggtgcgcggcgtgcggcgcgctcctggacctgtcggcggcgcacctgtacccggcggacttctacttcgaggccgggaacaagggcacgctgtccttctcgtgggtggacgagtcgcgcctgcggttcgcgcccgaggaccgcatccgccccttcttcgagaccctcaactactggggcatccagcggaagcgcacgcgcatcagctgcgacgcctgcggccacctgcttggccacgtctacgacgacggtccgccggccatgcagggcaccggccagttcgggatggggcccagccaggtcatcccgcgccgccccaggtaccgcttcaagatcaaggccatcgccgccagctcctcggcacctgccgccgccgccgcctatggaaagtgatgctccatagatttcctgtgtactcataattgtatgtgtctcttttacttagaagtcctaagacatagatgaaaagaaaacattagcctatttgtcatggtattttcctctaatattcctatacctcgttcataggaatttcaaaggaactcataagattcaagcctcctttggagtgtagtaaattttactgttccttgaactaatttatgtgaaattcatgt

SEQ ID NO: 14349 - DNA, 492 bp, Zea mays
  Clone ID: LIB189-018-B5_FLI
tcgctgaagtcgaagcccaagggcaagggcgggaagaaggccaccgccgacgacgaggacgccaccgcggcggcgaccacggtgcggctcatgaaggagtggaccacgtggacgatgaagaaggcgaaggtggtggcgcactacggcttcatccccctcgtcatcgtcatcggcatgaactccgagcccaagccctccgtgttccagctcctctcccccgtctgatcggatctccccgtcagggcccggatgaggtcggtccgtagtagtttgtagctggtacttcatttgcttacatatgtccgagatcgagttgaagaaggtggatcatgctttctgggcgaatttgaaggatttggtttaataattttgtagtggcggatgtcttctatacatcggatcaaaaatgtcttggttatgtgatctgcagtgcttatgattgtatgaactatatccgttttcgtctgcgtgtactgattttgttgcgcgtct

SEQ ID NO: 14350 - DNA, 757 bp, Zea mays
  Clone ID: LIB189-018-C6_FLI
agccctgcccagcgcaccaccaccaacacctggcaccgtcctccgccgtcgtcgtcactcgctcgaacgctcctccatccatggcgcccaagaacgctctccccgccgccagcggcatgacgctggagccgaggtaccgcggcgtccggaagcgcccctggggacggtacgcggcggagatccgggacccggccaggaaggcccgcgtgtggctcggcaccttcgacaccgccgaggccgcggcgcgcgcctacgacgccgccgcgctccacttccgcgggcccaaggcgaagaccaacttccccgtcgccttcgccacggccacggacacgcgcgcgctcccgctcccgctccggctcccgctgccgccgccgccgcccaagaagctgtccgtgagcccgagcggcagcaccgtggagtcctcgtcccgggactcgcccgccgcgccggcccccgcgccgtcgctcgacctgagcctcggcatgccggccatggtggccgcccagccgttcctgttcctggacccgaggctcgcggtgaccgtggccgtggcggcgcccgtgcctcgccggccgaccgctgctgccgcgggcgcgggcgccagcaagcaggcagcatactcctgctgccgtgaagacgagcagagcgacaccgggtcgtcgtcatccgtggtggacgcctccccggcggtcggcgtggggttcgacctcaacatgccgccgccgggcgaggtggcgtagctggaccgcgcggccgc

SEQ ID NO: 14351 - DNA, 612 bp, Zea mays
  Clone ID: LIB189-018-D12_FLI
agagcaaaggcagcacactcagctatccagcaaaagagatcgagacgcaggagtcatggccaccgtcagcgccgccgtggtgaccaccatcgttgcccgcgccgcgatcgccaggcccaatgctctagggctgcctgcgttgagggcgaggagcgagagggtgcggtgcagctacgccaaggatgccaagaacgcggccccagtcagcaccaagggcgcaggcgcgtcgctgctcgccgcagcgggcgcggtgaccgcgtcggcggggcccgcgctggcgctcgtggacgagcgcatgtccacggagggcaccgggctgagcctcgggctcagcaacaacctgctggggtggatcctcctgggggtcttcggcctcatctggtccctctacaccatctacacctctgacctcgacgaggacgaggagtccggtggcctctcgctctagatccacctcctctcctgttaatgatctgaatgtaaacatggtggtggtcatcggtgtaaatttagacatggctatttgcatctaagatccatcctctcctgttaataatgtttggagactacgtacgcctgaagcaatagcaactttgcgagaaaacttgctgc

SEQ ID NO: 14352 - DNA, 846 bp, Zea mays
  Clone ID: LIB189-018-E6_FLI
aacattttatgccaggtataatgacattgccaagcatgcattggatgttgtgaaaagtaagagcctagttttgactcaatcactggatgctcacaacataactgaaacaaaagagcagcctgaaggatttgacagtgattggttacataccttactttggcaaggcaatgaacttcctgctcctgtcattgatgtatgcctactactgctttgagtacaagtggaacttctttgcagtgagtctgcatgagaggcttgatttctttgaatcaaactgggcgttctttgctggatttggtgctccatgcgtccttccaattttcttcttctctcctcttataagctatgggtttctggctatactttatccgttgtttgtcttgactgccgcaggcactcaagctgagcaagtaattgatgcactgaaacctgcacacgaagggaaactacaaagaatacctgtgttctttgtcgcaaagcgactgacgacaaaagtactgcaactgtttccggtggcacagaaagaacaatgaaggatccacagaaacaaaccaaggagggaaggccgctgtgtgtgttgggtgtgctgctaatcacaatgccccgctcgaacgaacgttgcatccgtaaggtgcgcacgccctctccgctctccgtaacgtggaagggaggggcttgccgccttcacgctgtaaatatcctgtaacaagcatttctgtcgaatgggaactttgaaaatatagagaattgcactttgttatttagcaagtgttgatcattcaagattaggccggcgagtcggcggcaccaaccagtaatgattggttccttggtttcatcttggcc

SEQ ID NO: 14353 - DNA, 296 bp, Zea mays
  Clone ID: LIB189-018-H12_FLI
ggaggatggtcgcacccttgcagactacaatatccagaaggagagcaccctccacctggtgctccgtcttcgcggtggttattaagccatcagtcgttgaagctgctgctgtatctgggttatctagtgtctctgccattgcccatggatggtgctgtctttcaaagtatttgtatggtttgtgtcgtgagtcgtgactgagctggtttcatggaccagttgtgttctcgttacccaaaactatcgtgcgatcgcatatggcttaatcatgaataaatgttgtttgaatttaaact

SEQ ID NO: 14354 - DNA, 1335 bp, Zea mays
  Clone ID: LIB189-018-H7_FLI
taggatgttttcttatgaagaactgaagcttgcgacgtccaactactcacctgatatgttaattgggaagggtggaaccagccaggttttcaaggcacaacttgatggcggaacatttgctgccataaagattctgaaaccctcggttgatgcaatacacgagtttgttacggaggttgagaccgtaaccagcttgcagcatgagaacattgtagcactaaggggattcagcttcgagaactacaaccttgtgttggcatatgattacatgccccgagggagcttggacaaagctcttcatgggaagaatgatggcacagagtttcttgtctgggagaggagaattaagatagcaattgacatcgcaagagcactcgaatttctccatctcggcggtgtgacccagtctgtgatccatggagatgttaagtcttcaaatatcctcctttcagaggattttggggcacggctctgcgatttcgggttagcaaagcgagtgtcggcttcgactccccacctaacatgtactgacatcaccgggacttttgggtacatggcgccggagtatttttcacacggggaggtcaacgagaagattgacgtctacgcattcggagttgttctgctggagattgtttcgggaaggaggcccatcacaccagggagcgcgaagggtcaagaaagcctggtcggttgggcgaagcctttgctgtccagtggcgggatcaagcacctggtcgatccgtttctggggaacgattacgactgcgatgagatggagaggatgacgctcgcggcctcgctttgcacgaggacgtcgtggcactctcgacctgagatgtcactggtcctgaaacttctccagggggacgacgagacgatgggctgggcgaggtcggccagcttcgacgggtcagacgaggaggccatcgcggcgggacctgacctgaacatgcagtcgcacctgagcctcgcgctcctcggggtggatgcggacgacacgctgtcgcgctgcagcagcacggagcgcacctcggccgacggctactggagccggtcgtccagtttcgactagcggtagctgcgtgatggaactgatgcggcagagtagagtagtggtagtgtggttacgtacagcaggcaggcaggcaggcgattggtatgcttggtgagatggatgttcatatcaggattcaggtggttggaatgtggacagctgctgatttagtttagatggcagtgttgctttgctgatttggctaggagtcgagttctgttggtagtatagatctgaatctgaccttacgatgcaattggtttcgtatttgtattgtt

SEQ ID NO: 14355 - DNA, 965 bp, Zea mays
  Clone ID: LIB189-019-B4_FLI
ggttcgagggtattgcggaccaatttcagaacaacaacaatgtcaggctgcttttgaagtatgatgatgctctggcacatatgatctttgcagcatcagacatgttcattgttccttctatgtttgaaccatgtggcctcactcagatggtagctatgcgatatggttctgtgccagttgttcggagaaccggcggtttgaatgacagtgtcttcgatttggacgatgaaacgatacccatggaggtgcgaaatggcttcacctttttgaaggctgatgagcaggattttggtaatgcactggaaagagctttcaactactaccacagaaaacctgaagtttggaaacagttggtgcagaaagacatgaagatagatttcagctgggatacttcagtttctcaatacgaagaaatctatcagaaagcagccactcgagccagggcagcggcataaacagcagagacattgagacagttccctgctgtctccatgaagtctcctagatgctgtgcttaaccgtatggtaaagaaatatggtctgtatcagctcagaattaagcatctgccgaggaagcgcggtgcatccggactcgggtgtacaaggggcgacgtggcgttacgtgcagtccccaacgaagcaaagagacagaagtacagctgtacagaacggatatcttgtgaagcacacattgggatcaggacgtttggtgctgcagctactttcggtgcagaagcacatatatacgagacctgccagggcgagcaaatacccagttatacacgcgattgctcagctctatcaagctgtgaattgaaagatttctatagtgtattcacgcgacgttttcataaactagtgtgagttatgtactctgaccagtgaccagtgcgaagtctgtgttgtctcaacaatgttgcttggtataaaatgctaaaatgacgtttaagacgagaggggttttt

SEQ ID NO: 14356 - DNA, 1455 bp, Zea mays
  Clone ID: LIB189-024-D7_FLI
ttctcctccaccgtcggagctccggcctccaccccgaccaggagcagcttcctcgggaagaagctcaacaagccgcaggtgtccgcggccgtgacctaccatggcaagagctccagcagcaacagcaggttcaaggcgatggctgccaaggaggtggacgagacgaagcagaccgacgaggacaggtggaagggcctggcctacgacatctcggacgaccagcaggacatcaccaggggcaagggcctcgtcgacaacctcttccaggcgcctatgggggacggcacccacgtcgccgtgctcagctcctacgactacatcagccagggccaaaagtcttacaacttcgacaacatgatggatggcttctacatagccaagggcttcatggacaagctcgtcgtccacctctccaagaacttcatgaccctgccaaacatcaaggttcccctcatcctgggtatctggggaggcaaaggccagggaaaatcgttccaatgcgagctggtcttcgccaagatgggcatcacccccatcatgatgagcgccggcgagctggagagcggcaacgccggagagcccgccaagctcatcaggcagcgctaccgtgaggcctccgacctcatcaagaagggcaagatgtcctgcctcttcatcaacgacctcgacgccggcgcgggtcgcatgggcggcaccacccagtacacggtgaacaaccagatggtcaacgccaccctgatgaacatcgccgacaaccccaccaacgtgcagctcccggggatgtacaacaaggaggacaacccccgcgtgcccatcatcgtcaccggcaacgacttctccacgctctacgcgccggtcatccgcgacggccgcatggagaagttctactgggcgcccacccgcgaggaccgcatcggcgtctgcaagggcatcttccgcaccgacggcgtcgacgaggagcacgtcgtccagctggtcgacaccttccctggccagtccatcgacttcttcggcgcgctgcgtgcccgggtctacgacgacgaggtccgacggtgggtgagcgagaccggcgtcgagaacatcgccaggaagctcgtcaactccaaggagggcccgcccacgttcgagcagcccaagataacgatcgagaagctcttggagtacggacacatgctggtggcggagcaggagaacgtcaagcgtgtgcagcttgctgacaagtacctcaacgaggctgctcttggtgaagccaacgaggacgccatgaagactggctccttcttcaagtagaaagcaactctttgctattgctagctaggcgcgaggccggcataggatcgaggaggtgaatatatatattacttggatagttttgtaatatatatatatatattactgaaccaggacatgcatacatatattcgtctatataatggatcatgtatatttcatttc

SEQ ID NO: 14357 - DNA, 1280 bp, Zea mays
  Clone ID: LIB189-026-F3_FLI
ggacagtgctccctcccgtccccaaagacaaacaggcgagcagcaaacacacacgctcgaaccgagacaagccaatccaataatggggagggctccgtgctgcgagaagatggggctgaagaaggggccatggacgcccgaggaggacaaggtcctggtcgcccacatccagagcttcggccacagcaactggcgcgcgctgcccaagcaagccggcttgctgcggtgcggcaagagctgccggctccggtggatcaactacctgcgcccggacatcaagcgcggcaacttcagcaaggaggaggaggacgccatcatcagcctccacgagcagctcggcaacaggtggtccgccatcgccgccaggctgcccgggcggacggacaacgagatcaagaacgtctggcacacgcacctcaagaagcgcctggatcccaccaagcaggaacagcagcagcagcacgggacgacgccggtggctggcgccggcaagaagcacaggcccgcggcggcggcgaagcgcgggggcggcggagccaggaaggcgacggccgacgccgtcgtcgtcccggccaccgctgcgccggcgtcgcccgaacggtccgcggcctcgtcgtcggtgaccgagtcgtccatgacggagcaggagcaggagcacggcaacacggggagctcgcccgcgttccccaaggaggagagcttcaccacctcctcctcggacgccgaggagttccagttcgacgacagcttctggtccgagacgctgtcgatgccgctggacagcctcgacgacgtcgtccccatggagccctccgacgacgcgttcggcgacgtcgacgtcgacgtggccgccgcctcctcctcgtccgtcggcgccgacggcgacctggactactggctcagagtgttcatggagtccggcgacgcgcacccagaactgccgcagatttagaccgctcgcgcgagaattttcggctcctaattgattcatcgttcttttctctctctctctctctctctgcacgtcttgcatcagaggggacggacaaggacagcatcagctgattaacagagaaggaaatcaggcaggaacaacgcgacacgccgttgcaacttggatcgatcttgtttgccttcttgttgtatagatactagaatccatccaagtctatgcgttctgagaacagaagcacgctgtgctgtgcatgcagattcccatgtatgtacagtagccacggccgccgccagaacagaaatggatccggcctcttccaaattcc

SEQ ID NO: 14358 - DNA, 532 bp, Zea mays
  Clone ID: LIB189-030-A5_FLI
cgccgcacagaataattctggcgaggatgacgagctcctttctgaactaaaagataagtgggatgcaatggagaacaagtcctctcttgccttgtatggtgctggagcaatcctcgctgtctggatatccttggttgtagtgagatctctcgactctgtcccgttgctcccaggcatattggagctagtcgggctcagctactctggatggtttgtgtaccgatacctgctttttcaggaaaaccggaaagaattggccggtgttatcgatgatataaagagaaggattgttggcgatgatgaatagctgtttcctggtttgtaattctatttatctcgccctgtttggttctgaggaattgaaaaataatccaatggtgaagtgagaaagcactttctagttattggttttaattcatggggtccaaacaggctcctgatagaatcttgtaggcttctattcttactagctgagtgcccgtgcattgcaacgggaatatataatatcaatatactacgataatttatatac

SEQ ID NO: 14359 - DNA, 1078 bp, Zea mays
  Clone ID: LIB189-030-C11_FLI
agcgtttactcctaactagtttgccgatcgagcccgggcgacgtgagatacgagcggcgtcgaccggcgccggcgagcctccgcagccgcagccgcccgatctgggttttctttcgtagcggtagcggaagatgagccaggaccaggagaacggaggcaccaacgggcagcacgccgccgacgtgatggaggtggagccgaagcgccgggcgccgcggctgaacgagcgcatcctgtcgtcgctgtcgcggaggtccgtcgccgcgcacccctggcacgacctcgagatcggtcctgaagctccggccgtcttcaacgtcgtcgtggagatcaccaaggggagcaaggtgaagtacgagctggacaagaagacggggctcatcaaggtggaccggatcctctactcgtccgtcgtctaccctcacaactacggcttcgtgccccggacgctctgcgaggacaacgaccccatggacgtcctcgtgctcatgcaggaacccgtccttcccggcgccttcctccgcgccagggccatcggcctcatgcctatgatagatcagggagagaaggacgacaagatcatcgccgtctgcgccgacgaccccgagtaccgccactacaacgacatcagcgagctctcccctcaccgcctccaggagatccgccgcttcttcgaagactacaagaagaacgagaacaaggaggtggccgtcaacgacttcctgcccgccgccgctgcccgcgaagccatccagtactccatggacctgtacggccagtacatcatgcagaccctgcggcggtagagcgtgtcctaccagatcccatgcgagctgagctgacgcaagagcacagatcgacagaatccttgtggtctcgtctcatgcatggatagccaggtcacatggcttgtcgacgaccatgcatctcttcttcccagcgattttagcctgtatcttcccttatttatagtcttttgggtttggtggaatctgtccacagtgtggtttgatctatgtactcctcttctacatttctaccagaacgaatcgatgagattaataataatgttactact

SEQ ID NO: 14360 - DNA, 725 bp, Chlorella vulgaris
  Clone ID: LIB191-033-D4_FLI
gggacacggaccagttcctgacggatgccaagacagcaaccttagtcatggaagtgatcctgaagcagggaggcctggctccagggggcatcaactttgatgccaagctgcggcgtgaatccatttctctggaggacctgttctacggccacatcagcggcatggatgccatggcacgagggctccggaacgctgccaggatgatcgaggagggcgagctggacaagatgcgccgcgagcggtacagctcgtactttgacgaccgcatcggcagggacattgtggacgagcgtgccgatttccgccagctggaggcgcatgccatgtcacagtacgaccctgggctgaacattaccagcggccaggcagagctgtacgacctgtggctggcgcactacctgcgctgaagctggcgtgaatggtggcagaaagtgcggcctgtagggtgatagctggggccggttagtcatggacaccagccctggcaccactggctgtcagctgcagacgccagtgtgggccgtgagttgtggtttacgatttggcctgcttcccacagaaatagttgcagcactggccagccaaagctgtgcaacacacaatgctagcctagcccctcagcatgcgagcagtcgggtgttggtgctcccatcatatcgtgatgtgatgcatggtgcgaggtcttccctcctctcggcaagtatgtaaaccccggcccttgcttg

SEQ ID NO: 14361 - DNA, 960 bp, Chlorella vulgaris
  Clone ID: LIB191-035-F1_FLI
ctttgggcgttatgaggacctcaaggtagcgtatgtcggcgacggcaacaacatcgtgcactcttggctgcggctagcggcgcggttcaagctcgactttgtctgcgtctgtccaaagggctttgagccggaccaggccacagttgaccttgccagacaagccaggctgggcagcattagcatcagccacgagccgctggaggcggtgaagggggcggacgtgatctacacagacgtgtgggcgtccatgggccagaaagaccaggcggaggagcggaagcggctgtttaaggggttccaggtgaacgaggccatgctggaggctgccgggccccaggtcaagttcatgcactgcctgccggcggagcgcggcatcgagtgcacggacggcgtcatggagtcgccggccagcatcgtttttgaccaggcggagaaccgcatgcacgcacagaacggcatcatgatccatgccatgggtctggcctgagcaggggactcgtctgctggtgagggtggcaataactgcaagctgagacagcgtctggcaagggatgtcgcttctgttgtgcagcgacatgggggatagcggtgacatggaacagccctccttgcgcagcatgtgggctttgcatgtcagctattagacgactggtttagtgttgagagtgacacggatagcatgcaaagagcaaggctgcaatggagttccttccttcactgccaactgcaaggattggtgctcttagtgaatgctttgcactggggtcgtattgtgtctgacttttgctgacccggcaacgtgtgtacaactacgtttccttgcgttatgttgcacctaggttctccctccctcagcaatggtgatgggtggctgcagattgaggtctcacacccatgcaccttgtgtgttttcggggctgggtcccggcctgctaacatctaacggtaacatctcgctct

SEQ ID NO: 14362 - DNA, 977 bp, Arabidopsis thaliana
  Clone ID: LIB22-064-D9_FLI
gctctctgagcaagctgagcgttatgaagaaatggtggaatcaatgaaaagtgttgcgaaattgaatgttgatctgacggtggaagagaggaacttactctccttgaaccaatcacgttcttgtaacccacagagagtaagttcctctcttcgattgaacaaaaggaagcagtgaaagggaatgatgttaatgtaaagaggatcaaagagtatatggagaaggttgagttagagctttctaacatatgcattgatattatgtctgtcttagatgagcatctcattccttcggcttccgagggtgaatctactgtcttcttcaacaagatgaaaggtgactattaccgctatcttgctgagttcaaatcagggaacgagaggaaagaggctgctgatcagtctttgaaagcctatgagattgctactactgctgctgaggctaagctccctccaacacaccctatcagattgggtttggctttgaatttctctgtcttctactacgagatcatgaacgcacctgaaagggcatgtcaccttgctaagcaggcgttcgatgaagctatctcagagcttgacactctgaacgaggaatcctacaaagatagcaccttaataatgcaactccttagggacaatctgaccttgtggacttctgacatctcagaagaaggaggagacgatgctcataagacgaatggttctgccaaacctggtgctggtggagacgatgcagagtgatatgatatgtgtgcacctggacaatatgtttcaagaactgaatgtgcggtgaataatagtgaaaagtagagtttctctgttccctatatcatgattgtctatgttacttgtactctggtttagccctaaatgtctctctggtttgaatgtattgcatgcctgtctcaggacactcttatttgtaattcactactgtcgtcttactatctatccttatggatccaatcttgaaactt

SEQ ID NO: 14363 - DNA, 1857 bp, Arabidopsis thaliana
  Clone ID: LIB22-066-G9_FLI
ccaggtccagacatagtaaggattgacagactgagagctcttccttgtcttcgctaaaaccaccccagcaagggaatcaaggtatctctgcaaataatcaagatccactcaactctttcggtgtaccaaaacagagccaaggaatgccatctttcaccagtgcttcataaactcgccgccatcatcgatattcacggggtccaagatcgaagctgaggatggttctccgcttgtgatcgagctcgtggacgccaccacaaacactctagttagtacgggaccgttctcgtcttctcgggtcgagctcgtgccgctgaacgctgatttcacggaagaaagctggaccgttgagggatttaatcggaatattctcacgcaacgtgaagggaaacgtccgttgctcactggagacctaacggtgatgcttaaaaacggtgttggagttataaccggagatatagctttctcggataactcgagctggactaggagtcggaagttccggttaggtgctaagttgaccggagatggagccgtggaggcgagaagtgaagcttttggatgtagagaccaacgaggagaatcttataaaaaacatcatcctccgtgccccagtgatgaggtttggagactagagaaaatcgcgaaagatggagtttcggcaacgcgtttggctgaacgcaagattttaaccgtcaaggattttcgccgtttgtatactgtaaatcgaaatgagttacacaacataattggtgcaggggtctcaaagaaaacatggaacacaattgtatcacatgccatggattgcgttttggacgaaacagagtgttacatttacaatgcaaacactccgggcgtaacacttctcttcaactctgtttatgagttgataagagtgtcattcaatggcaacgatatccaaaaccttgatcagccaattctagaccaattaaaggccgaagcttatcaaaaccttaaccgcattacagcggttaacgataggacctttgtgggtcatccacaaaggtccttacagtgcccgcaagatcctggatttgtcgtaacatgttctggatcgcagcacatcgactttcaaggaagtttggatccatcaagctcttcgatggctctttgccacaaagcttcaagctcaacggtccaccctgatgtcctgatgagttttgataactcatcaaccgcgaggtttcatatcgacaaaaagttcttaccgactttcggaaacagcttcaaagtaagtgaactcgatcaagtacacggaaaatcacaaactgttgtgacaaaaggttgtatagagaataacgaggaggatgagaacgcgttttcttatcatcaccatgatgacatgacctcaagctggtcacctggtacgcaccaagccgttgaaacgatgtttcttaccgtgtctgagacggaagaagctggaatgttcgatgttcattttgcaaacgttaatttgggatctccaagagccaggtggtgtaaggttaaggcagctttcaaggttagggcagcttttaaggaagtccggagacacacaactgccagaaatccgagggaaggcttgtaagaactcttgcctacctattaaaatcagcggtttcttgcgttgcacgataaatgtgtatatatatttgtgaatagggttagataaatggatcccggccattgagttacggggattagcctttgcgtatatcaaagtatttttttccctgggtaagtatagctgtggcacagggtttgtaagttgtaaccatatgccgtataagaatcagaggtttcttgttgtacacgaaagctatgtataaataaaagctatgtatatatgtttttttc

SEQ ID NO: 14364 - DNA, 1288 bp, Arabidopsis thaliana
  Clone ID: LIB22-068-C6_FLI
cacacttctaaactttagcctcaaaatattcttctctctgtctctctctaagtcatctctttgaacatcagggattaattactgtaattgaagctcacatcatggaccatcatcagtatcatcatcatgatcaataccaacatcagatgatgactagtactaacaataattcctataacaccatcgtcacaacacaaccaccaccaacaacaacaacaatggattcaacaacagcaacaactatgataatggatgacgagaagaagttgatgacgacaatgagcactaggccgcaagaaccaagaaactgtccaagatgcaactcaagcaacaccaagttttgttattacaacaactacagcttagcacagcctaggtacttgtgtaagtcttgtcggagatattggactgaaggtggctctctccgtaacgtccccgtaggcggaggttctagaaagaacaagaagcttccatttcctaattcctctacttcttcttccaccaagaacctcccggatctcaaccctcctttcgtcttcacatcatcagcttcatcatcaaaccctagcaagacgcatcaaaacaataatgacctcagcctatccttctcctcccctatgcaagacaagcgagctcaagggcattacggtcatttcagtgagcaagttgtgacaggagggcagaactgtcttttccaagctcctatgggaatgattcagtttcgtcaagagtatgatcatgagcaccccaaaaagaatcttgggttttcattagacaggaacgaggaagagattggtaatcatgataacttcgttgttaatgaggaaggaagtaagatgatgtatccttatggagatcatgaagaccgtcaacaacatcaccatgtgagacacgatgatggtaataagaagagagaaggtggttcaagcaatgagctatggagcggaatcatcctaggtggtgatagtggtggaccaacatggtgatatgaatattgtcaaaaaggacaagatgataaagacaaaaacaaatagttacgagcaaaaatatgtgattatatttggaattttcagacccggaagagtcgccttgggaggagcatgatgattcttctttccactttctataaattcctctgttcacttttctttgtcttttgtctaatggagccacttatttggcttttagtttgcttctttaggacctttttaagttttaacacataaatgtctagcccctattattctatgtatatatagtcttatatcatatcatagttttggttgat

SEQ ID NO: 14365 - DNA, 930 bp, Arabidopsis thaliana
  Clone ID: LIB22-068-D12_FLI
gtgagaagctcgctgttactcatcgtcagagcctctcgatcttcaattcccttttgaattgaagaagcagatctcttgctctctctatttgacgaacaagaccgacaataatgttgcctttaaggttaagacgacgaatccgaaaaagtattgtgttaggcctaatactggagttgttctcccgaggtctacttgcgaagttcttgtgaccatgcaagctcaaaaggaagctccttccgatatgcagtgcaaggacaagtttctgcttcaaggtgtgatagctagtcctggtgtcacagccaaggaagttactcctgagatgtttagcaaagaggctggacatcgagttgaggaaactaaactgagagttacttatgttgctccaccacgaccaccatcaccggttcacgaaggatctgaagagggttcttcacccagggcttctgtctcagataatggacatggttctgaattttcgtttgagagatttatcgtggacaacaaggctggacatcaagaaaacacatttgaggcgagggcactcattaccaagctaaccgaagaaaaacagtctgccattcaactgaacaacagacttcaaagagaactggatcagttaaggcgtgaaagcaaaaagagccaaagtggtggtatcccattcatgtacgttcttttggtcggactcatcggtctaattttgggatacattatgaagaggacataaaccacccaccttgaaattaatccctcacccgccacgaaggaaaaaaaaaagacttttaactcttttcagtcggacatttttttctcttctgtatttgtcaatttcgccttaaaaaggtgtcctagaagatttgtgtttcgtaactcagtttgctatgtttttttcaacttttgtaatccaaatgactttgcgttggttctttctcc

SEQ ID NO: 14366 - DNA, 3046 bp, Arabidopsis thaliana
  Clone ID: LIB22-069-B3_FLI
ttgccctctggcgttttctgtcttgagctaaagaaataacaaataaaccgaaaaaaataaaaatagaaactttttttttttgtttatttgttctttctccaaaactccttttttttctcaccattatctcatgaacgtgagtggaggctctctgagtagagagagcctacccttgaaaataacctagggatttctccaattttcaagctttacccattcaaaagaatcgtccttttttcctatttctgactttgagctatgatgatggtccattcgatgagcagagatatgatgaacagagagtcgccggataaagggttagattccggcaagtatgtgaggtacacgccggagcaagtggaagctctcgagagagtttacactgagtgtcctaagccaagttctctaagaagacaacaactcatacgtgaatgtccgattctctctaacatcgagcctaagcagatcaaagtttggtttcagaaccgcagatgtcgtgagaagcagaggaaagaagctgctcgtcttcaaacagtgaacagaaaactcaatgccatgaacaaactcttgatggaagagaatgatcgtttgcagaagcaagtttctaacttggtctatgagaatggccacatgaaacatcaacttcacactgcttctgggacgaccacagacaacagctgtgagtctgtggtcgtgagtggtcagcaacatcaacagcaaaacccaaatcctcagcatcagcaacgtgatgctaacaacccagcaggactcctttctatagcagaggaggccctagcagagttcctttccaaggctacaggaactgctgttgactgggttcagatgattgggatgaagcctggtccggattctattggcatagtcgctatttcgcgcaactgcagcggaattgcagcacgtgcctgcggcctcgtgagtttagaacccatgaaggttgctgaaattctcaaagatcgtccatcttggctccgagattgtcgaagtgtggatactctgagtgtgatacctgctggaaacggtgggacgatcgagcttatttacacgcagatgtatgctcctacgactttagcagcagctcgtgacttttggacgctgagatatagcacatgtttggaagatggaagctatgtggtttgtgaaaggtcgcttacttctgcaactggtggccccactgggccaccttcttcaaactttgtgagagctgaaatgaaaccaagcgggtttctcatccgtccttgcgatggtggtggttccattctccacattgttgatcatgttgatctggatgcctggagtgtccctgaagtcatgaggcctctctatgaatcatcgaagattcttgctcagaaaatgactgttgctgctttgagacatgtaagacaaattgcacaagaaacaagtggagaagttcagtatggtggagggcgccaacctgcggttttaagaaccttcagtcaaagactctgtcggggtttcaatgatgctgttaatggttttgtggatgatggatggtcaccaatgggtagcgatggtgcagaggatgttactgtaatgataaacttgtcccctgggaagtttggtgggtctcagtacggtaattcattccttccaagctttggtagtggcgtgctttgtgccaaggcatctatgttgcttcagaacgttccacccgctgtgctggttcgattccttagagaacaccgatctgaatgggctgattatggcgtggatgcttatgctgctgcatcgctcagagcaagtccttttgctgttccttgtgctagagctggggggttcccaagtaaccaagtcattcttcctcttgcgcagacagttgaacatgaagagtcacttgaggtggttagacttgaaggtcacgcttactcacccgaagacatgggtttagctcgggatatgtatttgctacagctttgtagcggtgttgatgaaaatgtggttggaggttgtgcacagcttgtatttgcccctatcgatgaatcatttgctgatgatgcacctttgcttccttccggtttccgcatcatacctcttgaacagaaatctactccgaacggtgcatctgcaaaccgtaccctggatttagcctcagctttagaaggatccacacgtcaagctggtgaagccgacccaaatggctgtaactttaggtcggtactaaccatagcattccagttcacatttgataaccattcaagagacagtgttgcttcaatggcacgtcagtacgtgcgaagcatagtaggatcgattcagagggttgctctagccattgctcctcgtcctggctccaatatcagtccaatatctgttcccacttcccctgaagctctcactctggtccgttggatctcccggagttacagccttcacactggtgcagatctctttggatctgattctcaaaccagtggtgacacgttgctgcatcaactttggaatcactctgatgcaatcttgtgctgctccctcaaaacaaacgcttcaccggttttcacattcgcaaaccaaaccggtttagacatgctggaaacgactcttgtagcccttcaagacataatgctagacaagacccttgacgaacctggtcgtaaagctctttgctctgagttccccaagatcatgcaacagggctatgctcatctgccggcaggagtatgtgcgtcaagcatgggaaggatggtatcttacgagcaggcaacggtgtggaaagttcttgaagacgatgaatcaaaccactgcttagctttcatgttcgtgaattggtcgttcgtttgaagaataataagaaataagaagaccagattttactccatttttcccttggtagggaggttatttatgtaagatattaaagttaggtgccactatgctccaaagtcttttgaaattcgaggaccaatatgtaatatgacgaatgtctgatcttgtatggattgttcttgttcctatgttacgttatatggcaagattattatgataatgttatcaagttttttttcttgtg

SEQ ID NO: 14367 - DNA, 1552 bp, Arabidopsis thaliana
  Clone ID: LIB22-069-D11_FLI
ttatcgatcagatcattttttctcaatgacgaaaaaggcggtgcttattgggatcaattacccaggaaccaaggcggagttacggggatgcgtcaacgatgttcgtcgtatgtacaaatgtctcgttgaacggtacggcttctccgaggagaacatcaccgttctcatcgacaccgatgaatcctctactcagcctactggcaagaacatccgccgcgcgcttgctgatctcgtcgaatctgccgattccggcgacgttcttgtcgttcattacagtggacacggtacgaggttgccggctgagactggtgaagacgatgacactggtttcgacgagtgtattgttccttgcgacatgaatctgattactgatgatgattttagagatcttgtggacaaggttcctccaggttgcagaatgacaatcatttcagactcttgtcacagtggtggcctaatcgacgaagccaaggagcagattggagagagcactaagaaagaagccgaggacgaagatgaatctgaagaatcttcttcaagattcgggtttaggaagttcttgcgcagcaaagtggaaggcgccatcgagtctcgagggtttcacattggagggaacaagaaggatgaagatgaggcggaagaaatcgagactaaggagattgagcttgaagacggagaaacgatccatgccaaagacaaatctcttcctctgcagaccttgattgatattctcaagcagcaaacagggaatgataatatcgaagttgggaaaatcaggccaagcctttttgatgcgtttggtgatgattcgagcccgaaagtgaagaagtttatgaaagtgatcttaggtaagcttcaggctggaaatggagaagaaggtggattaatgggaatgcttggcaaattggcttcagggtttcttgagggtaaactaaacgatgaagactatgtgaaacccgctatgcagacacacgttgggagtaaagaagaggtttatgctggtggatcaagaggttcggttccgcttccagacagcgggatactgatcagcggttgccaaaccgatcagacctctgctgatgcgactccagcggggaaaccaactgaggcttatggagcgatgagcaattcgatacagacgatattggaggagacagacggtgagatatcaaacagagaaatggttacaagggctaggaaggcattgaagaagcaagggtttactcagcagccaggtttgtattgccatgatggttatgccaacgctcctttcatctgttgaaaacagaggttttattgaatgttttttactacgtacgacacgttgattgaagtttctggtcggaaaaataagcctgttttttttttttgctgtttgatggcatttatgtaatttacaagttatgtgtgttgtgttctgtgaaacactaaaattcttcttgttttattgagatctattatgttggttgtgaaattattttttgtttttcttttcttgttaactctctgtattctgcacatcaataagaaaaagttttttttaacggaacat

SEQ ID NO: 14368 - DNA, 807 bp, Arabidopsis thaliana
  Clone ID: LIB22-071-A2_FLI
aaggtcataacgctcagacgaattttctcactcctcctcctagtccgacgactgaggtgttaccggaaactccggtgattgaccttgaaactgtctctggttgtgattcggcgagggaatcgcaaatcagtctgtgttctccgacttctgttctccggtttagtcacaacgacgaaacagagtacagaacagagccaacggaagaacaaaatccgtttttcttgcctgatttgtttcgctccggagattatttttgggattccgaaattacccctgaccctttgtttctcgacgaattccaccagtccttgttaccaaacatcaacaacaacaacacagtgtgtgataaggatacgaatctgtctgatagttttccgttgggagtgatcggagatttcagctcatgggatgttgatgagtttttccaagatcatttgttggataagtaatttgatgagttcttccccagaatttttctgggtttctctttttggttgtgtgagtgagatgagtggtttgatgacaacgacggggatgaatcttagccgtccgttttccatttcgtggacggctccgatcagcggaagaagcgcaacggagtttttatttatctgtttgagaattttataatttaatttgcgagtaaatatagtaattagtgttaagattgtgagagtttaagttaattagggaggggttttgaatattggggattttgggaggtttttgtttggtttctctccaagtctgtcactatgcaaggaagcagtataaagaccgtatatatattttattattaatattgat

SEQ ID NO: 14369 - DNA, 1225 bp, Arabidopsis thaliana
  Clone ID: LIB22-071-H9_FLI
ctctatctctctcttaatcgatcgatgaagatcaggtgcgacgtctgcgataaagaagaagcgtcggtgttttgcacggccgacgaagcatctctctgcggcggctgcgaccaccaagtccaccacgctaacaaactcgcctctaaacatctccgtttctctctcctttatccttcttcttccaacacctcctctcctctctgcgacatctgtcaggataaaaaagctctgttgttctgtcaacaagatagagctattttatgcaaagattgcgattcatcgatccacgctgcgaacgaacacacaaagaaacacgataggtttcttcttacaggggttaagctctctgcaacatcgtctgtttacaaacctacttcgaaatcttcttcttcttcttcaagcaaccaagatttctctgtccctggatcatcaatctctaatcctcctcctctcaagaaacctctctcagctcctcctcagagcaacaagatccaacccttttcgaagatcaacggcggtgatgcgtcggtgaatcagtggggatccacaagcacgatttctgagtatttgatggatacgttacctggttggcacgttgaggatttcctcgattcctctcttcctacttatggtttctctaagagtggtgatgatgatggagtgttaccatatatggaaccagaagatgacaacaacactaagagaaacaacaacaacaacaacaacaacaacaacaatacagtgtcacttccatctaagaatttagggatttgggtccctcagattccacaaactcttccttcttcatacccaaatcaatacttttctcaagacaacaacatacagtttgggatgtacaacaaagaaacatcaccagaagtagtgtcttttgctccaatacaaaacatgaaacaacaaggacagaacaacaagagatggtatgatgatggtggcttcactgtcccacagatcactcctcctcctctttcttctaataaaaagtttagatctttctggtaattttactatctccctaaatgggggagttttttttttgtttgtttgtttctccttcatttctcccaactttgatctcaatagaattaggctctctctttttttgtgttctgtcattttgtaaatttgagtgtgattgcggttttgctgttttaatctttgtaataatcatataatctctttccattaatgcacatgtttcatgtac

SEQ ID NO: 14370 - DNA, 1884 bp, Arabidopsis thaliana
  Clone ID: LIB22-074-F3_FLI
ctcagatctgaaaccttatctgaattacatttccccgattcgacgttgtgcgaattgatgcagcagagaggacgatccgtcaaccgcagatcacgaagcttctctagatccagactcgccgtcgaaggccactgaattactctctcccctctcttggcagatcttcttcttcgttttttcccgacaaacgacatttccgaaatggctgcatcgtacgaagaagagcgtgatattcagaagaattactggatagagcattccgctgatctgactgttgaagctatgatgcttgactcgagagcttctgatctcgacaaggaagaacgtcctgaggtactctctttgctccctccatatgaaggcaaatcagtgttggaacttggagctggtattggtcgtttcactggtgaattagctcaaaaggctggtgaactcattgctcttgacttcattgataacgttatcaagaagaatgaaagtatcaatgggcattacaagaatgtcaagtttatgtgtgctgatgttacatcccctgacctcaagatcactgatggatctcttgacttgattttctccaactggctgctcatgtatctttctgacaaagaggtggagcttttggcagaaaggatggtcggttggatcaaggttggaggatacattttcttccgtgaatcttgcttccaccaatcaggggacagtaagcggaaatccaaccccactcactaccgtgaaccccgtttctattccaaggtctttcaagagtgtcagactcgggatgctgctggaaattcatttgagctctctatgatcggatgcaagtgcattggagcttatgtcaagaacaagaagaatcagaatcagatttgttggatatggcagaaggtcagctcagaaaatgacagaggcttccaacgtttcttggacaatgtccaatacaaatccagtggaatcctacgctatgagcgtgtctttggccaagggtttgtgagcactggtggacttgagacaaccaaagaatttgtggagaaaatgaatctgaaaccaggacagaaagtcttagatgttgggtgtggcattggtggaggtgacttctacatggctgagaagtttgatgttcacgttgttggtatcgatctttctgtcaacatgatctctttcgcattggaacgtgctattggactcagctgctcggttgagtttgaggttgctgattgcaccacaaaacactacccagataattcgtttgatgtcatttacagccgtgacactattctgcacatccaagacaaaccagccttgtttaggactttcttcaaatggcttaaaccgggaggtaaagttctcatcagcgactactgtagaagccccaaaactccatctgctgagttttcagagtacatcaaacagagaggatatgatctccatgacgttcaagcttatggacagatgctaaaagacgctggcttcactgatgtgatcgcagaggaccgtactgatcagtttatgcaagtcctgaaacgtgaattagacagggtggagaaagaaaaggaaaaattcatctccgacttctccaaagaggattacgatgacattgttggaggatggaagtcaaagctggagaggtgtgcatcggatgagcagaaatggggacttttcatcgccaacaagaattaagcaaatcgaaatctactacttctatgttttcttctttctttgtttgttcaataaaaatgtcatttccgctaggtgatgatatatgcctgtagtgtgttatgtggacttgttgagtggtgttaaatcttgtttcccttatgtgatatgtaaaccgaattatgtttggtcttagtttatactctttgatttgaagaattttctaaatgc

SEQ ID NO: 14371 - DNA, 1470 bp, Arabidopsis thaliana
  Clone ID: LIB22-075-E8_FLI
acaaacacgatcgccgatccatttacgagccgtcgttgctctacacatatcaacaacaaatcttatcctcccaactatcttttctctgattttcttttcttctccagtttccatttctagaatcgatcgatattgaaggagagaagatgcctggtttaacatgtaacgcgtgtaacatggagttcaaggacgaagaagaacgtaaccttcattacaaatccgattggcaccgctacaatctcaagcgcaaggtggctggagttcctggagttacagaagccttgtttgaggctagacaatctgctcttgctcaggagaagaataaatcaaatgaagcacctatgctttatacttgtgcaatctgtgctaaaggttacaggagttccaaggctcatgagcagcatcttcagtcgcgtagccatgttttgcgggtttcacaagggacatcaatcaacggagaggaggatatagcgattatcaggcaacttcctcgccgtgttcaacacaggggttccattgatgatgatagtgaagatgaatgggtggaggttgattctgacgaggaattggctgctgaagaagcctctgattctttgtctaagttgaatgtgaatgagtctggatctgctgaagatatggatgatgatggtgatgcagataagtatgagctggatccaacctgctgtttgatgtgtgacaaaaaacataagaccttagagagctgtatgcttcacatgcataagcatcatggtttctttattcccgatattgagtatctcaaggatcctgaagggcttctcacttaccttggtcttaaggtcaagagagacttcatgtgtctgtactgcaatgagctgtgccgtccattcagcagcttagaagctgtaagaaaacatatggaagcaaagagtcattgcaaactgcattatggtgatggtgatgatgaagaagatgctgagctagaagagttttatgactacagcagcagctatgttgatgaagctggaaagcaaattgttgtatctggtgaaacagacaatactgtagaactcgttggtggttctgagctcttgatcacggagaagtccgagaacacaacaacgtctaaaactctcgggtcccgtgaattcatgcgttactacagacagaagccacgcccaacttctcaagacagcaaccagataattgcctctttatcttcaaggtacaagagcctgggtctgaagacagtaccgtcgaaagaggagactttgaggatgaaagtgcgcaaggagatgagcaagagaggcgagacaatgcgtaccaagatcggagtgaagagtaatgtcataagaaacttgcccaataacgtcccatattagtttctgtgtatgtgccacttgttctcaagtgttggattgtatgatgatttcatgtacttttgagtctttgaccaagttgtgttgctacttggtaataagagtaagcttt

SEQ ID NO: 14372 - DNA, 1821 bp, Arabidopsis thaliana
  Clone ID: LIB25-011-H1_FLI
gtctccatctccatgaagctactgcttctgggtaagttttgtggtcttcgttcatcttttctctagcaatttagtattccattttctcaatccctctggttagaaatcgtgtccggtgatttttgaattatatccttttggtgttttcttcgattttgggggaattcgatggatactctgttgaaaacacccaacaagctcgattttttcatccctcagtttcatgggtttgagagattatgcagtaacaatccataccattcaagggttaggcttggtgtgaagaaaagggctatcaaaattgtctctagtgtagtgagtggtagcgctgctcttttggatcttgttcctgaaactaagaaggagaatcttgactttgagcttcctttgtacgacacttccaagagtcaagttgttgatttggctattgttggtggtggtcctgctggtttagccgtggctcagcaggtttctgaagctggactctctgtttgttccattgatccttctcctaagctcatatggcctaacaattatggagtttgggttgatgagtttgaggctatggatttactagactgcctggataccacatggtctggtgctgttgtctatgtcgatgaaggtgtcaagaaggatttgagccggccttatgggagagttaaccggaaacagctcaaatccaaaatgcttcagaaatgtattaccaacggtgttaaatttcatcagtctaaggtcactaatgtggttcacgaggaggcaaactccactgtggtctgcagtgacggtgtaaagattcaggcttccgtggttcttgatgccactgggttttcccgatgcttggttcagtatgacaaaccttacaaccctgggtaccaagtagcttacgggattgtagctgaagttgatggtcacccattcgatgtagacaaaatggtgttcatggattggagagacaaacatctggactcatatcctgagctgaaagaacggaacagcaagatcccaacgttcttgtacgctatgccattttcttccaaccgaatatttcttgaagaaacttctttagttgctagacctggtctgagaatggaagatatccaagaaagaatggctgctagactgaaacatctggggatcaatgtgaagaggattgaggaagacgagcgttgtgtgatcccgatgggcggtcctttaccagtcttacctcaacgggttgtggggattggtgggacagcaggaatggttcatccttcaactggttacatggttgctaggactcttgcagctgcaccaatagttgcaaatgccattgtgagatacctcggttcaccaagtagtaatagcctgagaggagatcaactctctgctgaggtttggagagacttgtggcctatcgaacggcgtagacagagggagttcttctgttttggaatggatattctgctgaaactcgatttagacgctactagaaggttctttgatgcattctttgatctgcaacctcattactggcacggattcttgtcttccaggctgtttctcccggaactgttggtcttcgggttgtcgctcttctcacacgcttccaatacctcaagattggagatcatgacaaaggggactgttcctcttgctaagatgatcaacaatttggtacaagatagagactaaggaccagaaacttagacatataagtacatctgttctttggttcttgaccagtagtatatccgcattgcaagtcgttggataattgtgtataaaccacagatcataacctgaatccttgtgaaatcaaattgttactactagttcatt

SEQ ID NO: 14373 - DNA, 1019 bp, Arabidopsis thaliana
  Clone ID: LIB25-012-H7_FLI
ctaaaccgaatgttcctggatcgggcaatgtatccgaggatactcagtctagtggtggtaatggtcagaaaggcagagaaacctcttccaacacaaagaagaggaaaagaaatgggcagaagaactctgaagcagctcaatcacacagatcccagcagtctgaggaagaaccagacaacaatggtgatgaaaagcgcaatgatgagcaaagtccaaattcacctggaaagaagtcaaacagtgggaaacaacagggcaaacaaagttctgatcctccaaaagatggatatattcatgtacgggcacgaagaggccaggccacaaatagccatagtcttgcagaaagagttaggagagaaaaaattagtgaaaggatgaagtttcttcaagatctagtaccgggttgcaacaaggtgactgggaaggcagttatgcttgacgaaatcataaactacgtacaatcactacaacgccaagttgagtttttatcgatgaaacttgcaactgtgaacccacaaatggactttaaccttgaaggtcttcttgcaaaagatgcacttcaactacgagctggttcttcatctacaacaccattcccaccaaatatgtcaatggcttatcctcctctacctcatggattcatgcaacaaactctttccagcattggaaggaccattacctctccattgtctcctatgaatggtggattcaagcgacaggaaacaaatggatgggagggtgatttgcaaaatgtgatccacattaactatggagctggtgatgtcacacctgaccctcaagcagcagctacagcatctcttccagctgcaaatatgaaggttgagccatgatatttcgtcctgttagatagaatattaaattattgtaatcttttttatttatttatttaaagttgctatatgtactatattgtaatgatgttactattaacgaatacgatacttagactaaactactactaagcgtttgagattagtggaagaagagtataaactgtg

SEQ ID NO: 14374 - DNA, 1273 bp, Arabidopsis thaliana
  Clone ID: LIB25-013-A4_FLI
aactcaccacgctgtccttagctcatacgaatacgttagccaaggccttaggcagtacaacttggacaacatgatggatgggttttacattgctcctgctttcatggacaagcttgttgttcacatcaccaagaacttcttgactctgcctaacatcaaggttccacttattttgggtatatggggaggcaaaggtcaaggtaaatccttccagtgtgagcttgtcatggccaagatgggtatcaacccaatcatgatgagtgctggagagcttgagagtggaaacgcaggagaacccgcaaagcttatccgtcagaggtaccgtgaggcagctgacttgatcaagaagggaaagatgtgttgtctcttcatcaacgatcttgacgctggtgcgggtcgtatgggtggtactactcagtacactgtcaacaaccagatggttaacgcaacactcatgaacattgctgataacccaaccaacgtccagctcccaggaatgtacaacaaggaagagaacgcacgtgtccccatcatttgcactggtaacgatttctccaccctatacgctcctctcatccgtgatggacgtatggagaagttctactgggccccgacccgtgaagaccgtatcggtgtctgcaagggtatcttcagaactgacaagatcaaggacgaagacattgtcacacttgttgatcagttccctggtcaatctatcgatttcttcggtgctttgagggcgagagtgtacgatgatgaagtgaggaagttcgttgagagccttggagttgagaagatcggaaagaggctggttaactcaagggaaggacctcccgtgttcgagcaacccgagatgacttatgagaagcttatggaatacggaaacatgcttgtgatggaacaagagaatgtcaagagagtccaacttgccgagacctacctcagccaggctgctttgggagacgcaaacgctgacgccatcggccgcggaactttctacggtaaaacagaggaaaaggagcccagcaagtaaacctgccagttcctgaagggtgtactgatcctgtggctgaaaactttgatccaacggctagaagtgacgatggaacctgtgtctacaacttttgagcaatattatcctgcttattaatttgctgttttactcctattgtctcttttggtttatttttctcctttgtgtaattgtggattggatcttgtcctcttttgttccctttttttttttttatgatgtacaacacattggtaattt

SEQ ID NO: 14375 - DNA, 1663 bp, Arabidopsis thaliana
  Clone ID: LIB25-015-E3_FLI
tttctccttttacccttcttcacacgcagctaaagaagaaatttgtggaatcatcgcttattcgtttcaaaagtcattcatttttggtgtctctgcttcagaagatacttgacgatctctcctactgaaaggagcttgctttcttcagtgtgacggttgagattggttgaaagatgggttatatgtgtgatttctgtggtgaacaaagatcaatggtgtattgtcgatctgatgcagcgtgtttgtgtctttcgtgtgaccgtaatgttcattctgctaatgctctatcgaaacgtcattcgcggactttggtatgtgagaggtgtaatgcacagccagcttctgtccggtgtagtgatgagagggtttctctatgtcaaaactgtgattggtcaggccatgacggcaagaattctactactacttcacatcataaaaggcaaaccatcaattgttattctggttgtccctcgagtgccgaattatcctcgatatggtctttctgtatggatttgaatatctcttctgctgaagaatccgcttgtgagcaaggaatgggtttgatgactatagatgaagatggcacaggagaaaaatctggtgtccaaaaaattaatgtagaacagcctgaaaccagttcggctgcacaaggtatggatcactctagtgttccagaaaattcatcaatggctaaggagcttggagtatgtgaggatgacttcaatggaaatctcatttcagatgaagtagacttggctcttgagaactatgaagaactctttggttcagccttcaactcatcaagatatctcttcgagcacggtggaattggaagtcttttcgagaaagatgaagctcatgagggctcaatgcagcagccagcattaagcaataatgcatctgcagattcgttcatgacttgtagaaccgagccaataatttgctattcatcaaagccagcacattcgaatatctccttctctggcatcactggagaaagtaatgctggagatttccaagattgtggggcgtcatcgatgaagcagctttcaagggagccacaaccatggtgccatccaacagcacaggacattattgcttcctcacatgcaacaacacgtaataacgctgttatgcgttacaaggaaaagaagaggctcgcaagtttgacaagcgagtaaggtatgtctctaggaaagaaagggctgatgtgagacggcgtgtgaaaggacggtttgtcaagtccggtgaagcttatgattacgacccgatgagcccaacaagaagctactgaggataaaacctcaaaacaatgaaagatcacaaagtggagatataagacagagatgcaactaattggcagcgatggatctggaagccattattggttgaaaaggaacacgagttctccgcctcaaaagcgtcatacttgcttagaaaggcgcatgcttctgcagttctgcctcattttttgcataaagtttgttatcttcttctgtcatttggcatcatgacttgactgtgaaactagaaactcttctacagattcaggttcatgatccttaaattttgtcctattataatttgtgtagccaaggcaaaacaacgaatgtatattttttttacgtcatataaataataaccatgtagaagtttgggggtt

SEQ ID NO: 14376 - DNA, 1142 bp, Arabidopsis thaliana
  Clone ID: LIB25-016-F11_FLI
gcttttgttcttgaaattagggttaatttcttttttccaaataccatcaattctccagaccataaaaactcaaaaagatcagatctttcctctgaaaaagagatacccaacttatgtttttgtgtgtctgtatatagataaacattacatacccatatttgtgtatagacataaaaagtggaaattaaggtaacaaaaagaaatgggaagaggaagagtagagctgaagaggatagagaacaaaatcaacagacaagtaacgtttgcaaagcgtaggaacggtttgttgaagaaagcttatgaattgtctgttctctgtgatgctgaagttgctctcatcatcttctccaaccgtggaaagctctatgagttttgcagctcctcaaacatgctcaagacacttgatcggtaccagaaatgcagctatggatccattgaagtcaacaacaaacctgccaaagaacttgagaacagctacagagaatatctgaagcttaagggtagatatgagaaccttcaacgtcaacagagaaatcttcttggggaggatttaggacctttgaattcaaaggagttagagcagcttgagcgtcaactggacggctctctcaagcaagttcggtccatcaagacacagtacatgcttgaccagctctcggatcttcaaaataaagagcaaatgttgcttgaaaccaatagagctttggcaatgaagctggatgatatgattggtgtgagaagtcatcatatgggaggaggaggaggatgggaaggtggtgaacagaatgttacctacgcgcatcatcaagctcagtctcagggactataccagcctcttgaatgcaatccaactctgcaaatggggtatgataatccggtatgctcagagcaaataactgcgacaacccaagctcaggcgcagcagggaaacggttacatcccggggtggatgctctgagagtcatgtgctgtgttaaagctcaccaacaaaagatcttttatatatataaaagtatagacacaagactttggatttgtagacataagtggctatatataatggtcctgaggatcttcaagacatttgtatcttttgggaatccttgcttatattaagaattcaaatgtgtggaacttgtttt

SEQ ID NO: 14377 - DNA, 623 bp, Zea mays
  Clone ID: LIB189-011-B10_FLI
gttcctgcacgcacgccctggtacccctgctcgctgttgggccgaccgtcagcagcttcccggcctccgtcgtgctcagcagcgagtaatttatgtcggagcagttactgagacgccctcctttgcgtcgtgctcgccagatcaagcctcgcgtcgtcgatttgcgcagttcatgttcggcaatcggtttagtctccgtcgaacttctatttaccgtgacgccgagctccttcaacactgccccactccgttgtcgttattccgtcgcctcacttcgatgtcagttccttcatgacatctcctacttgtgttcgcgccgacaaaaggatcctaagagaatgtggaaaaacaagccccaagttgatgcctcaaatactcgacgaaaagcctgaactataaattatcgtggttcttgcagagttcgcgtcgaatttaattttggatgagctgatttgctactactattattttgttttaatgaatagattgatagatatgtaggttgcgatgattttttttatttagtataggtacgcttagtaattatggctagctccgttgttgtgtccgtgtgctgttacgtgacaatataattgtttttagaataatgaagtagttgagtc

SEQ ID NO: 14378 - DNA, 468 bp, Zea mays
  Clone ID: LIB189-011-C10_FLI
caatgcgcatgacggatttaactttaccaaatcagtcctcagtgagatggatttaactttacttctatttcatgttatgcagtctttggaactttgggacataagggagaagaacaccatgaccttcaacaatgcgcatgacggtttggttgcagccctggcatcatccagtgctacagggaaggttgcctcagtaagccatgatagaactctcaagctctggaaatgactttataatagcgatcggcgtgaaaacgattttctaccaaaaatgaccacatgacgcacatgacgaaaaggtagctgacaagatactctggagccgcgtgggctcaagaactaacggtggtttgtgttgtggttcttgtatgctgttcaatatgctattgaagtttgtaactcctaatagaaacgttcagtcaagactccaagattgtacctcggacaagtagcaaatatttattcccc

SEQ ID NO: 14379 - DNA, 778 bp, Zea mays
  Clone ID: LIB189-011-C2_FLI
catgattgagaatcagaagtcagaattgatagcatttggtctttgcttcagccttgtctcttacctttatgttctcgctacaaggaaaaacatgcgatttcaagtttcatatggccgtaacagtgatcagcagcacccaacactacaaatggtttctgatcttctgaattcagcaacacttgccctagaaagagttggtgaagaaaaatatatgcttttaaacaagatccgtgacttaaatgagttgtccagaaaggaggttgatgagataataaaagtgtgcatgaagcaagattgcatatctcctaacgataacatccgtaaaaggaggtacattgcaatgatagatttgtgttgcatggctggcaaccgagaccaactcattacccttctactccaaataacggaatgtgccgttactattctcctcattcattttcaggacgatgcttctgcaaaaggtctttcttcattttctgatgaactccttcctgtgctggagagactagagcatttgaaagaggacaaagttggacgtagtctgaagttgttccacagatccattactacactaaaggagatgaccatcagaaccataaccatctgaaggccgcagcctgtacaatgtacatgtttattaggatagtacacctcgctagatttgcagatgtaaaacattgttgtgtaagctctcatatatatatatacacacttttgccctgaggcaatgagctgtatgtcatgttttaagagtaaaatgtgatttttgaggggtttc

SEQ ID NO: 14380 - DNA, 877 bp, Zea mays
  Clone ID: LIB189-011-G2_FLI
gctactacacacaaacacagctagccggcgctgccaggttggctttggcgagcaacgacgacgacgacggcgctcaggactcaggtgctttcggttcaggcggaggagggcatggagcgcggcgactgccagttcacggtggtgccgccgcggcagtacgacgaggcccagttcatgcaccagctgatggtggccggcgaccagcaggaccccgcgggcgcggggcggggagctgccgccgccggcggggagaggaagcggcggttcacggaggagcaggtgcggtcgctggagacgacgttccacgcgcggcgcgccaagctggagccccgggagaaggcggagctggcgcgggagcttggcctgcagccgcgccaggtggccatctggttccagaataagcgtgcgcggtggcgctccaagcagctggagcatgactacgccgcgctcagggctcagttcgacgcgatgcacgcccgcgtcgagtcgctcaggcaggagaagatcgcgctcgccgcgcaggtagacgagctgcgggggaggctgaacgagcggcaagaccagagcggcagctgcgaggtcaacgacgcggaggcggcggcggacgacaagaggaacaatagcaccagctccctcgtgcaggacgacggcgccacgccgccgccggctgcagtagacgcctccgaggactcggcggcgaccggcgagtactacgaccacgtcgcgtacgagtacgatggcctgcacgaccccttcgtctgcgccactccggacctgtgggatacgtggccgctgctggagtggaacgcggtggcctgaaacctcgatcgtgtactcgtcgtcatgtctctgtatctagtgcacgtgtggtggattc

SEQ ID NO: 14381 - DNA, 1001 bp, Zea mays
  Clone ID: LIB189-011-G9_FLI
cttctcctccctctcttccttttctcttttctttttctcattgcgacgcctgcctgggcgaccgtcgccgctctacaccaggtgcccaggtcttcgccggcgccgagcagccaccagccgctgtgcaacaaatcacgtctgtcgagggcatggatccctacatgacaaggctcggcgccggagccactcaccagctttccagggctgaagcaatgcctgaccgaaggtctaggttttggcagacagatgtgcagcttgcgcctcggatagacatcatctgccctctgcctcgccgcccttctcgcctaccggttctcaatagccccaagctcaatggggcactcccactgtatagagcagaccccacttttgatatcgttgacctcatccttagcaagaatgaccctgatgtggatactgattcaagcagccaggcgggctttttctgtggctcgcctcctgcacgcactgacaaccctgttatcaatgacccacagtttggaaagaaaacaccatccttttctcctttatttggtggaagctcttccgggaaaatgacagctggaagagtcgaagtaggttctccgtcgtcttgcggggcgagcagcccgaaagtaaggatcgaaggttttgcttgcgggaacaaagagccccctcactgttttgcctgatgatccggatcattgaccctacctaaccctgttttgctacccccgcaacatgtacatttcccctgctagtttctttggttaaaaaacctggtagtttctttgagtcggagtcgagtaagagcgcttgttgttgccccttgtgatgaccgtgggtggcttttggtgcaagggagcagagcacagctctcggatgtaaatagggtggcgtatgtagtgctagatgtttgtatgtgtctgctaaaatgtagtagtaaggttgggtgggtccatgtgtcggcgtctgtaaatagcgtcatgcatttggatgtaaattgaaatgcgtcttcaatt

SEQ ID NO: 14382 - DNA, 1175 bp, Zea mays
  Clone ID: LIB189-011-H11_FLI
acgggccaattatatcccgttgaaatacaatacagaagaagtttaaggtatcttcaacacagctcctgtactagtcatgcccataccgggcattgacgttgttccttgtcggtccattcctcgatggatttttgactaaccaaaatgtctttgctttcgactacacaactcaagttctgtttttcatcatgctgtcgtgcctgatttcagtctcggtgaacttcagcacttttctcgtgatcgggaagacgtctcctgtaacctacaaagtacttggccatctgaaaacatgcttggtcctcacctttggctatgtcctgcttcacgacctatttagctggagaaacatacttgggatcctaatcgtggtaattgggatggttctgtacttgtacttctgcactagagagactcagcaaataccagcagaagcctccccgcaagtcgttcaggtatctgtctgctggaactctcggtctgaatggtgcttttagcaaggttgccaaggttggtcatgttgctggctcaagaaccagagaaaagttacaattggttgtatcaaatctagcagccaaagtgaatcatcaagcgattttgtttcaagtaaaaagacaaacttgttttacgtgcagctggaactcgggatcttggtgcatcctgctgattgcaaaagcatgttagatgctttcatagctggctgtgatttccattccaggatagccatgaacatgtatcagcatattcgtgagaccattgaagaagagaaagtaattcttgagtggcatcctcaacccgatcaagagaaacctctcgtgctgttgttgaaggatgcttttggcgctgagaggaggaaagctataagatgctaaatctcttcattgtatacgggaaaacgtaggaaggcactgcagctgatgttgctatgtgtgccatgcttgggatagacagaaatactcgtcttaaggagcttggttggacgctactcatgcgggtagtttatgcataaagttatgctcgttcgctgcttaaatgttgcatattttgtttttctctttgaaactgtgaagggcgcaactttttaacgacttctgtaacttgtgtatctagcatctgtattcggtattctaagttaaaatggcaacatttaattatattttacataatttcttttaagg

SEQ ID NO: 14383 - DNA, 622 bp, Zea mays
  Clone ID: LIB189-011-H4_FLI
gaagcggcagcgagcgaggatgccgtgcctgaacgtgtcgaccaacgtgaacctggagggggtggacacctccgccatcctcgccgaagcctccaagtccgtcgccaacatcatcggcaagcccgaggcctacgtgatggttgttctcaagggttcggtgcctatggcatttggaggtacccaggagccagcagcttacggtgagctggtttccatcggaggcctgaaccctgatgtgaacaagaagcttagtgctggcatcgcttctatcctggagtcaaagctgtctgttcccaagtcacgcttctacctcaagttctatgactcgaagcgctcggacttcggttggaacggctccaccttctagacttgaggtctgcagctgaaataaaagaaattcgtggaatcatggtacctaatgcccatggctattgcctattaaggacaatgtcataagatgtgtcttaatcggtgctgaactgagaaacagtaactgttgtcgtggaactggaagtggggtgctggcgtgtcagagtgcttgcttcctacctagcatagcatgcctgtgctatcttgttattggtattggcttgatatcagtctatattatcatttacggagt

SEQ ID NO: 14384 - DNA, 721 bp, Zea mays
  Clone ID: LIB189-012-A5_FLI
gcactcgtcaccgttccgagaccagcgccagacgcagacggccccgaacgccggcggcggagcatcaggtcgtcgacctccgagcatcgacccgccgcgatggagaagggaaagggcctcgctcgccgctgggcggtggagctccccgacgcctcctcctcctcccccgccgtccccgacccgcccggcttcaccagatccgcgcctgacgcggacgacgccgctggagcgcgccagcgcaaggactccgaggctgcatggaaggcgcagaaagcttgggaagttgcgcaggctccgttcaagaacctgatgatgatgggatttatgatgtggatggcagggagcactgtccacctcttcagcatcggaattaccttctctgctctgtggcaacccctcaacgctctccgatctgttgggaaagtttttgaaccatttaaggacccaagggtggatactattgctcctaagttgctctttattgccctcaatttggctgccatgggattgggtatatggaagcttaatacattgggccttcttccaacaaatccatcagattgggtgtcttctctggctcctgctcgggaggttgaatatgccggaggagggctccccttaatttaatgtccatttccatttgaacttattttactagttgtaatattaataccgagtgacatttttaccatacacccctgaatacacgaagttccgggtt

SEQ ID NO: 14385 - DNA, 826 bp, Zea mays
  Clone ID: LIB189-012-D11_FLI
gaactaccttcgccgctctccttgatccgcaattttctcccacatctctcttctgcccacttgcctccatcttggcctccccctccactccccacccccgaacatccggcgccgtccacacccttgcaccccgactcccctcgtccttcgtggccacgatgggggcgtccatggcatcgccttaggggcgatcgatctgggagaaagtgctggagcacgtggcgtcgtaccaccagcagcaacggaggcagaagctacgcaagagcctcacctacaccggcagtgagttctcgttcgctgtccggggtcgtggggacgaccccgcctccacgtccgttggggcacagaacgaggacatgcctcttgagcacgtctttaaaatcattagatccgatggcaaaagtgtgtgtttatggttcctgagtcagatgatctttcttcagttttagatgtgatagatattagtatgaaagataaaactagaatgctatgtctgtcaaaggagctttcttcagtttcagtttttcagttggagaaaacatttaagacaatattttctcgtttgttctccatatggggcttgttccacgccacttgaaggaagaagggaatggtggtgttaagttcggacaatacatctacacatcttggagcatcggcatcaatgttttcaatcttctcaaatttcaaattattctggtctcttcgtgcaaccataaaagtttattaagtcacttatctgagtggtctaaaagtctagcatatttttgttcctctgcctgtcgagacggatcaactgacatgaataatatccagtgaatactgc

SEQ ID NO: 14386 - DNA, 2184 bp, Zea mays
  Clone ID: LIB189-012-E4_FLI
cacacgctgccacgcacccacggtccgcggaccgcgacccacccgacccgcgatcgccatcgcctcacgcactcgcatcctcccggactacccataaaaccaccgcgacggcgacggcgacgggtcctccgcttcgcctacggcatattcccccgaggccccgaaccaaaccaaaccaaaccagcccagatcagcgaaacacactccgctctcccgagaccggacacatggcggcggcggcggtgacgtccaacggcggcgcagtggccgcaaatgggccggcgcccggccggctggcctccgtgtacagcgaggtgcagacgaaccggctcctgcacgcccttcccctcccctccgtcctccgctccaacttctcggtcgtcgacggccccgccagctccgccgcgggcaaccccgatgagatcgccaagctcttccccaacctgttcggccagccctcggcgtcgctggtgccgtcggccgagcccgcggcgaccaggccgctcaaggtcggtgttgtgctctccggtggacaggcgccgggcggccacaatgtcatctgcggcatctttgactatctacaggagcgtgcaaaaggcagcaccttgtatggatttaagggaggcccagctgggatcatgaagtgcaagtatgtagaactcacttcagactttgtgtatccctacagaaatcagggtggatttgatatgatctgcagtggaagggacaagattgaaacaccggagcagtttaagcaagctgaagacacggccaacaagcttgatttggatggacttgttgtcattggtggtgatgattcaaacaccaatgcctgcctccttggtgaatactttaggtcaaggaacatgaaaacccgtgttattggttgcccaaagactatcgatggggatctgaaatgtaaggaggttccaacaagctttggatttgatacagcttgcaagatatactctgaaatgattggcaatgttatgactgatgcgagatccactggaaaatactaccactttgtgaggcttatgggtcgtgctgcttctcacattacgctggaatgcgctttgcaaacacaccccaatgctgcactcattggggaagaggttgctgcaaagaagcaaactcttaagaatgtcacaaactacattactgatatcatctgcaagcgtgcagatcttggttacaactatggtgttatccttataccagaaggcctgattgatttcatcccagaggttcaaaaactcatcgcagaattgaatgaaattttggcacatgatgttgttgatgaggcaggggcctggaaaagcaagcttcagcctgaatcaagggagctgtttgagtttttgcccaatactattcaggagcaacttatgcttgaaagggatccccatggcaatgttcaggtcgcaaaaattgaaaccgagaaaatgctcattagcatggtggaaactgaactggagaagagaaaggcagaggggagatactctgcacatttcagagggcaagctcatttctttgggtacgaaggaagatgcggccttcctactaattttgattctaattattgctatgcattaggctatggcgctggtgcccttctccaaagtgggaagacaggacttatttcctcggttggcaaccttgcggctccagttgaagaatggactgttggtggaacagcattaacatcactgatggatgttgagaggaggcacggcaagttcaagccagtgatcaagaaggctatggtcgaacttgatgctgcacctttcaagaaatatgcatcgatgcgtgatgagtgggccatcaagaacagatacatcagccctggccccatccagttcagtggccctggaagtaatgactcgaaccatactttgatgctggaactcggtgctgcgctatagagatgcgtcctttactttgttcttacagtttttgggagtggagactggccactggagcagcctgcaggtctccatattgtgtgtgaaattgtttaataagaggtttgatgggagttttttgcgtagccgactggatgtagtagcaaaataagaacagggttttttagttttttttttgtatgatttacgcaccaactgaccggtcttgtagctccgattctgtcccccctggttggctggttgcaatctcttgagaatgaac

SEQ ID NO: 14387 - DNA, 724 bp, Zea mays
  Clone ID: LIB189-012-E6_FLI
aaattttcccatgcccaaaaaggattcttcagcaggtggagcttcgaagttaccaaaagaatatgcagaaccatgggactatagccatgattatcctgttactctcccactaaggaagccctactctggaaatcctgaaattctggatgaggaagaatttggagaatcttctgccagcaggacccaagatgatgaattatctgcagcagagcagcttggattaatggatatgtcgtcggaatcacagttcctcttcttccagttgccatcctctcttcctttaccgaggcagccacaatcaggtgctgaccctaacgaagtccgcgatgagaaacgtgaggacatgaggccatcatcgcacaatggctcgaaactcaaagaggttcctgaaggctatatggggaaaatgctcgtatataagagtggtaaagtgaagatgaagataggagacactctctttgatgtttcatttggctcgaattgcatgttttcccaggaggttgcagcaatcaacatcagagaaaaacattgctgtacggtgggagagatcagcaagcgtgctatcatcaccccagatattaactacatgttgggttctgttgacaagatggaagaatagtccattggtttctttcgcgcaaaccatatagaccatattatgccattacaagatagttttgctttcttatagagaacgacctgtgataccctctcagacttcttc

SEQ ID NO: 14388 - DNA, 572 bp, Zea mays
  Clone ID: LIB189-012-E9_FLI
agcgccggttcgagaactacggcaagttcgggctgctgtgcggcgccgacggcctgccgcacctcatcgtcagcggcgaccagcggcactggggcgagttcgtcaccccgggcctgctcttcctctacatcgccggctggatcgggtgggtcggcaggagctacctcatcgccatcagcggcgagaagaagcccgccatgagggagatcatcatcgacgtcgagctcgccacccgcctcctccccagggggttcatctggcccgtcgccgcctaccgcgagctcatcaacggggacctcgtcgtcgacgacaaggacatcggctactactagctgcgcttgttcacctgcttgcactgtgcatatatattgctgctgccgagctgggcgcttggatagtacgtggggaaacatggatggcttttggtgtaggagctgcatgctttgctagggctatctggtcatgtaggaaatggaagctctgctgtactttaagaaacttgatgaaacctttgtataactcaactgtacctctatctatcccttgtgtgtatttgagaacgatttcagagc

SEQ ID NO: 14389 - DNA, 869 bp, Zea mays
  Clone ID: LIB189-012-G12_FLI
gctgatcgcggccatcgttcgccgatggtctgcgtcgtcttcactcgtcagggaaccggctgtgacggcttggttctaacaggcgccgatggaggccatggagctcgtcgtcgcgctcaccgcctgcgccgactccgtcgcagcctgcaaccacgacgtcgccaactactacctcgtgcggctgggcgagatggcctcccccgcggggcccacgctgatgcaccgcgtggccgcctacttcgtggaggtgctcacgctgcgcatggtgcgcatgtggcccagtcgagatctggtcattagattcaatagtgtggtactggtggcatgtggcccagccgagatctgacagttcttagaaaaattcagctttcatttccaatcgttacagctttaaactattatgatcgttactttttcattggcattattacttgagaaaccattcaaaacatccactttgcttttgataaccatgaatttgtaggttcatgcaaaagcatttaagtttgctaagttgcattctaagaacatgtatcaataatgattggaaatgaaagctgaattttttaccggcgagaggctactggagtttgcacctggtggtgtgagctgcgcaccacctccttcataggcagatgtcatctatatggaagcggcaggaggtggaagcactatatatgacacctctatcgctcttgttgattgctggggtcaacatgtgccgctgctgcacttggtgggcctagggaattctaggactctgggctggtttggtgggtagtgaaatttaaatagcaagtgattttctctctggatctcatctattttcttgtccaccgaaccagccttaagatttgttctgtctggat

SEQ ID NO: 14390 - DNA, 1239 bp, Zea mays
  Clone ID: LIB189-012-G8_FLI
caaagagagagagaaacaatcaggggtccatccatttttgtcagccatgacgaacggctatctgttccgcgagtacatcggcgcgcagtccaccggcgtccagttctccgacgtgcccatcaacgccttcgttagcttccacttcatcctctccttcgccatcgactacacgcccgtggggcagcagccgaagccggtgccgaccaacggggtgttcagcccgttctgggacacgggcaacctgtcccccgccgccgtggccgctataaaggcctcgcaccctaacgtcgccgtcatggcggggctcggcggcgacagcgtgcaggacatcgtcaaggccttcttcaccccgacctccgtcgacacgtgggtggccaacgccgtgacgtcgctcacgggcatcattaacaggtacgggctggacggcgtggacgtggactacgagcacttcgccgacggcgccgacgtgaatacgttcgtcgagtgcatcggccgcctcctgacacagctcaagcagacgatgcccaacatcgccacctccatcgcgccgttcgaggacccagtggtccagaagtactaccaggcgctctggagcaagtactccggcgtcatcgactacgtcaacttccagttctacgcctacggcgacaacaccgacgtgcccacgtacgtcatgttctacaacaaccagttggcgaactatcccggcggcaaggtcctcgccagcttcaagaccggcaacgtgaccggactgctctcgccggaccaaggtatcagtggggccaaggagctgcagcggcagaacaagctgccagggctgttcatctggtcggcggacagctccaagaagagcagctacggcttcaagtacgagaccgaggcgcagcagatcattgccaaccactgatcgatctgcgatcaggacttagcttaacaagggatcacacattttacaataaataaatgataacctctcaggtcaacaacaattacttgcaggttaaggagttcggctgttgatttaaggacagaatgatggtgagtgaaaatgcaagtttaaagaaaatcgtcattattctgtcctttaaacttgtactagcaaagtaccagtgtgttgtacgatttacatttatgtttaagtatacaataaaaacataaacacatgtgtgttatgttggttggatatatgtaaatatgagtttagagccaacaatcatggtttaaatctccatttatgtg

SEQ ID NO: 14391 - DNA, 695 bp, Zea mays
  Clone ID: LIB189-013-A3_FLI
ctgggaggcgcgccaggagaaggaccgcgccgcggcctacttcgagcgcgccgtgcaggccgccccggatgactgctacgtgctcgggtcctatgcgagcttcctgtgggacgccgaagacgacgacgaggaaacaggcaccccagcggtcgatgtggtcgcgtcgtgcgactcgccggcgttggtgcccgcgtgctgatcgttgtccgcgtggggtgtggacggtgtccggtggtcacctgcttcatctgctgtgttttgttaggactggtgtacatatgaggacggatgagggcggcggagggagcaccagggtaaatcaactgtcaccgccgtctacggaaccggcgaaaaataattaacaaggaacctcgccgacgggacgaacgcgcggcgaaaaataacgatggccgcagcaaaacggctgggccatcgacggtcacctcgtttgcctctactctaatcattactgtttgtgtttgatagatgtgttagtgcgaccttgtagctggatgaatagctgaatttactgagcagttgatgtacttaggctcctggtgacctaaaatgggtgtgcaaatgtgcaatcctagtgatctaaaatcagtagtgtgtaatcctgtttttctacattgatagtcgatagaggactgcctcgctatatagcttgagctcaataaatcactactaatact

SEQ ID NO: 14392 - DNA, 821 bp, Zea mays
  Clone ID: LIB189-013-C4_FLI
gaaaagtgatttcttgtctgatcctgccttgcacgcactctctgctgcctccaatttgatacaccttgggttccgcgggaatatattgtcaagctttgggcttttacagtttgtaccccctgtcacactctgtgtgttggatttaagcggctgttggatcttaacaggcgatgctatttcaacattccgtaagcgtcatcctacgattgaattgagacatgagctcctgcacgaagttgaggaaaattttgttggtggttcccaatttcgtaaacctagacgcagacgatctcctcatgtgaaagcagaagttggaaacagttttgctggctcaagtaggctacacgatatccgttttgtagatgaaaggataaaatacagcaaggaggaatttgtggagctgcaaggccttgctaaaccaaattcgttaatgcttggcgtgtggcttccaccagaactgcgaaggcccaaatgatagttttggatcttgattccttacgcatttactgccagcatatcataatcttccttgagttattcttgatatgacagacttttgagaattaagcatcaagcatgtcactcagttccaaattatagttcactttggttttgtcctaggtcaaacttttctagctttgacctatgcattcgaataaatgctataccaaaatgtatttcgtgaagaatctaaagaaactgatttgatgttctagatggtggtacactttcctttaaacttggtcaaacataaagaagtttgacttatgaaaccaaagttaactataatttggaacaaagggagtacactggagttatct

SEQ ID NO: 14393 - DNA, 694 bp, Zea mays
  Clone ID: LIB189-013-D4_FLI
atccttacagagagacacacccagcgcgcgagatatctacatcgatcatcatcaccagcgagcgagccggccgagcagcaccgatggcggcgtacatgcgcgtgacgcaccgcgacgaggaaggcaagaaggtgacggagaagatgccggtcccggagacgcggcgcccggacacggccaagcacttcgagcgcaagctggaggagcagggcctccaccgcttcgagcggcacccggcgaacgcgccccggggcgtgggcatcggcgccccgccgcccaagtccgggcgcggcggcaagtacacctgggagggccccggcagcgtcgtcgaggaccagctcgacccggcgccgcccgccatcgaccccaacgaccccaactacgaggagggaggggcggcggacgaggacgacgaggcggccagggaggtggtcgtcggggaggtggaggtcgctaaggtcgccgagagcagggacggcgtcgccagggtcgacgtcgcgccgggcctgctccaggaccagaagcagtaaaaggactgtcttttctggatacgtctagactctataagactgtgtgtcagtgtgttcgagtttgttccgtgcagagagtgcacgtcaactccgctttaattaatctgcttttgttaatatttttactgatcagtaatatgaaccagtggttgatatttggatgg

SEQ ID NO: 14394 - DNA, 951 bp, Zea mays
  Clone ID: LIB189-013-D6_FLI
ctcgtgcgcctcgtggattcgtgggtcgcgactcgcgaccagacgacaaacgtcgagaggggccgatcgtgatcgagcagcgatgtcgacgtcgcggaggcggacactgctcaaggtcatcgtccttggcgacagcggggtcgggaagacgtcgctgatgaaccaatatgtccacaaaaagttcagtcagcagtacaaagctacaatcggtgcagatttcgtcacaaaggaggttctgatcgaagacaggctagtcacgttgcagatatgggacaccgcggggcaggagagattccagagtcttggggttgcattctacagaggggccgattgctgtgtgctcgtctatgatgttaactctaacaggtcatttgatacactcaatacatggcatgatgaattcctcaaccaagctagcccatcagatcctaaaacttttcccttcatcttactcggtaacaagattgatgtagatggtggaaaaagcagagtggtttctgataagaaagcaatggagtggtgtgcttctaaaggcaatatcccttattttgaaacttctgcaaaagaggactacaatgttgacaatgctttcctgactgttgccaagcttgctctagagcatgagcgcgatcaggacatttacttccagagtgttgcggatcctgtccctgagactgagcagagaagcggatgtgcatgctagtagttagtcatcatccttgtcccttccagatcttgcttattgattgcggcatactttttctgcgatgccgagcaggcattctttccatttttcgcaatgtacactaatgttccaaccgtccaacactgttcttctatccagctgtatgatagttactgagcatggttttttttttttgtacgcggtctactgatttggtggccagccaattcttggtttgggcaataagaatacactggtttagactt

SEQ ID NO: 14395 - DNA, 1179 bp, Zea mays
  Clone ID: LIB189-013-E5_FLI
gggcgcgcaggcgctggacgtcgtggaggccgtggtgcgcgagctggagacggaccccttcttcaactcggggcgcgggtccgcgctcacccgcgccggcaccgtggagatggaggccagcatcatggacggccgcggccgccgctgcggcgccgtgtccggcgtctccaccgtcaagaaccccgtgtccctggcgcgccgcgtcatggacaactcgccccactcgtacctcgccttcgacggcgccgaggagttcgcccgtgcgcagggcctggagaccgtggacaacagctacttcatcacggaggacaacgtcggcatgctcaagctcgccaaggaggccggcagcatcctgttcgactaccggatcccgctggcagggacggacacgtgcagcgcgctggcgggcgcggcggacagcaacggcggcggcgtgcacaaggcggggatggtcatgaacgggctgcccatcagcgtgtacgcgccggagacggtggggtgcgcggtggtggacgcgacgggggcctgcgcggcggccacgtccacgggcgggctcatgaacaagatggccggccgcatcggggactcgccgctcatcggctccggcacctacgcgtgcggcgcctgcgccgtgtcgtgcacgggcgagggcgaggccatcatccgctgcacgctcgcgcgcgacgtggccgccgtcatggagtacaagggcctgcccctgcaggaggccgtcgactactgcgtcaaggagcgcctcgaccagggattcgccggcctcatcgccgtctccggcaccggcgaggtggcgtacggattcaactgcaccggcatgttccggggctgcgccaccgaggacgggttcatggaggtcggcatctgggagtgaccagcgcagcgcagcgcggccggggtggagcggagctggaggcccgccatctaaaaagacaaatcaaaatcagtgtgcgtgcagctgcatgtggccatcctgcgattgccatgtgtttaatctccgggtcacaggtgttgtcgatgatccaccactagtagtagggattgcatggagattggtgctcgggtcaataatgatggtgattgtgacggagtgccctgcaaaataattaataattcgtgtgaaaaagttgattatatggttcctgacactatcatgttcggcctttg

SEQ ID NO: 14396 - DNA, 1485 bp, Zea mays
  Clone ID: LIB189-013-H10_FLI
agcttctccttctctctctctccttcctggaccattctctctatctcctttctctctctacacatactcagacgagcagaagcagctagggacaccataggcaaactacttcagcaagaaattaaactatctcctacgcaagatcagaagaaactgtgtatggagcaagaagaggttggcctcgccctgggcctctccctcggctccggccaccaccaccaggagctcaagccccaacatccgtcgcatccgtgtgcggcgttgttggagccttctctgtcgctcagcggcccggcgaccaaggatgatggcccgaccgcaccggtgaggaggttcgctgccgtgaagagggagctgcagacgatggaggggaacgacgacgaggccaccggcagggtacttgtctactcagtggcgtcgtcggcggtggttactgccgacgacgacgaagggtgcaacagcagccggaagaagctgaggctgtccaaggagcagtcggcgctgctggaggaccacttcaaggagcacagcaccctcaaccctaagcagaaggctgctttggccagacaactgaacctgagcccaaggcaagtggaggtttggttccaaaacagaagagccagaaccaagctgaagcagacagaagtggactgcgagattctcaagcgctgctgcgagacgttaacagaggagaaccggcgtctccaccgcgagctccagcagctccgcgccctcagccacccgcacccccacccggctgcctttttcatgcccaccgccgctgccgctgcgctctccatctgcccctcctgccagcgccttgttgccaccggagcatctgccgccgccgcaaccaccgccggtgcagataataagcctaaggcgggcggccccggcggccgagcgccacacgtgttcagccctttcaccaattctgccgcctgctgaacacgcatacatatgtatatacatgcatgcgcacacatacatatatacgtatttttctttagcgctagccacgctctatcattcatcgatggtcatctactagctagatagtaattggttcactagatggcatatattcctgtcccctccccccttaattcattagctttgttttttcacaagctaattaatgaattgatagcggcgtcgcgtgaggacgatggagcaccacgcatgcatatgattctagtagcaaaaacaagagatatatgtcttgtttaatttggtgttgcttctgcttagtatagtgcccactgctggtgctgtagctgtagctttaattagtaggtgttcctgatggatttcctcttgtattagttaactgtcagtcagggaatagtaatgatgacagcatgacaccacatacacatcccagtttatttggatgtggatccatgtatatatgcacatgccacatgacggatctgtttcaacaattaaatactatattgatttgtcttcagaagttttgcatat

SEQ ID NO: 14397 - DNA, 916 bp, Zea mays
  Clone ID: LIB189-014-B2_FLI
gtgccggaggagggcaccgacgactacaggcgtgccgaagaagaagaggcacggcggcggcaccgtgcgcgtacggtgcgcggcgacggcgcccatgggggagaagacggagtaccgggacggcccgctggagcgcgcgttcatggggctgttcgcgcgcaagatggagaagtacgcggcgaagaagccggcggcgcaggcgaaggaggagagggcggtgtgggagtgggactacgagagcttcgtggacgtgtcgcggcgggtgatgctggggcgcacgcgcgcgcagcagcagcaggcggtgcgcgaggtgctgctgtccatgctgccccccggcgcgccggcgcagttccggcggctgttcccgccgacgcggtgggcctgcgagttcaacgcggcgctgaccgtgcccttcttccgctggctcgtcggcccctcggaggtggtggaggtggaggtcggcggcgtccggcagcgcagcggggtgcgcatcgagaagtgccggtacctggagagcagcggctgcgtggggatgtgcgtcaacatgtgcaaggtccccacgcaggacttcttcaccaacgagttcgggctccccctcaccatgaacccaaatttcgaagacatgagctgcgagatgatatacggccaggtgccgcctccgttggaagaggacccggcgtcgaagcaagcttgctacccgagcctctgttccatgtcgacgccatctgccccggcctgtccgaagcttcagtaggtccatacatgcatgtgcagagtttgccggccggacttgggatggaaaaagtatcattagtatttttttatacagaaatgtagcttgtaaactattagtaaagttacatacaatttgttctgagccaggacagagcactctgtaataaagaatacttttctc

SEQ ID NO: 14398 - DNA, 416 bp, Zea mays
  Clone ID: LIB189-014-C5_FLI
cgcacatgcgcagcctgatcatgagggagtgggtggagctcaacagggagtgcttctgcaggaggaccttcccctcggacatcgcgcaggtctgcttgaacaccgtgaggatggtcagcgtcatgtactcgtacaacaaggagcagaggcttcccgtcctcgaggactacgcgacgatgatgttggtggtttgatttgaagcatgcatgcatgcaatgctctctccgatccgcggatatgaaagtaaagtccttgtcatgcagataatgatttgttttgagaccagagtagtctagagtagagattaggctctgtaaaattagatagctaggattagaataactgggcaaacgaatatatggtatatgtccatatgtaaagatgcaatatatagcaacatatatggtaccgtcgtt

SEQ ID NO: 14399 - DNA, 1326 bp, Zea mays
  Clone ID: LIB189-014-G8_FLI
gatggccagcctcaccgacctcgtcaacctcgacctgagtgactgcaccgacaggatcatcgccgagtacatctggattggaggatccggcatagacctcaggagcaaagcgaggacggtgaaaggccccatcaccgacccgagccagctgccgaaatggaactacgacggctccagcaccgggcaagctcccggagaggacagcgaagtcatcctctaccctcaagccattttcaaggacccgttcaggaagggtaaccacatccttgtgatgtgtgactgctacacgccacaaggcgagccaatccccaccaacaagaggtacagcgccgccaaggttttcagccaccccgacgtcgcagctgaggtgccgtggtacggtattgagcaggagtacaccctccttcagaaggacgtgagctggcccctcggctggcctgttggtggataccctggtccccagggaccatactactgcgccgccggtgccgacaaggcctttgggcgcgacgtggttgacgcccactacaaggcctgcctctacgccggcatcaacatcagcggcatcaacggcgaagtcatgcctggacagtgggagttccaagtggggccgtcagttgggatctctgccggcgacgagatatgggtcgcccgctacattctcgagaggatcaccgagatggccggaatcgtcctctccctcgacccgaagccgatcaagggcgactggaacggcgccggcgcccacaccaactacagcaccaagtcgatgagggaggccgggggatacgaggtcatcaaggcggcgatcgacaagctggggaagaggcacaaggagcacatcgccgcgtacggcgagggcaacgagcgccgcctcacgggccgccacgagaccgccgacatcaacaccttcaaatggggcgtggcgaaccgcggcgcgtccatccgcgtcggccgcgacaccgagagggagggcaagggctacttcgaggaccgcaggccggcgtccaacatggacccctacgtcgtcaccggcatgatcgccgagaccaccatcctgtggaatggaaactgatcaagcatgtgcattctcgagggagcccactgtttctcttctgcacaacgcatccgccgtggtgtcgctttggttttgaaatttagattccgttgtcctaaaatttatcactacggtctccggtgtattgctcgggaacaatgaataacgactgcgatgtttttttgtttttgcttgcgtcatagatgtacgtttggctgtgcttccagtttattgggtaaatgaaaaaaatgtaatggtctatcggtctt

SEQ ID NO: 14400 - DNA, 1104 bp, Zea mays
  Clone ID: LIB189-015-E1_FLI
ggtgctcagttaggaactgcgccaagttgccaacgtcgctcggtccaccccctagttccagcatagatgagattggaggatgggggacagtaccaacactggagtcactaggccccagtgttacgaagtctgagaaaggaatgcatttcataggaggagagagcgcagctcttggtagggtacatgagtacttctggaagaaggatcagctgaaagattacaaggtgaccaggaacggcatgttaggtccagactactccacaaagttctctccttggcttgcttctggcagcctttcgccgcgttatatttgcgaagaggtgaagagatatgagaagcaaagagtggcaaatgattcaacatattgggttttatttgagttgatatggagagactacttcagatttctatcagcaaaatatggaaacgccatatttcacctgggaggcccgaggaaagtagtatcgaagtggagtcaggaccaagcactgtttgaatcatggagagatggtcgaactggataccctcttattgatgccaacatgagggagctttcagccaccggttacatgtccaaccgtggtcgtcagattgtctgctcatttcttgttcgagatatgggtgttgattggcgaatgggagccgaatggttcgagacatgcttattggattatgacccagcttcgaattatggcaattggacatatggagcaggagttggcaatgatccacgagaagatcgatacttcagtatcccaaaacaagccaagtcatatgatcctgaaggggaatacgttgcatactggttaccagaacttcggtcacttgcaaaggaaaggagaaatttcccaggagcctcatacatcaggcaggtagtaccactgaagtttgatggtggaaatcagaggaaggatcagcaattcaaccggcagagaagaccaaacaacgtgtacataagacaagtaaaataggaggctcttgattcacttgaaattgaaccatctatcagtaggagatgaagcaaatttttacacaactgattgtggtgtaaacatacgcgaattactctatggtcttatgcaatgttcattgatgcattcagat

SEQ ID NO: 14401 - DNA, 1234 bp, Zea mays
  Clone ID: LIB189-015-E3_FLI
agcgtgtgttcgtttcgaggacgcacacacagacgccatggaggtgacaccaaaccacaccctgaccgtgaccgggtgggcggccatgaacgagtccgccggcaaggtggagcccttcgtcttcaagagaagggagaacggccctgacgacgtgacgatcaaggtgcagtactgcggcatgtgccacacggacctgcacttcatcaacaacgactggggcatcaccacgtacccgctggtcccggggcacgagatcacgggcgtggtcaccaaggccgggcgcaacgtgacgggcttccgcgtcggcgaccgcgtcggcgtgggctgcatcgccgcctcctgcctggactgcgaccgctgccgccgctccgaggagaactactgcgaccgtgtggcgctcacctacaacggcgtcttctgggacggcagcgtcacgtacggcggctactcgcgcgcgctggtggcggacaagcgcttcgtggtgcgcgtccccgacgcgctgccgctggacgccgccgcgccgctgctgtgcgcgggcgtcacggtgtacagccccatgaagcaccacggcatgctggggcaccccggcgccagcctcggcgtcgtcgggctcggcggcctcggccacgtcgccgtcaagctcgccaaggcgttcggcctccgcgtcaccgtcgtcagcacgtcgccggccaaggaggccgaggccagggcccggctcggcgccgaccgcttcgtcgtcagcaccgacgacgcgcagatgcgggacgcggccaggtccctcgactacgtcatcgacaccgtctccgccaagcactcgctcggacccatcctggacctgctcaaggtcagcggcaagctcgtgctcgtcgccgcgccggaccagcccgtcgagctcccctccttcccgctcatctttgggaagaggaccgtcagcgggagcatgacgggagggatcagggagacgcaggagatgctcgacctctgcgcccgccacaacatcacctgcgacatcgagctcgtctccacggacgggatcaacgccgcgctcgcgcgcctcgcgcgcaacgacgtccgataccgcttcgtcatcgacatcgccggcgactccacctcaaaactatagttcattcaattcgttgcattaccattatgggcaccaaacctattatcatctatcaatatcgtcaccagtggcaggcatggcctctggttgcttgcattttgctctctatcc

SEQ ID NO: 14402 - DNA, 1153 bp, Zea mays
  Clone ID: LIB189-015-F1_FLI
ccagttaccactcaccagtcaccagtctccactctggagtctggaactcccctcatcctccacatctccaccgcatcggaactaggaaggcgaagccgaaggcgcggcgcggcgcggcacggatcgagcgatggcggtggcccctcctacggcggcggcgctggagcagctaagcagcagcaagatgttcgacggcttcaatctccgcttccgccaccagagcgccacccttggctgcgccatgactttctccatctacctgcccccgtccccggcgtccaaccttcccgtgctgtactggctctcgggtctcacctgcaccgacgagaatttcatcataaagtccggcgcccagcgcgccgccgctgcccacggcatcgccctcgtggcacctgacacctccccacgtgggttaaatattgaaggagagtcagacagctatgattttggtgtgggtgccgggttttatttgaatgccacaaatgaaaagtggaaaaactggcgcatgtatgactacattgtgaaggaacttccaaaagttttaagtgataactttgaacaactcaacacgtcacaggcatcaatttttgggcactcaatgggagggcatggcgcgctgacaatttacttgaaaaacactgataaatacaagtcggtgtcagcatttgctccaattgccaatccgataaactgcccttggggtcagaaagcattctcaaattacctgggctcaactaaatcagattgggaggaatatgacgcaacctgcctgattaaaaagaacagcaaagttcccactactatcctaattgaccagggggaggccgacaagttcctggctgagcagcagttgctacctcacaagttcgaggaggcgtgcaaggccgcaggggctgctctgaccttgcgcatgcagcctggatatgaccactcgtactatttcatcgctacgttcgtggacgatcacattgcgcaccatgctcagtttctcaagagcgcctgactgtaaatgtgtagcgtgaggaagacaaggaggcagcctagcatgggtgttttatctatgccgacagtgttgtctcgtgtggcagcttgaggagaggtgaacagcacaccccacatgcgaaataagatggaagatttgctgttcctgtcc

SEQ ID NO: 14403 - DNA, 1405 bp, Zea mays
  Clone ID: LIB189-016-B5_FLI
gggtggatgcagaaacaacggtggtatgttgctgacaacggcatctactccaagttaatatctgtgatgggaaggaaagggcagatacggatggcaatgtggctgttctctcagatgcggaacagcgggtgcaagcctgacacttctgtatataactcccttatcggcgcacatctgcattcacgagacaagagtaaggctttggccaaagctctcggctattttgagaagatgaagtgtatagagagatgccagccgactattgtgacatacaacattctgctaagggcttttgcacaggctggtgacacaaagcaggtagacatgttgttcaaggatctggatgaaagtgtagtatcgcctgacgtatatacttacaatggggtgctcgacgcatacgggaagaatggcatgatcaaagagatggaatctgtgttggtgcggatgaaaagcacgcaatgccgtccagatgtgatcacattcaacatactcatagattcatacgggagaaagcagacatttgataagatggagcaggtgttcaagagcctactgcggtcaaaggagaggcctacacacccgacgtttaattccatgataacaaattatgggagagcaaggctcagagagaaagcggagtctgtggttgagaagatggaagaattgggattcaaaccaaactatgtgacgcaggaatgcctcatcataatgtacgctcattgtgattgtgtatcaaaggcccggcaagtgtttgatgagcttgtgacctcgcaaaccaaagtgcacctttcttcgttgaactcgatgcttgaggcctactgcatgaacggcttgcacacagaagcagatcggctgctggatactgcactgcagcaatgtgttgtgcccaatggttccacctacaagctgctctacaaggcctacaccaaggcgaacgataagttactagtgcagaagttgctcaagagaatgaataaacaggggattgtcccgaacaaaaagttcttcctggacgctttggaagcatttggcacctctgacaggaaacccaggacatcgccaggcataaactctgcaagcaagccaagtacagattctgctggtgattcagaaacagctacttctgacaaaccagaggtaagcgtttggcatgtagctgctacataaggctggtgatttgagcaagctcgtcgaattacctgacatcaggaagaacacatttgatctgcaccagaaaccgttaatacagtgtacttggagctacaggagttcctctactcccaacaggacgctcctttcccaacggaagaatgctaaaacctttcgtgtttcggcaaaatctgcttgtacatgtactctgtaatcaaacgtaggtattttgtttctagtcattattgggcatcac

SEQ ID NO: 14404 - DNA, 1130 bp, Zea mays
  Clone ID: LIB189-016-D8_FLI
gtgagtttgcctctatcccgcccacctcaccgtcgttgtctccgccaccgccactgctcccaccactgccatgcattaacctcaacccttccgcaaactattcactgtcactttgtcatcggcgctccatcgttcactcaaatgtggtctccgatacctggcaccctcatgaggactagttcactccctgctgtcattgaggcttctggcaatgatgactggaagaaacgaaaggaagcacagagcctgaagaggctcgaggttaagaagaagaggattgagaggaggaactctctcgcctgcaacacttcaaaagaagctgctgggcagagtccaaaagagatgaatgcaaacactgacaaattagtaagttctgatgaaactattgtcagcgctaacgaaagtcatagcagtggcaagcatctggtgaaggggcttccaccaaagtaccaggccacaattacatcagaagacagttcgtcagcaatgcgaaagaagccaaactcggccttcaaaggaacagccatcactgaggagcagaactcatcatcgtctgttccttcctccggtgaagctataagtagcgtgacggcaccaagtctgcctctgttgtctttggtccccataacagcaacccttggttccagggaagaccaaagcattttaggcagggctggtgcaagggcaaacggcatgggggacgtggaaaggaggatgatgcaggagatgccgggcgtgttcaccaagggcctgtccaacggcagcagggtcgaaggcttcctgtacaaatacagcaaaggagaagtgaggatcgtatgcatctgccatggaagcttccttactccttcggagtttgtggagcacgccggcgccggcaaggtagataacccgctgcgacacattgtcgtcagcgctaccccgaacctgtgactgtgaggccaggcagacccgtgcacaagctatagtgttctgtagactcaggacctgagcctagcgtcagagcaatgtcaccgttagactgtgtggtgcggtgcttatgcccgattaaattggtgggcattgtggtaacataacctgttgataatgttttgacaatgttttgatccttcctatgcgtgatttagttctgc

SEQ ID NO: 14405 - DNA, 1424 bp, Zea mays
  Clone ID: LIB189-016-E1_FLI
agcctctagtcggccagtcgggacgaagcctctcgaacgagcgaggccacgaggtgcccgccgcgcccagccggcctcgccgaccgggcccgccggcccctatataggcaggcgccacttcctcctcgcaaccaccagacgccagtccaccaccgcttcccgtgcagcgccctccctctacgttcccccatttcctgtgttggcggcgatggcgcggcacttcgtgctcaacaccggcgccaagatcccctccgtggggctcggcacctggcagtctgaccccggcgtcgttggcaacgctgtctacgccgccgtcaaggcgggttaccgacatatcgattgtgccagagtttacggcaacgaaaaggagattggtttggcgctgaagaagctatttgaagagggtgtagtgaagcgagaagatctgtttatcacctctaagctatggaatgatcatcatgctcctgaagatgtgcctgaggcactaaatgacagcctgaatgatttgcagcttgagtacctggatctttatcttatccattggccatttagagtcaagaagggaacaaataccagccctgaaaattttgttacacctgacttccctgctacttggggggcaatggaaaagttatatgatgctggcaaagctcgcgctattggtgtgagtaacttctcctcaaagaaattgggtgacttgcttgctgtagctcgtgtacctccagctgttgatcaggtggaatgtcatcctggttggcagcaaactaagctccatagcttttgtcagtcaactggtgttcatctaactgcttactcaccactaggttcacctggtacaacttggatgaatggtaatgtccttaaagaaccaataatcatctcaatagctgagaaactcgggaaaacttctgcacaagtggctctgcgctggaacattcagatgggtcacagtgttcttccaaagagcacgaatgaagaaaggataaagcaaaaccttgatgtttatgattggtcaattccagatgacttgcttgcaaagttctctgagattaagcaggctaggctacttagaggcaacttcattgtgaatccagagagcgtttacaagacccatgaggagctctgggatggtgaactttaggaaggacgccgttgtccgtcctgactcctgagcagggagcaagcagcgttccattagggcccgtcagatcatttcacctccaaagttgctcttttgaaatgaaggttcagtgctcggaagctctggtgccatcctgtatcacgaactattgagaaatttatcggtgattttactttgtgctacgggatgtgctgctgcagtctatcctagtgtcagttgatttttctggtaaaactgtgaccaaataagttaattcgccaggcatcattactattggaatttc

SEQ ID NO: 14406 - DNA, 1184 bp, Zea mays
  Clone ID: LIB189-016-E6_FLI
gggctcgtgattcgtgaacggcggcgacaagaagccgggagagatgccgctggccacaactgctccgacgccggcgccgccctgtcctccgccgagtccagcagcggcaccagtccggacgcagctcctctcctccgtcgcgaagctcgcgctcacggccgcgctcgtgtgcggctctggcggtcccgctgccgtcgtcgtcgttccggccgccgctcaggccgtcccgttcgtccgtcctcctcctcctcccctgcaaggaaggcccttcgcctcctccactccttacgcgcagtcccagaagctgcagcttggcctcgacaagctcggaaagatcaggccatgcccgtccaccaacccggggtgcgtgtccaccaacccgctgggatcctccggctccttcgcctcgccactgctcatcccggaatcatccgcaggggagaagaccgtcgcctcgctgcggcaagccatcgagaagacgcagcgtaatgtggagtttaaggtcgacgaagacactccatatggacactacatcgaggcggagatggacggcggcgtcggccgggacgtgatggagttcctggtgaagaaagacgccggcgtggtggcgtaccggtgcatggccaccaaggtcaccttcgtctaccccttcaccaccgctgtcggcgactccaagggccagaagcagaggatcgcggccatctcgcaggagctcggatggtacgccccggacatccagtcctccatggactccgtcgacgacgtcaattacgttccgtgaagaattaagaccgtattacgaatcgtcacttcatcgatacgatcgggagcagagctaggggcggatctggttgattttgatgccgatggttcttacgatatgaggcgtgtccgtcttcagctctttataaaagggattcagcttttagctcctcacgtggagcgacttttacagtgaaaggtggtagagctgttctgtaaaatgtttgataaagataggtctacgagaagtcagttctttcggctctgactaagagcatctccaacaacaaaccctaaaatagagtcctaaaatttaaaataggaccatatttagaatgtttagggtctcaaaagaaatgtttactccaatagtcaggccttaaataatgctatttaagaaataaatcatgatattaggaaat

SEQ ID NO: 14407 - DNA, 483 bp, Zea mays
  Clone ID: LIB189-016-H8_FLI
gggaagtcgccggctcagatccagccgggctgcggcgctggccggatggccgagcagggcggcgcagccggggaggccgctggcagcgacccccctgcgcctgcgcctgcgactgccccggcgccagccccagcgcttgctgcggacgcggccgggcagaggtccctgccgacgccgttcctgaccaagacgtaccagctggtggacgacccggcggtggacgacgtgatctcgtggaacgaggacggctcgacgttcgtggtgtggcggccggcggagtttgcgcgcgacctcctccccaagtatttcaagcacaataacttctccagctttgtgcggcagctcaacacctacggatttaggaagatggtgcccgaccggtgggagttcgccaacgacttcttccgccgtggggagaagcgcctgctttgcgacatacaccgacggaaggtagcaccggctccggcggcggggctggccact

SEQ ID NO: 14408 - DNA, 2681 bp, Zea mays
  Clone ID: LIB189-017-A10_FLI
cgcctccgcttggtctcgctctcgctgcattcgtcttccccgcccgtccgtccgcccgctgatctcagatccagaccaaacgaactccacactaccctctgcccagctcgcgcacgcatgaaaccctagtgaccccgtccagatctcggcgtccggatcactgcgcggcgccgccatggcgccccccgcgctggactctctcccggcgccgctccggtcgctgcggctcaagacgaagcagcaggagctcctgctccgcgtctcggcgctggcgctcatctacgtgctcgccttcgccgtccgcctcttctccgtcctccgctacgagtccatgatccacgagttcgacccttacttcaactaccgcaccacgctcttcctcaccgagaacggcttcagcgagttctggaactggttcgacttcgagagctggtacccgctcgggcgcgttgtcggggggacgctctacccgggtctgatggtgaccgccgcgctgctccaccgcctcctccgcgcgctctacctcaccgtccacatccgtgaggtctgcgtcctcaccgcgcccttcttcgctgccaacaccacgctcgtcgcctacgccttcggccgcgagatatgggactccggggcggggctcgtcgccgctgcgctgatcgccatcgtccctggctacatctcccgctccgtcgcggggtcctacgacaacgagggcgtcgccatcttcgcgctgctgctcaccttctacctcttcgtgcgcgccgttaacactgggtcgctcgcctgggcgctcgcctcggcgttcggttacttctatatggtgtcggcatggggaggctacgtgttcatcatcaatctcgtcccgctttatgtgcttgtgttgcttgtcactgggaggtactcgcagaggctctacgtggcctacaattgcatgtatgtgcttgggatgttgcttgcaatgcagattcgttttgttggattccagcatgtgcagtccggagagcacatggctgctatgggagtcttcttcctgttgcaggttttcttcttcttggactgggtgaaatatctgctaaatgatgccagactattcaagtcattccttcgaattaccctcacatgtgtgattactattggcaccctggctcttggacttggtactgcatctggttacatctccccttggacaggacggttttactccctgcttgatcctacctacgcaaaggaccatataccaatcatcgcatctgtttctgagcatcagccaacagcatggtcctctttcatgtttgacttccacatcctacttttcttgttcccagctggcctttatttctgtttcaagcgcctgtcagatgccacgatatttattgttatgtatggcctcacaagtatgtactttgctggtgtgatggtccggttaattcttgtggcagcaccagccgtttgccttattagtgcgattgctgcatctgctacaataaaaaatctaaccactttgatccggacaaagagcaaaagtccacagactactggaaaaacaactggttcaaaggcaggtgcaaagggagcagttgatcaatctttaccattccaacacaatgcagctattgctcttcttctcggtgccttttacttgctcagtaggtatgcaatacactgcacttgggtgacatctgaggcctactcttctccatctatagttttggctgcaaggggtcataatggtggaagagtcatctttgatgattatcgtgaggcatactattggcttcgtcagaacacgcctcctgatgctaagattatgtcttggtgggactatggataccaaattacagctatgggtaacagaactgttattgttgataacaatacatggaataacacacacatagctacagttggacgagctatgtcatcttatgaagatgaagcatatgagatcatgcagtcacttgatgtgaactatgtgcttgttgtgtttggaggtgttactggatattcttcagatgatatcaacaagttcttatggatggtacgtattggtggaggagtttttcctgtaatcaaagagccagattaccttgttaatggggagtatcgtattgacaagggggcagcacccaaaatgctgaactgcctaatgtacaagctttgttactaccgatttggagaacttaccacagaatatggaaaacctccagggtatgatcgtgtacgaggagtggagattggcaacaaagacataaagcttgaatacttggaggaggcatttacaacttcaaactggatagtgcgcatatacaaggtgaaacccccaaagaacaggtcctgaggtagttggtattacctcaggcaagtaaattattgtcaaaaatctgagtgtccagaggagacggcagagtggttattatgggcacctgcgttggcgagacttgctgtagtggccatagcatcagttcaggtcgaaggtcctcatttggtttaggtgtggtcggtgccattcagaagaaccaattgtgacaacagcgagtactttttgattgttaagcatttcttgacctaactctggaagtttttgtaggcgcaatgacatatttgagtagagaaacttgtctttgatcaatgcgcaaggcaagacaaagtatccggcactaaacgcaaaatatgactgttgattc

SEQ ID NO: 14409 - DNA, 592 bp, Zea mays
  Clone ID: LIB189-017-D1_FLI
gaggcggggatgacgagcccaatggtggccaccccggtccagttccacacaaccggccgcctcagcttctgctccttttcctttcccagcgcatcagggaggcggcgattcgcggcggtgagggcgtccgcggagacgatggcgacggagaagctgggcatcaaggtggagcgcaacccgcccgagtcccgcctctccgagctcggcgtccgccagtggcccaagtgggggtgcgagaagagcaagttcccgtggacctactccgccaaggagacgtgctacctgctgcaggggaaggtgaaggtgtaccccgaaggccacggggaggagttcgtggagatcggcgcgggagaccttgtcgtcttccccaagggcatgagctgcacctgggacgtcgccgaggccgtcgacaagcactacaacttcgagtagccgccgccgccgactagccctgcggcgctcgatgtagacttgctgtgctcttgtactctgaaccaccgtgtaataaagctccggattagggtactacaatactgtactatctgtttcagatcccgttcggttagctgtgattaagacctgaaactattcc

SEQ ID NO: 14410 - DNA, 1542 bp, Zea mays
  Clone ID: LIB189-017-F9_FLI
ctcccttctccgtttctttcagccacctccgccgctggtggagctacgtttctgtgcgatcctcgtcctctggggccggaagccagtcaagcgttgcggatgaaccagaggctgcagaatgggccttgcaggatttctacattttgcggaaggatgttgagttggctcttgagcgtgtcaatgaagtcaggcagtctgccggtttgcaacagctcgaggaggatatcgcttcgcttgagaacaagtccagtgatagttccttatgggatgatccttccaaggcacaggggatacttgtttctctgacagaggtcaaagacaaagtgaagcttctcaacgatttcaagttacagattgaagaagcagagactattgtgaagcttacagaagaattagattctatagatactggtcttcttgaggaggcctcaaagattataaaggcattaaataaggcattagacaactttgagatgacacagcttctttctggaccatatgataaggaaggtgctgtaattaatatttctgctggcgctggtggcactgacgctcaggattgggctgacatgttactaaggatgtatgtaagatggggagagaagcagcgttataagacacgagtagttgagaaatcacctggtgaagaggccggtataaaatcagcaactgttgaactagagggaagatatgcttatggctatctctctggcgagaaagggacacacaggattgtccgtcaatcaccatttaatgctaaagggcttcggcagacaagctttgctggtgttgaggttatgcctcttctaccagaggaatccatggctgtggacatacctgaagaggacctggagataagcttcacaagagctggaggtaaaggaggccagaacgtgaacaaggtggaaacggctgttcgcatggttcatattccaactggaattgcagttcgttgctcagaggagaggagccagctggccaacaaaataaaggccctcagccggctcaaagcgaagctgctggtgatcgccctggagcagcgtgcatcagaaatcaagcagatccgtggagacattgtgaaggcagagtgggggcagcagatacgcaactacgtcttccacccctacaagctcgtcaaggatgtcaggacagggtgtgagacgtcggacatcactggcgtaatggatggagagctagatccctttatcagagcataccttaagtacaagctaactgcggcagctaccagctgattttgttggggagcatagcgatgagtgatacttacatccattgtattatgttgtagtatgagtttttcatctctctctctctcttgatttagtataatttcatagcactagcaatctagcattgtatttattgatctaggaatcgaagtggaaacatgggttttgcttcgagttctacaataagagtttgatcgaattgcatgacttgataaagacctcttgctagtccataaattgtattgaaatgaatatacgggttcttgttggtatgagatgtttgttatgttcc

SEQ ID NO: 14411 - DNA, 725 bp, Zea mays
  Clone ID: LIB189-019-F1_FLI
atcgtgaacggcagcgacgccgtcatggagccggttgttgctggcagcaacacggtagtagctgttgcccaagttgagttgcaaacaatgaacgtgcagcagcccgctgatgttgccggacccagcgagggggtggcggcgatctccaaaggggggaaggtagggccgaaccggtgcagcgcctgcaggaagagggttggacttacgggattcaactgccggtgtgggaacttgtactgcgcactccaccgctactccgacaagcacgactgcaagttcgactaccggactgctgccagggacgccattgccaaggctaatccggtggtgaaggcagacaagctcgacaagatctagggggggttccctacggttgggtatcaggaagattgtaaaccgcggtaactcgtcatgcggaactgctgccttgccccccgcgcctttctcttccatgtttgctgctacaatcttgttgttgggcattgcagtgcacggtgcacacttgtgtagcccgcctcgagaattcctgcctctgcatctggtcagttctaaaatgatttgcatgttggctatgttgtgtaagctctatttatggtggtctcgctgagacgggtatttggcttcgcagttatctagctatgtgatgtactgttgtcttgtccctgggtattatatggtacactgcagccagtaatagtaatctgcaactgtgcgttaaatggtcc

SEQ ID NO: 14412 - DNA, 1110 bp, Zea mays
  Clone ID: LIB189-019-H1_FLI
atcccagctctcatttccaatttttctgctaccaaatccaagaaacgttccaagaagaaaagcaagcacaagcaggctaagtctgctattcatgaggactctggtagacatgaaagcagttaccatctatcatcggactttgacaatgagaagagaaacataacatcaagaagcaagagaaagaaagcaaactgttctgattcatcatattctgattccgagatagatgctagaaaaggcaagagcaagtcaaagcataagcatacgaagaaataccagttagagtcttctgattcagaatttgatgtccgtgaagatacaaggcggcgtctgaagagagaccacatgaaggagaaaagagatgagtcaccattgccgttctctaaggatcaaggagacacagaaggcaagaggcattcaaggtgttcaagggagaagcacaactacagttattcatcgagttcttctgagagaggcaggcggcgttcgagggagaaacgtcactacagttattcaccaagttcttctgagagaggcaggcattctctacggcacaaggagaaacaatattacagtgactcaagttctgatcggagccatcgacactcgagaagatcgagggagaagagacatgatagagactcaagttctcctgatgccatcaggcgctcaagtagatcgacggagaaacagcgccgtcctgatacaagcccacgtcatgccaacgggcattcaaagaaatcaagtggcaagcaagactatactgagcgtagccgttacgaaaccagtagacattcaaggagatctcaggagaaacggcactaccctgattctagcgtctctgattactcggactctgatcagcacaaaaaacatcgccaccatcataggagaaaatgaactggcagtgtataaggtaaaatgccctatctgaagtagtgatatttatatatctggggaccgctctggatgtgacgcattaagggtaccttgtccctttcttgagatcaccagaatccgcctggagtcttgtgctcggtggctgatctcagggctttgtgatgttattacagtaatgtacacggtgtaacagagtttcttcatactggg

SEQ ID NO: 14413 - DNA, 1352 bp, Zea mays
  Clone ID: LIB189-020-A10_FLI
cgcgagagcttgtcggagggctctctgtctccgtgataaaccgatacgcagaggaagctgcggagaggtgtccctgctctgctggtgagctgcggccagcgggtgaagtgaagtggaccggacgtggacgaaggagagagggagagagagagagagagaagaaagggcgccgcgggggccatggctggacacgcgccggcgagggacaagaccaccaccggcttcgccgctacgtgcagcctgctgagccagtttctcaaggagaagaagggcggcctgcagggcctcggcggcctcgccatggcgccggcgccggcagctggagcaggggctttccggccgccgaccaccatgaacttgctgtccgcgctcgacgcggccaaggccaccgtcggggagccagaaggccatggccaacgcaccggcgggaatccaagggaggcagctggggaggaggcgcagcagctgaccatcttctacggcggaaaagtggtcgtcttcgacaggttcccctccgccaaggtcaaggacctgctgcagatcgtgagcccgccgggggccgacgccgtggtggacggtgccggtgccggtgccggtgccgctgtccctacgcagaacctgcctaggccttcacacgacagtctctctgccgatctgccgatcgcgaggcggaactcgctgcacaggttcctcgagaagagaaaggacaggataaccgcaaaggcgccgtaccaagtcaacagttccgtcggcgctgaggcgtccaaggcggagaaaccctggctgggtctgggccaggaacaggaaggaagcgacggtcgtcaagcaggagaggagatgtgatcgatcagtagagactagattcgttcgtgcgcgcgtcgtcgtagcttcaggttaagggaaacaataatccaaccgtcggttaattgctcgccttaattacactgctctactacgtactgctaccaccaccaccaccatagtgaccaagttaagctagggattgttacataggccggccggtcggccgttcgttcgcgagattgtttcgctgcatgcatgctcgcagcagcttcgctggtccgcgtggccgcgtcgtgtgttcgcgcaacgaatggttgctgccttagcctagccttgatcgatcgatatgttgaggaacggcgtgtagtgcggtgcacgttccggtacgttttcattgtctccgaccagtcttatgtgtgtgtgtgtttttttttgtttttgcactggatattcccctcccctctcgtggtcgtagggagggtttgtatgttcagtggaagatgtttggtacggtctacttcattctatttcatgaatatgtatgtatg

SEQ ID NO: 14414 - DNA, 1220 bp, Zea mays
  Clone ID: LIB189-020-A7_FLI
cagaggacactactcctcagaactctcccttccctcttgtaggggccaaaagggtcagagatctaggaagaagagaactagtccccaagcctaacaagaaagcaagctcttctgcaactgttggcattcgccttaatttgtatccatcccaatggcaggcctatctctggaacacccctgggcattcactttcggcctcctaggcaacgttatctccttcatgaccttcctggccccgataccgacgttctaccgcatctacaagagcaagtcgacggagggcttccagtcggttccgtacgtggtggccctgttcagcgccatgctgtggatcttctacgcactgatcaagtccaacgagacgttcctcatcaccatcaacgcggccggctgcgtgatcgagaccgtctacgtggtcatgtacttcgtctacgcgaccaagaagggcaggatgttcaccgccaaaatcatgctcctcctcaacgtcggcgccttcgggtccatcctcctcctcacccttctcctcttcaagggtgacaagcgcgtcgtcatgcttggctggatctgcgtcggcttctccgtcagcgtcttcgtcgcgccgctcagcatcatgaggcgggtgatccagacgaagagcgtggagtacatgcccttctccctctccctctcgctcaccctcagcgccgtcgtctggttcctctacggcctcctcatcaaggacaaatacgtcgcgcttccaaacatccttggcttcaccttcggcgtggtccagatggtgctgtacgtggtgtacatgaacaagacgccgctgccggttgccgacggcaaggctgccggcaagcttccctcagctgcagatgagcacgtcgtcgtcaacgtaaccaagctcagcccgggccgactcccaccagtaacacagatggcggcggttcccaccaagagctgcgctacagaagcagccgcgccggcgacgctgcccagcagggacgtggtcgacgtcttggtcaaccgccacagccccgccgtccatgtggcctagctagatctcatgcccgtgcagcatgcgcccgccatatatacggactggtcatgagcatatgatggaattataagtaattaattgccatgtaagctagctaatggatgcatggagacataggtcagaggtagagggccaagcgcgctctctctctctatctatctatatctatttttatatc

SEQ ID NO: 14415 - DNA, 581 bp, Zea mays
  Clone ID: LIB189-020-E2_FLI
gccagattgggggttccttggttcctcgtcgagttgctgcttctgagaagaggcaacggaaactgaagagtggacaaaagttgcgccggtttcaggagagctcttacatggatccaaatcaaagtctttgccttggagcactatttaacatagcagcaacaaatggcctagacatgggcagaagattatgcatctttggcttttgccgttctattgaaatgttaagcgatgtagtggaagatacggtattggagcatggcggtgaggttgtcactgcagagaaggcaagcagtaacggcctccaggagaagctaaccatgtctgtcgcagtaccattgctgtggggcattcctccagcatcagagaccctccatgtcgcggtgcggagcggtggaggtattgtcgataagatctattggcagtgggacttattctagatgtccagcgttaacaaaattggttccaagatgtatatgtctctctaattttctgcacgcgttgtgcagcaactgtaaacttagtctctacctgtacagacccggtcacccttgtgcatatatataaaagaactttgggatcac

SEQ ID NO: 14416 - DNA, 375 bp, Zea mays
  Clone ID: LIB189-021-C12_FLI
gcaaggctatggaggaagctgatgtgaagactaagtgggagaacagctcatggggcaagaagctgattgtccagaagaggagggctgcactcagtgactttgacaggttcaaggtcatgctggcaaggatcaagaggggtggtgctatcaggcaagagctctccaagctgaagaaggcgtccactgcttaagtcccttttggtggatgacatgttagtttttggtttcatgttggatcagcaatttgttttgagtgttgtcaaagccagaattagtaatatgtttcctgtgtaccagtttcaaacttcatcaagaatgggtgtgctctggatattttgtcgggaatgatatggaacacttaagttagcttgcgac

SEQ ID NO: 14417 - DNA, 835 bp, Zea mays
  Clone ID: LIB189-021-E11_FLI
cccggcagcagtgcccgtcccggaggcccccgccccgatcaccgtcgtcgtcccgccgctgccgccagtcgaggtcggccgcgagccggccacgtcatccaccgccgcgtcctccgacggggcggcctcgagcagagtccaccggtgctccatctgccacaaggagttcccgaccggccaggcgctcggcgggcacaagaggaagcactatgacgggggcgtcggcagcgccgccgcgtccaccgacgtcccggcggcgcccgccgagacgtccgccgaggtcgggagctccgccgcgcgtgcgttcgacctcaacctcccggccgtgccggagttcgtgttccggtgcggcaagcccggcaagatgtgggaggaggacgaggaggtgcagagccccctcgccttcaagaagccccgcctcctcatgaccgcgtgaaaccgctgcgcgcgcgggcggcggatctcatctcatcacccgtccaagattttggtctgcagctgccgagttcagcggtggaagtggaacacactattcgttcattcatttcgtatggtgccagtagcgctattgtttgatttttgtggctgctcctcttgtacagtaccgagtgcgagaaaagatgcatagtcatcgtatacataccaatacaataccgtacctataggtcttcctattcctgtggaagagtagaacttgtatccttattagctgtcagttcatacacacttggttctcattaccagagatcattggtgaattagtggttttgtatcataagcttattgtaaatgatggattggagattagtatggaatcagataccccatttgttcc

SEQ ID NO: 14418 - DNA, 650 bp, Zea mays
  Clone ID: LIB189-021-E7_FLI
aaacttcttcgtaatactaaaaagttttattcaggtcacgagcttattgtcgtaattcgtacaggagctgagtgcgtgcacgtacgatagccaagtacgatgaccctgcacaaccagtcaaccacagcaatccacacaagcacttcgacgtcacacgggcgctgcgcacagacacaccaagcgtcggcaccaatggcttactaccaggaggtggactactgctcggaggaggtgaggtcggtggccccggccggcttcggccgccacggcggcggcgtccagcagcacgtcgtcaaggagaagttcgaggaggtcgacacggtctcacgcgccggcgccaaccaccaccaccaccatggtcaccacggcggccacggcttcgtggtgcgcgagaccagggtcgaagaggacatcaacacctgcaccggcgaggtccacgagcgcagggagagcttcctcgccagggctaactgagccgcccggcggccggcatccacgcccgttcgtgcttgcctgcgtgccttatgtatgtctgtggttgactggttgtgcagggtcatcgtacttggctatcgtacgtgcacgcactcagctcctgtacgaattacgacaataagctcgtgacctgaataaaacttcttcgtaatact

SEQ ID NO: 14419 - DNA, 1413 bp, Zea mays
  Clone ID: LIB189-021-F2_FLI
ggcgcccagcaggccattcttctcgccttactccctcacagaacccagtaaaatattgctagtcccgccgtcgagatggccccacgccgcctgctcgtcctcgccgtcgtcgccctcgcggccaccgccgccgcggccaactccggcttcgcggactccaacccgatccgccccgtcaccgaccgcgcggcctccgcgctcgagtccacggtcttcgccgcgctcggccgcacccgcgacgcgctccgcttcgcacgctttgctgtgaggtacggcaagagctacgagagcgcggcggaggtccacaagcggtttaggatcttctccgagagtctccagctcgtccgctccaccaatcggaaaggcctctcctaccgcctcggcatcaaccgcttcgcggacatgagctgggaggagttccgtgcgacccggctcggcgcagcccagaactgctccgccacgcttaccggcaaccaccggatgcacgccgccgccgttgcgctgccggagacgaaagactggagggaggatgggattgtgagcccagtgaaaaaccagggccactgtggatcatgctggaccttcagcactactggcgcacttgaggctgcatatacccaggcaactggcaagcccatctctctctctgagcaacagcttgttgactgtggttttgcattcaacaatttcggatgcaacggaggccttccatcccaggcctttgaatacatcaaatacaatggtggccttgacactgaggaatcttacccttaccaaggtgtcaatggaatctgcaagtttaagaatgagaatgttggagtcaaggttttggactcggttaacatcaccctgggtgctgaggatgaactgaaggatgctgttggtctggttcgcccagttagtgttgccttcgaggtgatcactggtttcaggctgtacaagagcggagtttacactagcgaccattgtggaactacaccgatggatgtgaaccacgctgttctggctgttggctacggtgtcgaagatggtgtcccctactggctcatcaagaactcatggggcgctgactggggtgatgatggttacttcaagatggaaatgggcaagaacatgtgcggtgttgctacgtgtgcatcctaccctattgtcgcatgaggcccttacgaaatgttacatggtctgtttggcatcaataatgcatgtttaacctgagcttggcgatgggttatacagaacggaaactctgtttgtgaatagaaaatcatgaagggaaggagttgaccggacccctacttgtacgtctccccggctgtgtaggtagattgtcagttggggttccgaagtactctactcatacgtgtgtatgacagtttatttatgaaacaaaatacgcattgatcgttatggtgc

SEQ ID NO: 14420 - DNA, 598 bp, Zea mays
  Clone ID: LIB189-021-F4_FLI
gtggcgctttctccggcaaggacccaaccaaggttgaccgcagcggagcctatgtcgcgaggcaggctgccaagagcatcgtcgccagcggccttgctcgccgcgccatcgtccaggtgtcctacgccatcggcgtgcccgagcctctctccgtgtttgtcgacacgtacggcaccggcgcgatccccgacaaggagatcctcaagattgtcaaggagaacttcgatttcaggcctggcatgatcatcatcaaccttgacctcaagaaaggcggcaacgggcgctacctcaagacggcagcctacggccacttcggaagggacgaccctgacttcacctgggaggtggtgaagccactcaagtcggagaaaccttctgcctaaggcggcctttttttcagtaagaagcttttggtggtctgctgtgcttaatcatgcttttatatggcttctacatgttgtggttctttcttgatctgcaccgcgcttatcgtttgtgttgtactgccctaataagtggtgcttatgaggactgtttctggttttgctgcttatgttgtaatgctttgaaacaatgaaagaagctacaggccacagct

SEQ ID NO: 14421 - DNA, 1939 bp, Zea mays
  Clone ID: LIB189-021-G10_FLI
atccttgcaagccctagtataattcaaggtcttgagttcccgggcctggacctgccagattctgctggtgaagttgtagtttgtggagttcttgttctacaaggacagcgtgtgctaaatatgattgcacgatttatccaggcgaaaaggcagagaggtgatcatggagtcaaagcacaaggggatggctggttgctgactgttgctctgatggagggaaccaacttggcagcaaccaaatcatctggttactctgatccatatgttgtatttacatgcaatgggaagacaaagacaagttcgattaactttcacacccttgaccctcagtggaatgaaatttttgaatttgacgccatggaagatcctccatcagtgatgaaaatacatgtgtatgatttcgatggaccctttgacgaagttgcatcccttggtcatgctgaagtgaatttcttgaaatataataatatatccgagcttgctgacatttggattcctttgaaaggaaagctggctcaagcatgccagtcaaaattgcatctaagaatcttcttaaacaatacaaggggtactgaagtcgtgaaggattacctggataaagtggagaaagaagttggcaaaaagattgctatgaggtctcctcacacaaacttagcattccagaaaatcttttctttgccaccagaagaatttcttatcaatgattttacttgtcacttaaagaggaaaatgctaacacagggtcgtatttttctatctccaagaatatttgggttttacacaaatctttttggccacaaaacaaaattcttctttctttgggaagatattgaagacatcctactggtccctgcaaccctatcttccatgggaagtccgtctctggttattattcttcgaaaggacagaggaatggatgcaaagcatggggcaaagcaactggacagtcaagggagactaaagttccatttccagtcttttgtttcattcaatgtggcacataaaacaattacagcactgtggaaggcaaggtccttaacccctgaacaaaaggtacagcttgtagaagaggaatcagaaacagaagacttccaaaatgaggagggagaatctttgttagggatagaggatgccaaaatgtcaggagttttttcatgtacaaaaccttttgatgtatcaacactaatgggcatatttgagggtggtcctttggagtgccgggtgatggagaaagttggctgtatggactactctgttacagcatgggaacctgtcagagctgatatttaccagaggcaagttcattataagtttgacaagaaatcagcacggcacggaggagaagcaatgagcacccagcaaaagtcccctttgcctaataagaatggctggcttgttgaagaagtgatgacacttgaaggtatccctgttggcgaatgtttcaatctccatatccgataccaactggagagcaatgcatccaagcagaagacatgcacaatccaggtatttattggcatagtatggctaaagagctgcaagaaccgaaagaagatcacgcaggatgtagcaaccagtgcatcttctcgcctgaagaagatattcaaccaacttgagaaggaatctataccagcaaagtaggaaccttgtttttgtctgcgtcctacttttgctgctgcacatatgctggcactatgtttgtccttgctggctgctgcccatgctgagcaaagatcagtgacctaatgaggaagttgcagcacaagccaaagccctcaggcagagttttataaaacaacacgaagcaaggaccgcattgcaagatctcagattagagaactaactgtagagcctggaacgtggtttagcttaaccatgtatacataacgttcaaatatcgttctgacttctacaaaaagttaagaggatctgaaattct

SEQ ID NO: 14422 - DNA, 308 bp, Zea mays
  Clone ID: LIB189-021-G8_FLI
gcattgtgaagcccgggtgctcgcaggatgtccttaaagcagcggtaagcgccatggcttctgtgacggagatgttgaccatcatgtcttccctttcatttagtggacaggcgaccatctgaaggccaagctgaagatgtcatatgctgttgcgctgtcatgtcccgaacatatttgtgtttttttgggaaagaaacatacaattttttgttctcattctagtatcgtctacctatgtcaaactacaatatgataggacccttgctaaataattgtttcgtttgctggtatttctcatctttgatgct

SEQ ID NO: 14423 - DNA, 676 bp, Zea mays
  Clone ID: LIB189-021-H11_FLI
ccaacaactaaaggcaggcgcggcacaccgcgacaccgtaccggcctagacacttggagaaaggagaagcagcgcagcggcatgggcaccagtcccgtcatccctgcgacgatgctcgtcgtcgctctccttgtcgctagtagtactgtctgcttcggcgccaccgccaccgacaccgacaccgacggcgccattcgtctccccagcagctctggtgctgttggtcgaccgtgggagtgctgtgactatgtcaccaaggagccgtttatcaggccgccccggtggcgctgcaacgacgtggtggacaagtgctccgccgactgccaagagtgcgaggagtcgccggccggcgacggcttcgtctgccgtgactggatcttcagcctgctcgagcccccggtctgcacacccaggccgtgggactgctgcgacttcgccgtctgcacaagggactacatcccctactgccagtgcggcgacgtggtggagtcgtgccccagcaactgcaaagcgtgcaagcttgtggagtcggaccctcctcgctaccgatgcctagacgtcttccacggctatcctggtcccaagtgcacgccatggatcagttagagcaattagctcagctcagctacttgctaaataaataaataaaagtagcgcagctcagctacttgctagt

SEQ ID NO: 14424 - DNA, 2726 bp, Zea mays
  Clone ID: LIB189-022-B3_FLI
taaagaaatggaaagacgtggcaaatgattcacgcaaacaattgcatgacaaagaaaaggaggttctagacctgcggcaagaagttattgggttaaaacattctctaaaagaggctaacgaccagtgcatacttctgttcaatgaagttcaaaaagcctggagagtttcatcttcactccaagctgatctcaagtctgaaaatttaatgcttgccgagaagcacaagactgagaaagagcagaataaccagctaagggatcagatttctcatcttttgaaagttgaacaagagcaaaacctaaagatgcaggaacgggatttaacaattcagtcactacagactaaactcaagtccattgagtctcagcttaatgaagccctcaatgctagcgatgctagatcaactattgggtctgaatctgcttcagtaatttcttccccaaagataacagaatcaactgctgactcatcttcagtgacgaaaaggcttgaggaggaattggcaaaaagggatgcccttattgagaaattacatgaagagaatgagaagctttttgacagacttacagagaagtcaggattaggaagtgctccacaggcttcaagcccttcagcaaacaagccagctaatggtcaaggaagggagataggcaggagtgacagcagcaaaagtcgatcaccagatgtgtttgcatcaccagtgtctcaggataaaactggaaacagtggagctattgtaaaatcaagcaatgagctagcaaaaactacacctgctggggagtaccttacgtctgcactaatggattttgatcctgaccagtttgagggatttgcagcaatagctgatggtgctaataagcttttgatgctggtcttggctgcagttatcaaagctggtgcagctagggagcatgagatacttgccgagatccgtgatgctgtgttttcattcattcgaaagatggaaccgaaaaaagttatggatactatgttagtttcaagagtcaagatattatacatcagatctttgcttgctaaatcacctgaactacagtccatcaaggtctctccagttgagcgtttcttggagaaatcaaatactggtcgaagtagaagttctagtaggggaagtagtcctggcagatctcctgttcaccaccatggtcatggttcccgaactgcgcttgttgatgaacatgtgcatggtttcaaggtgaacattaaacaggaaaagaaatcaaaattctcctcaattgttctgaagcttcgtggtatcgaggaggagacatggagacagcatgttactggagggaagctccgggaaattactgaggaagctaaggccttttcaattggaaacaaggctttagctgctctctttgttcacacgccagctggtgaattacagcgccaaattcgtgcatggcttgctgaaaactttgagtttctatctgtaactggtgcggatgctgctggaggagccgcaggacagcttgaactgctgtcaaccgctattatggatggctggatggctggtcttggtacagcgcagccccctaccactgatgctttaggccagcttttatcagaatacacaaagcgtgtttacacatctcaactacaacacttgaaggacatagctggcacattggcaacggaggaggctgatgatcctgcacatgtcagtaaactccgctctgctctggagtctgtggatcacaaaaggagaaagatcatgcaacaaatgcgaactgacactgccttgttaacaaaagaagaaggtggctcaccaattcgcaatcctcttactgctgcggaggatgcacgattagcatctctcatatctctagataacatcttgaagcaagtcaaggaagtaattagacaaagctctacaggacctatgagaaaatcaaagaggaaagctttgctagagttattggatgacctcttgacacagatgccctctcttcttgatatagatcatccatgtgctcagaagcagatcatggaggcacggaaagttgtcgagtcactgcaagaagaccctgatgatcctgccccacagtctaatgcattgggagagggcgaggtttcacagtggaatgtactgcagttcaacacgggaacgactgcgcctttcatcataaagtgcggagcaaattccagtggtgaactggtgattaaggctgatctgcgagtccaggagcctaaaggtggcgaggtgatccgtgttgttccaagaccaacagttcttgcggacttgagttttgaggaaataaaaggtgtgtttgagcaattgccagaggcagttagcttgcttgccttggcacgaacagcagatggtacaagggccaggtattcaagattgtacagaaccttagccagcaaagtgacggccttgaaagagactgttgcagagatggagagaggtggtgttttcaaagatgtacgataaatgctgtgttattgtagagttatttatgatattgatgttgtatatggatgccatttgtcggcatcccttgtaactgtatttgtttttactatgtggaaacctatgttgtaacactattctttggcaagagatgagccttgcctgccccaacccgtaatactatggttgtgcaaggcattaatgtaaattgtagctgcagctgataaatgtctgcagtgctgcaagtctgaactttccaggttatggaactattcaatgtttatttgt

SEQ ID NO: 14425 - DNA, 721 bp, Zea mays
  Clone ID: LIB189-022-B5_FLI
ggcaatatgccatttgttccagcaatgaactctactgcttctgttgatgatcttatcatgaatctgcactctgaccagggaagtaactcctttggctgctcagacttgggctgggagaatgataccaagacaccagacatcacttccattgctcccatttccactattgcggaaggcgacgagtctgcatttgtcgacagcaattcaaacagctcatttgtgcttcctgccctggagaacagtgctgttgatctcactgatgggctgacagatttagaatcctatatgaggtttcttctggatggtggtccaagtgattcagttgatagccttctgaaccttgatggatcgcaggatgttggtagcgacatggacctctggagcttcgacgacatgcccatcgtcggcgatttcttttgaggattttgaagcttggtcataggagtatgtacatagggactaggggaataaagaccgggggagattgggaagcacctgcttggcaccttgggggtagcatttgctcgtgtctagctcagagatgcagaagttgcattctgaaactacttggttatcgacctgttccctattttagctatctctttatgagagccatttatgagactgaaccattttgttttgctttcttttcgttgttacaatatatggtttaacattatgatttatggatatgtgccaaatatggtgctcaacagtggtc

SEQ ID NO: 14426 - DNA, 1809 bp, Zea mays
  Clone ID: LIB189-022-C9_FLI
tgagctccttgctgcggctgcttgctcccctcatctctagcctgtacactggttggagtggttgccagtgttctccccacctgctcctctcgatccactccatcccctttggccatgggtgtgcaagcatacatctacggtaattgcatgcttctcctgccttgaagcggaagccttagccttagcctgccgcctgggggaaaccttctgtttcgccgctgccgctgctgtggtataaaggtggaaggctgatccgtcgacggacggagtcccggcggagggaagattgctccgtcgccgcggtttcgcggccaagaaggtggcctacgcggtggaaaggggcggggcggggccgtgaaggaatcttgctccgacgccaatccctcctctgcccctcgattttcgggcggttgtcggtgctgcctttcgcagtaagaggtgggatctcgcgtccggcggcggcggcggcggcgttgctggatcgagcaacctccggcggtggcctgcgtacctgcgtggccgatctgtgcgtggctgttcatctcttcgccggcattgcgaggcgggctcgccgggcggtgtggattgcttgcggtgaggagtgcggaggagaggtgctgatccaagcggcgggcgggcgggcggctgcacgccaggtgttcgacgaaggaccccgaccgggccagccagccatgagggacttcccttcctgcttcggcgagagcggcgtccagatcgcggacgcgtcgtcgtcgtcgtccagcgccggcaagggcgcggcgcagaacctggtgacctgcctctaccagacgcagttctcgggccggccctgcgtgatctcgctcacgtggagcaggagcctcatggggcagggcctcagcgtcggcgtcgacgacctgtccggccactgcctctgcaaggcggacatcaagccgtggctcttctccaagaagaaggggtccaagagcctcgacgtcgaggacggcaagatcgacatcttctgggacctgtcgggcgccaagttcggcgctgggccagagccggtggaggggttctatgtcgcagtggtgttcgaccttgagctcgtgctcttgctcggcgacatgaagaaggatgcctacaggaagactggagccaaccggtcgatgctgaacgccgcgtttgtggcgaggagggagcacatatacggcaagaagacctactccgccaaggcgcagttctgcgacaatggccagttccatgacattgtcatagactgcgacaccgtcgacctgaaggatccgtgtcttgaaataagagttgacaagaagcccgtgatgcaggtgaagcgcctggcgtggaagttcaggggaaaccagacgattctcgtcgacggcttgcctgtggaggtgttctgggacgttcacagctggctctttggatcaacggcgagcaacgcggtgttcatgtttcagacatgccaggcgcctgagaagtcgctgccatggtcgtactcgcagatttttagggagtcccagttgcaaggtcttggtttctcgctgatcctgcatgcgtggaagcttgaatagggctcttttttttttttttgcaggatcacaatttgcttctgcacctgcccccttttctttagtgctagcagaaaacgttttgttgagtctgagtgcctgttcatcagaatgctatggaggctctccaatatatgttctttcgtttcattttgtttttgctttgccatctcttataaacactttgtttggatagctggcaagttatgtgatgtcccagtggctttgccactctgttccttct

SEQ ID NO: 14427 - DNA, 924 bp, Zea mays
  Clone ID: LIB189-022-E2_FLI
tacatggccatatcgataatatcgataaaagaacaaacttactcctggcgcggggggagaatgtctacatggccaagctggctgagcaggccgaaagaaggaggagtcccgtaagaacgaagagcatgtgaaccttatcaaggaataccgtgcgaagatcgaggctgaactgagcaatatctgtgatggcatcctgaagctgcttgactcccacctagtgccttcttttactgctgctgaatcaaaggtcttctacctcaagatgaagggtgactatcacaggtatcttgcggaatttaagactggtcctgagaggaaggaatctgctgagagcacgatgatggcctacaaggctgctcaggacattgcgctggctgagctggcacctacccatccgataaggcttgggcttgctcttaacttctcagtgttctattatgagattctgaactccccagacaaagcttgcaaccttgcaaagcaggcgtttgatgaagctatctcccagttagacacccttggggaggagtcatacaaagatagcactctgatcatgcagctccttagggacaacttgaccctttggacctctgacctcacggaggatggtgctgatgagggcaaagaagccccgaaaggtgaggctggtgacggacagtaatcttgggagagcgcatattgttcgagcccattgttttagatgctctatgctgtcgaagctgaagctgtgccgtgctattattgtagctgatttcctgttccctcacttctttttttatattagtaggctggtagtgttcgaattagttccccattgctttgtgttgccgctagttggcattaagtccgtgtggactggtattattcactggatttgagaagcatgtcagtggttgctctagcgttttattgagttttgaagtc

SEQ ID NO: 14428 - DNA, 1511 bp, Zea mays
  Clone ID: LIB189-022-E4_FLI
agcaaaaacacaaagcgcttaaaccacactcaaaccaaccgccagccaacaaacaggcctcctagtcccgaccagaactcgctcgtagccccgagaacccgacagcgcgagatggctcccgagctgatgacagccaagatgaccgccaaggccgccgcggcggcggcggcggcggcggcggcgaagcctgccacgagggcgtacgtgacgttcctggcgggcgacggcgactactggaagggcgtggtggggctggccaagggcctccgcaaggtccgctcggcctaccccctggtggtggccgtgctgcccgacgtgcccgagtcccaccgccgcatcctcgtctcgcagggctgcgtcgtccgcgagatcgagcccgtgtacccgcctgagaaccagacgcagttcgccatggcgtactacgtcatcaactactccaagctccgcatctgggagttcgtggagtacgagaggatggtgtacctggacgcggacatccaggtgttcgagaacatcgacggcctgttcgagctcgagaaggggtacttctacgcggtgatggactgcttctgcgagaagacgtggagccacaccccgcagtacaggatcggctactgccagcagtgcccggacaaggtggcgtggccagcggcgaccgccgagctgggccctccgccgtcgctctacttcaacgccggcatgttcgtgcacgagcccagcgtggccaccgccaaggcgctcctcgacaccctccgcgtgactccgcccacccccttcgcagagcaggacttcctgaacatgttcttcagggatcagtacaggccgatccccaacgtgtacaacctcgtgctggccatgctctggaggcaccccgagaacgtgcagctggagaaggtgaaggtcgtgcactactgcgcggcggggtccaagccgtggaggttcacgggcaaggaggcgaacatggacagggaggacatcaacgccctggtgaagaagtggtgggacatctacaacgacgagacgctggacttgaagggcctgccctcgctctcgcccgacgacgacgacgaggtggaggcggtggccaagaagccgcttcgcgcggccctggcggaggccggcacggtcaagtacgtcacggcgccctcggccgcgtgatcccgtgctctggccttcccccaccgcgcaccgtaccggtggccgcgcgctatagcttgtgtgtgtggccatcgcggaacataagaagaatctctcactataaaggccttcgttctgtgtttgcattttggttttggattagggtgtctaatttttcaccagttcctttcccccttgtgtaagtgtggagcttactgtatagcgcccatttcaaggtgctgcaagcgttggtcaggaattgggctagagtgtttgtcctgtaccgagggattatgtgtatttttgctatttcgctcggtaaattaatacaataataaaaaaatagggagccgcaaaattatggccatattttt

SEQ ID NO: 14429 - DNA, 808 bp, Zea mays
  Clone ID: LIB189-022-H10_FLI
gcctagctctatagctcgagtattgcttgctctccacaagaaacaaggcagagcaccaacaatggccgccgcctcctcgtcctcggtcctcctgctgctcctggccgccgccttggctggcatgagcgccaacgccgccaccttcaccatcaccaacaactgcgggttcaccgtgtggcccgcggccaccccggtgggcgggggcacgcagctgaacccgggcgggacgtggaccgtcaacgtgccggccggcaccagctccggccgcgtgtggggccgcaccggctgctccttcaacggcaacagcgggagctgccagacgggcgactgcggcggcgcgctggcctgcacgctgtctgggcagccgccgctgacgctggccgagttcaccatcggcggcagccaggacttctacgacatctcggtcatcgacggctacaacctcgccatggccttctcctgcagcaccggcgtgcggctggtgtgcacggaccctggatgccccgacgcgtaccacaacccccccgacatgaagacccatgcctgtggcggcaacagcaactaccaagtcaccttctgcccgtgatcggccggaataggctctgcatgcatgggctagtgatttggattttgcaggaataattctgatttggatttgcacaataatatatatataagcgtgcattacacgtgcacgcatttgtatgtacgcgcgtatacgtcgtacctacgtagctggatttgtgtgcatgcttcttcgtaccaaatattaataagaataaacaaatatgactcgtgtcatacatat

SEQ ID NO: 14430 - DNA, 1207 bp, Zea mays
  Clone ID: LIB189-023-A11_FLI
ggaaaaatcgccccatcccctgactatcactggctcactgcccttccacctacaggttccaggttaagtttaagattgataaagattgccgtcctctcccatgagagtagtctcaagcaagccatcaaggaaaaattacaatgcaaagagcaaatttgatccagagctcaccacaaaacaagtccaaaggttacttttgctgtttaagcctgttagtgcacctcaatctgtttcaaataatcaccttggagaaaggcgccactatgaaaaacgaaggaagccacgccattttgaagaaaggcggcctattgaagcagcgcgtcggccacgatttgatgaggaaaggcgccctgcggttagacatgttccttttgaggatccatacagggcaccacgctatgctccagttcctgttgactctcagcatggccattctttggctagtgatcaccacagatattatcaaccagcacttacacctgagcctcggcagcttcctcttgttctagagcctcgatatgttccgccggccctagatcatcatcatgtgccagagcttcgacatgccccacctgcatattatcgcactttggctccatctggtgattcatactatcggtctgttgagaatctggtgcctgagcgatatgcagacagaaccatggctgacttgaccactagagatccaattattagggatcacacagcactaccaggggaggcacttgctcgagcagaccgcttggatgatctctaccgttctgatcgtgtggaggaactctaccgttctgatcgacttgttaaccgtgctgtggaccgccctcatccagcctattttacagctgcttatgagaccaaccctgcttatgctgaaacgagcattaggcctgtctctgcaagggtcaatggacccagtgcggcagtttcgtcactctattccttcagtggtggcccagtatatcggtaatgaatgatcatggctctgttgaaagccttagccagactaagaagacagggtattcgtctctttaactgcaactgttgtttgccttagcttctattcggtattttcttaaatatccttccctggatgaatgacattcgttatcaagacttgatggtctaaactgtcgaaattatgtactgtacttggcgtgctttgaagctcacttcgttctgtgaatggatcgatgcacgtattggtagc

SEQ ID NO: 14431 - DNA, 1149 bp, Zea mays
  Clone ID: LIB189-023-A2_FLI
cgaggtacaagaagtggatggcgcagtatcgccggaagtacaaggacgacgccgagaaagcacaccgtttccaggtattcaaggcgaacgcggagtttattgacaggtctaacgctggaggaaagaagaagtacgtcctagggaccaaccagttcgccgacctgaccagcaaagagttcgcggccatgtacaccggtttgaggaaaccggcggcggtgccttccggggccaagcagatccctgcagctggttccaagtaccagaattttacgcgcctagatgatgatgtccaggttgattggaggcagcagggtgctgtcactcctgtcaagaaccaaggccaatgtggctgttgctgggcgttctctgcagtaggtgccatggaaggtttgatcatgataacgacaggaaacctggtctccctgtcggagcagcagattctagactgcgacgagtcagacgggaaccagggctgcaacggtggctacatggacaacgccttccagtacgtcatcaacaatggcggcgtcaccactgaggacgcctacccttactctgcagtccaagggacgtgccaaaacgtccagccagccgccaccatcagcggcttccaggacctgcccagcggcgacgagaacgcgctcgccaacgcagtcgccaaccagccggtgtctgttggcgtcgacggcggatcgagtcctttccagttttaccagggtggcatatacgacggggatggctgtggcacggacatgaaccatgcagtgacggcgatcggctacggcgccgatgaccagggaacccagtactggatcctcaagaactcctggggcacaggatggggtgagaacggtttcatgcagctacagatgggcgtcggcgcctgtggtatctccacgatggcctcctacccaactccatgaacacaaatcttcagataaagcgtagtatataccagtccatgcatatgactgcagaataaagcatggaagattaattacatgcgtgcatcaaggcatgctacgtactgtattaaaacttcggtactggccagatatatacacaaaggtagaatgtttgtgtgataatatagtaatgcttgtacgaatgcaaagaacatgacctttcaataataaataagattaggct

SEQ ID NO: 14432 - DNA, 825 bp, Zea mays
  Clone ID: LIB189-023-B1_FLI
ctagctctcacgtgcgcaccgcctgctcgacgcaattccccactcgcccaccaaccttcccgtccccgatggcgatcatggcggccaccgccactgccgtggcttccccctccagctccacctcgccaggtcccctccaacccagcccccgcttcctccctcccgtctccacgcccgctcgctgccatctcctccccaagccgcggcggtgttgcgcgcgcctccacatcgagcgtcgggtggccgtcggcagcgacgtgtcttcgtcccatgacgtggctgccgaggaggccgctgctgcgcccaaggtcgggaagcgcgtgcgcgtcacggtgcccgtccgcgtccaccacgttgccaaggcgcccggcctggacctgcgcggcatggagggcgtcgtcaagcagtacatcggcgtttggaaggggaagcgcatcacggccaatctcccattcaaggtagagttcgagctcaagctggacggccaggacaagccggtccggttcatcacccacctccgcgagcaagagttcgagatcctcggggaggaatagagctctggactagagaataacgcgctctcatcggcggctgtggcatctgtatactattgtgtctgcgctaaagaagaacgtggtcgagggtgcggggagaataggagattgcaactttgctagtaagttcctgtttgtttgcttatttgcggtgcgcttctcccctctccaccctttaacattgaaattttcatatgtgaggattgaggaattgttcgattgttgatacttatgatccaaagtaattaaactgaggaatctgttcagcatc

SEQ ID NO: 14433 - DNA, 1333 bp, Zea mays
  Clone ID: LIB189-023-D1_FLI
aaaatcgagccgaaaaagatcaaaagaaaaaaaaagaagaaaaaaaccctaaccactccgatcgaatcatccgagggccgcagcagcccggcgaggctatgtctcaggcaaccgccgcctcccgggatcgcttcccctggtgatacaactcgggccgttcatttcgtctttccgtggggatatgagggccgctccgaccgatccgcccacggcgccggcgaagtcgatgctgaggcggctgttcgatcgccagctcctgcggatctcgccagcggagcgtctaccgtcggcgggggcgggagagaaggatgaggcggagccgagctccgtgtgcctggacggcatggtgcgcagcttcatggaggacgacgtcggcagcgagaaggctgcccacgggggccggtactgtaactgcttccacggaggcgataattcagatgacgaggaggacgacgaagcggcggcggcggcctccgacgtcgccgagacgatcaagggcctcgtccactgcgccacgcttcgggagcgcaacctcctcgccgacgtgtgcgcgcacctggagcggcatcgcgaggcgggggcccggcggcgcgacctcctccgcctggtagcctcgtcgctgcgcggcgcggggcacgacgcctccgtctgcgtctcccgctgggacaagtccccgtcccacccggtcggcgagcacgcttacatcgacgtgctcctcccggcggcctcggaccgcggcgcgcgcgagcgcgtcctggtggacgtggacttccggtcggcgttcgaggtcgcgcgacccaccaaggcgtaccgcgccctgctgcagcggctgccggcggtgttcgtgggcaaggacgacaggctccgcctcctcgttgccgccgccgccgacgccgcgcgcgccagcctcaagaagcgcggcctccacctcccgccctggcgtaagcccgagtacatgcgcgccaagtggctctccccctaccaccgcgaggcgccggtggccgaagaggcggcctccgcctccgcggacgaggacgacgggttcggacccggaaccggaaccgccgcgtgacaactggacacttgcaatttttgtcttggaagaggttgtagctgcaaaagcttgagattctcttgaaattactctttgttcgggggttgtacctagagtaactatggactacggtgtgtgtgtgagagagagagaggtatgcatcactcatcactgtgctgagtaccgcgcgagaaatgaaggcgaggggtatatcatgggtagtgctagttttaggaagagaaataaagcaaaatatcggattaatatccacttttggtg

SEQ ID NO: 14434 - DNA, 840 bp, Zea mays
  Clone ID: LIB189-023-E4_FLI
cccttacaaaactggtgcttgcaattcggttgtatttgcatgtctctttggcacgatatggacaaaggaaaatagagaaggatgacgctgctgtgttgcagcaagctgtggttatctacaccaaggagtttttgaagttcactgaattcattggtgaggtctttgtgaatgcaccattctttatatctgctgaggatgcaggtgccgtggatgcaaggaaaagtgatgagtacaaagaaactattattccagctggaaagacacatgaggtcattttgagtgttgaagctgtaaactcatacatcgcatgggacttttccttgcaacaaggggccctcaacatggacattggctttcatgtggagtacattagcccttcaggggagaaaactttaattcttccataccgacgatatgaagctgaccaaggtaatttttgcactgtttcatcgggatcatacaaacttgtgtgggacaattcatattcttcattcttcaaaaaggtccttcggtacaaggtggatgctgtgccaccggttgttgagccggccttgtcagccacggaactctgaagaggtctgtcttaatataatgatgtaacgagggccgatgcatgcccgagtatagctgtacaaatgtttctgaaggccccacacggtgctgttactgattattccatcgaatgctttgcggtgttctgatcgcagcattccctgatagctcgctgtcagagcgcatggatatgtactttgtgtgcacatggctgcggccacttgtcaccgacgaatgcctgaatataacagaaatgtattatatcgaccaataagagcatgtctgatt

SEQ ID NO: 14435 - DNA, 2512 bp, Zea mays
  Clone ID: LIB189-023-F8_FLI
gctgtttgattattactgagattcaatcatttggtcagatgagagttctggctggggacttacaagtgtagcactgttgtcggcttgtgactaaatagcatcacttcacatacaacactggataatggatcgtagggatacttcagggtttgttagtggaggatgcaaaaataatgaagcctactagtttctctatatcttctaacttggtagctttattgacaattatttaacccagaagtgaggccagctggtacttcccataaagtttggttactctaatagcaatggaacccaggcatgggcgttcagcattcactataagtttctcaaatccaaatggctttgctaatcagtgcaccgccattccagccgtcagttattcagcggctggttctagccaacttgatgtgctggctcctactagaggttgcaagagaaagtggactgagttggctctaggtctgggtgacacatcaagctcagacagcagcaagcagagcatgggtactggctgcactgtttcttctctcaagggaagcgatgatgtctcatgtatggattacgacataagtttcaagttatctcttggcaatgaagatacttccaagctgcataaacaggcttgtggttctaaaaggactatggagaagcctcggttggatcttaagttatctttggctccatctcaatccgatgtaactgacgcggatctaatcagaagcagtgcacctcaggacatgtttgtgcagccgtacttgatgtcctcagtgccaacagtcgatgaaggatctacatctgctcgacatccatctggaggcatggtggtttccttccttaaccaggctgggatttctccgaaccagttgcccccacttaactctcatctggtccagggtccagcttgttcagcaccaacagtgctccaactgccaaaaagttcagctgccacttcttctgggtttgtccgcccacagcaacgcaacggtagcacaaagatctgttcagagccaggttgtgcaaaaggagccaggggttcatctgggcggtgcattgcccacggtgggggcagaaggtgccagaaagaaggctgcaacaaaggagccgaggggaggaccatcttctgtaaagcccatggagggggcaagcgctgtgagcgccttggatgcaccaaaagtgccgaaggccggacagatttctgcatagctcacggcggcgggcggcgttgcagtcatgacgggtgcaagagggcggcgcgaggcagatcgggcctgtgtatcaagcatggtggcgggaagaggtgccaaacgctgaactgcacaaagagcgcggaagggcggtcaggcatgtgcatcgctcatggtggcgggcggcgctgccagtacgctggctgcgggaagggagcccagggcagcacaaacttctgcaaggcccacggcggcggcaagagatgcacgcaccccgactgctccaagggcgcggaggggagcacggcgttctgcaaagcccacggaggcggcaagcgctgctcggctgacggctgcacgaagagcgtgcacggcgggacccagttctgcgtcgcgcacggaggcgggaagaggtgcgtggtggaagggtgcgggaagagcgcgagaggcaggaccgaccgctgcgtcggccatggcgggggcaagcggtgccactccgccggctgcgggaagagcgcgcaggggagcaccgatttctgcaagtcccacggcggtggcaggcgctgctcgtgggggcaccctggctcagacctcgggtctggtggcgctccctgcgaccggctggcgagaggcaagaaggggctgtgcgaccggcacaacccgctggtccatgacaacagcgtgcatgggggtgcgtcgttcggtggcttcagtgtcgtcagtgccgccgccctttctgagggagatggctctccatctccaggcaccgagacaagcatgcgcagcttcttcatgcacgcggtggaggctcctcgctgtgtggcggcctcggcccatgaaggccgggtgcatgggggcaacttcatgcctatcatgctcgacggtggcgtgggactcgggaagaggccggccgacaacgctgatgctggtgcctctgcccctcctcgcagctggaaaagtatggagaaggcctgtggatctgcgccgcgcagctggctgtagtatttgccagaagttcgtgacctgctcacagctcactccctccatctgggtctcctctgctcctgctccaagtgtctcccgtgtcctctggtcatgcgtggtatggtatgataacatgaactgtgtgtgtactggttggtcaggactcgggacttgtttggtactgtggatattgtggttgtttgtgctcttgtagcataggtctggtcgaacatacctactagtaacagtcgtcgtgtgcggtgtgtgattgaattgtaaatgaaaggaacgcctcgtcatgatacaaataaaaaatagtacctttcctcgcggcgcccgcc

SEQ ID NO: 14436 - DNA, 946 bp, Zea mays
  Clone ID: LIB189-023-G5_FLI
ggggcgagcaggtgagcgtgacggtcacgggccacagcctgggcagcgcgctggcgatgctgtgcgccttcgacatcgcggagacgcgcgcgaacgtgtcgccgggcgacagggtggcgccggtgtgcgtgttctccttcgccggcccgcgcgtcgggaacgtcgccttccggaggcggttcgagcgggagctgggcgtgcgggcgctgcgcgtcgtgaacgtgcacgacagcgtgcccaaggtgcccggcgtgttcttcaacgagtcggcgttcccggagctcgtcctgcgggcggcggacaggctgggcctcggcggcgtgtacacgcacctgggcgtgctgctgcagctggaccacaaggtgtcgccgttcctcaaggagaccctggacctctcgtgctaccacaacctggaggcgcacctgcacctgctggacggcttccgcggctccggcgcggggttcgagccccgcgggagggaccccgcgctggtgaacaagtccaccgacttcctccgggaggaccacatggtgccgcccgtgtggtaccaggcggagaacaagggcatggtgaggacggaggacggccggtgggtgctgccgccgcggcagagggtgctcgacgaccacccggaggacactgaccatcacctccagcggctcggtctcaccgcgtgaagctcagcaatactctgatagtagcgttaattagtgcgtgtggcgttcgcgtacgtgcgcggggcagtcggttactctgttgccgcgcgcggcagctcagtggcgcgttcatgccgtgcatgatgcgggtgacgtgcgggatgggcacgtcgctgcctgagaagctcgcaccgttggcgttcgtgtggctgcagaaaggtcatcttggattgtaattctctctacttatttttgtaaattgacccagaaaagctgctgcttgcagcgcc

SEQ ID NO: 14437 - DNA, 598 bp, Zea mays
  Clone ID: LIB189-024-A12_FLI
ggctcatcccgttcatctacaaggccatcaaggagcggcgggcccggagctactactactcgcggtgcaactccagcggctcgtcgcgcggccggctcggggcccgcgtggaggacagctcgcgggacctgcagcagaagcagtgggagtccgccgccggtgccaaggcgccggcgggggcggcggcggagcgggagatggcgcaggcgcaccgccgccaccgctccctcgacgagctggcgggggaggtgggcgcctcgcccgggtggcgccgccgccacccgggcgcgccgctcagggcccgcagcgtcaggatcttctcctgcatcggcggcgtgtgatgtgcggatgcaccggccgcgtggcctgcatcgttccgcagggactggatggcggagggtttgtttggacgcgtcgtgctcgtgctcgtcgagcatgcgcgcagggggtggtttgctcgtgtttttttttttttgcttcgatccgaggtgggcagcgaaggagtagtaattctgcagtggatgtaaatcctgctaatgtaatccaacaaaaagtgtacatattcatgtggatttgtgaacatgcaaattatatttgc

SEQ ID NO: 14438 - DNA, 838 bp, Zea mays
  Clone ID: LIB189-024-A4_FLI
ggctcttacattggctgttggtgatgaagatactgacatgcttgctgatgtgaaacagatggcagctgcagcagctgcagcaggacaagcgagttcatcatttgagaaccagctccggccaattgatagatatgcaatgcgctttatggaactctgggatccagtaattgacaaagctgctttaaatcatcaagtaaatgttgaggaggaagaatgggagcttgatcgtattgaaaaattcaaagaggatttagaagcagaaattgatgaggaccaagaaccactttcttatgaatcatgggatgttgattttgctacgacagcctatcggcaacatgttgaggctttaactcaaaagcagttgttagaagaacaggaaaggcaagctcaggaagcaacaaaagagttggaggagaagaatgataatatgagcagtcaccacagaaagtcaaaaaagaacaaaaagaagacaggcaaactcaagcccctgaaaagagtgcgtctgtcgcctgaatcagaagtcatactggaggaaacctctgtagataatgcaccctcacctgagcttacaagtgatgaatcgccacaccattattgtaacaagcgtaagaagattacggttgccactgaggaaaatagtaacagcagaagtttaaagaagctcaagaaaactactaaatcaagttttatttctgaagccttgtcacctaggctgaaggaggaccttaatgattcagattcaaaatcagtgggtagaactaaaagtgatggcagatttttcatcccttgcatgccagtgaaacgtgttattgtaataaagcctgagagattgaaaagg

SEQ ID NO: 14439 - DNA, 639 bp, Zea mays
  Clone ID: LIB189-024-D10_FLI
tgaagcaaaagcaatggccatgagagcgcttccgctgaccccttccaggagctcctcgtttggagctcaccaaaccaggccgagcggcggcggccccagatcagtgagagcttatgcgaagggagacgaggagggcgacaagcagtccctcttcggaagcatcaccgaggcgctggacttctcgcaggtccggtcggagaaggacgccgagctgctgtacgaggccagggagtccaccagaggtggagggaggatgacgagggagcagtacggagcacttaggcggaagattggtggcacctaccaggatttcttcaagtcatatgttgaagtcgacgggcaatacgtggaggagggttgggtcgacaagacctgcaagatctgcaagaaggacacaaggggggagccgaggcaggttgacaagctaggaagatacgctcacgttgcgtgcctggagaaccccaaaccgacgaactttttcgccaaaatcttcgccagatgaactatgctgcgtccgtcgaaagcgttgtctcgctcgctcgtggttagagagtacaatatataggtagtgttgttgtggcttcaaaggggacaagattgtgcacaattttccaaatggattggtatgtactgatgagc

SEQ ID NO: 14440 - DNA, 703 bp, Zea mays
  Clone ID: LIB189-024-D3_FLI
atagcaccaacgtgtatgcttacatctcaataatcgctctaattgtttgcattccacctgcattgatctttgaagggcccaagctaatgcagcatggatttagtgatgccattgcaaaagtaggtttgacaaagtttgtcagtgacctattcttggttggactgttctaccatctgtataaccagattgctacaaacaccttggagcgagtggctcctctgacacatgctgtcggcaatgtgttgaaacgtgtttttgtcattggtttctcaatcatcgtttttggcaacaaaattagcacacaaactggaattggcacgtccattgccatagctggtgttgctatgtactcttacattaaggctaagattgaagaggagaaaaggaaaaagagcgcatgactgctgtgaataatattatcgggaccttcctcggacacaacatcgtcgacaatcacgacctacttctataccttgttttgttttcatcttgagtcagtcgatccattgtttgttcccagtctggtgattaaaagtctgcaaattctgtttgtggaattggcagcgatacaaatttggcttctttaagtaaatccggttgccggtacacagcggtattaattcacctgtaactgaatggaataccgtgatgcaaagggcacaacactctgcctgactaaaataaaatggtgaaggttcagcct

SEQ ID NO: 14441 - DNA, 690 bp, Zea mays
  Clone ID: LIB189-024-E11_FLI
cgataatgactttgctgggaaggatcaggagtaagaaaaagcatacagtggcattccttcctctcacgcatggggacgcatgggcaattccaaaatccttgtgctacctccgcccgttgtcgacagcgaccagaggacgcccacgcagatgcgccgtccgagcccaggccgcgggagcggatgcctccaatgataagtcagtggaggtcatgcgcaagttctccgagcagtacgcccgccgctccaacactttcttctgcgccgacaagacagtcactgccgtcgtcatcaagggacttgctgatcacagggatactcttggagctcctctatgcccttgtaggcattatgatgacaaagctgcggaggtagcacaaggattttggaattgcccatgcgtccccatgcgtgagaggaaggaatgccactgtatgctttttcttactcccgataatgactttgctgggaaggatcaggttatctccttcgaggagatcaaagaggcgacatcgaagttctaagcccttgtatttgtcacggagtgtttacttgacagctaattttttatatgtatatgtacttaagtagcatctataagatatgccatcaggaaaattttcataaaatgtgcagtaaacagcacttcgcaaggctgccgatcatataagccgccttcggcctttttattgt

SEQ ID NO: 14442 - DNA, 701 bp, Zea mays
  Clone ID: LIB189-024-G10_FLI
gtaatattctgcagtagtttctcgagctcctgtagcaagaaagaaaccatgtcgggggtatgggtgttcgaggacgggatcgtgcggcgtgcggacagcgacccgcccagcggcgccggcgccggcgggtcccggccgaacaaggtgctggtgcacgttcccagcggggaggtggtgacgtcgtatgacgtgctggagcggcggctacgcgagctcggctgggagcgctacctctacgacccctgtctgctccagttccaccagcgctccaccgtgcacctcatcaccgtaccccgtgacttctcccgcctcaagctggtccacatgtacgacgtcgtcgtcaagacccgaaacgtcttcgaggtccgtgacgccgcccctgcctgatggtcttcgtggcgacgcaagctgctgctgtgtgcctattagcttcgtgcaagctcgtcggaccggctggtactggagccctatcgccgccgtatcaacatacgtgcgcatgtattgtatgtttgtgattggtactgatcgagtacttacgtgtgatttgcatggcgcagcgcgttcgtgtggctgcttcttgcatgctgtcctactttgtctgccgccgaataaatgtacgcgagagcgccgccgccgtcgccgtcgccgtatgcttcttatatatccggatttgagggtgtgttctttgactctttagtatt

SEQ ID NO: 14443 - DNA, 879 bp, Zea mays
  Clone ID: LIB189-024-G8_FLI
ggcctcctcttcttctcggcacgccgcaaaggcaaaaggagtagtgttccagccggccagcgagttcctgcccatgatagaggaggtgcacgagcgcctggtacagacgacgcgctgcataccgggggccaaggtggagaacaacaggttctgcgtctccgtccacttcagacgcgtcgacgaaaagatgtggggcgagctgtcagagtcggtgaggggcgtgctgcgggggtacccgaggctgcggctgacgcacgggcggatggtgctggaggtgcggcccaccatcaagtgggacaagggcaaggccctggagttcctgctcgagtcgctcggcttcgcggactgcagcagcgtgctgcccgtgtacatcggcgacgaccgcaccgacgaggacgccttcaaggtcctgcggcgccgcggccaggaccagggcgtcggcatcctcgtgtccaagcaccccaaggagacgagcgcctcctactcgctccaagggcccgccgaggtgatggagttcttgctgcggctcgtcgagtggaagcgcctctccagggcaaggctcaggctgcaatgagatgagatggcgcaactgccgtacgtggacacgtacgacgatgcaacggattaagctaactgccaagtgccagttaatcaagttaagatcctgctacgtggaatcctgaactgcagagaaccgacgacctgacactgtctctctactgtccccgtagtgatcaacatgcgtgtatacatcgttgtctcatacagtactagttagttagtattaagcatgcctgttacatatatatagcttcatgtgaatgtgttgtactgatgtgtgatcttaaaagtatgctgatgaacggtgtgatatttttt

SEQ ID NO: 14444 - DNA, 1242 bp, Zea mays
  Clone ID: LIB189-024-H3_FLI
ccccagctcaccaagtcgaactccaacctctcgaaacaggcgctcaatggcctcctctcggacaagaaggacgtggttagctcgaaggcaaaatcaaccagcgctaggtcgacgccgtcttccccgaccagcgcccattctctgcctgcgtcgttcgataaattctcgagtgacatgaaacagagagtgagaaccaaaggagcagagaaatcgccgccgtcaaggctgtccttgctagaaaaggctgcgtctgtgttgaaggccactacggcagggaggaagtcctccctgggtaattccattagtaacaccttgttgagcttcgaatctgggcccaaggccttgagaagaagctgggaagggaaagcagatgcgaaggacaaaggcaattcggattcaaagcctgccaaagctgaaaagaagtctgaaaatcgaagctcttcgactcccagacgaaaatcattagcagaagagaaaccatcgaataaggatgacagtaagattctgactccacccaggaagagctcagcgagtgctcctgcagacgattccgacaaagttgtgaacaacaagctttcttctcctataaggaggacatcaggggttttaaataacccgaatgtcactaatctagtgaaggttgctgcaagtagcaggaaactgacagatgctagcgcttcgtggacaacgcttcctccatcactcgctaaactagggaaggagcttctgaagtacagggatgcagcacaaatggctgctgttgaagccatgcaagaagcttctgcggcagagagcattgttcgatgtttaagctcgtacgcggaggtgagctcgtcggcggaggagcagaacccacagcaggctgtcgagcagttcctcgctctgcatggagcaatctctcgagccaccatcgtcaccgagtctctaaccaaggccacgaccacggtctccaccgcgacttcaccagatcaatcagcagccggcgatgcgtcaacagccgacgaggaaaccatggctgtcgcggcggagcgccgccgccgggcagcctcctgggtcggcgccggcctcgccaccgatctctccgccttctccctctacaacctgaaacccgccccagccagtgtcatctccccgctggccgtcgtgctcgtggacgagtcagccaagccggcggcggcgaaggcagtgccgcccgcgaagtcgcggctgtccccggcgaaggggaggttgaaagctggttcc

SEQ ID NO: 14445 - DNA, 666 bp, Zea mays
  Clone ID: LIB189-025-B10_FLI
ggagcagctgctgttcatggcgacgctggtcgccaagaagctgctcaagatgaagaaggtgaagccgtacatcccggatttcaaactggcgttcgagcacttctgcatccacgccggcggccgtgccgtgctggacgagctggagagcaacctggcgctcacggattggcacatggagccgtcgcggatgacgctgcaccggttcgggaacacgtccagcagctcgctctggtacgagctggcctacagcgaggccaaggggaggatccggcgccgccaccgggtgtggcagatcgcgttcgggtcagggttcaagtgcaacagcgccgtgtggagggcgctccggtcggtgaacccggcggaggagacgaacccgtggatggacgagatcgacaggtttcccgtggatgttcccaaggtctctaaggtttcaagcgactgaaatgcattgctagttgcgtgaatgatggagcttgcaattgtttggatagaagatctggttggaatttttcatagttcattactatatagttgtaggagataggaaaggcgatcgacttctctaatcttgaattatacatctgttaatgttgtttctgtatggcactcggtccctggcctatctatatagttgactgctcggtgttctgacagttctactatatc

SEQ ID NO: 14446 - DNA, 372 bp, Zea mays
  Clone ID: LIB189-025-C12_FLI
gggcaagccacaggagtggcgagacagaggacaccttcattgctgacctctcagttggcctgtctacgggccaaatcaagacgggagctccttgccggtctgagcgcctggccaaatacaaccagctgctcaggatcgaggaggagctcggtgatgccgcggtctacgccggagcaaagttcagggcaccagtggagccctactaagaaaggaagaggatgaggatgttttcttgtggagctatactagctcgctgctgccttttgttacaatgtttgtacggtcgcaataaatgtatggtcgtgtttgctcgagagctactcaggtgattttgtcgtgggagcaccaaaagcagaaaagaactgttttttt

SEQ ID NO: 14447 - DNA, 2245 bp, Zea mays
  Clone ID: LIB189-025-C6_FLI
ggccgcgggttaaccttcccttctcgctgccgtgctcctgctcgtgcgcgcgttcgcaatcgtagcgctggggttgagccgcgagtggataaaccctagccggtggtgtagctgggttggtggctttgatgccggcgacggcccgcttgtccccggaatggagtgaggtgacgaaggctgccatgggctctaactatgccacgattggattataggatagtagctggcagctaccagtttcctagaaccaatttgtggatagcgagaggagtgactgttgttcagtactttcacctcgatcatgggtggtgtctgctcaaggaagagaagccaattggtggatgaaggtgacgctctccagacatccccaaggttctcaaagaccagcagcttaaaatggctgttgcttacactgcctcgcagcagttctgatgtttccgggaagggacagggaaatgaacctgggcggtgcccgtccctcatggagctttgtgtggctagagtttgccaggatatcgacaggtattctacttttgcaatgctgccaagggatctcagccagcagattttcaatgaattagtaaattcaaaccgtcttacagaggcatcacttcaagtttttagggattgtgctctgcaggacattggcttaggggagtaccctggagtaaaggatgcttggatggaagtagtggcatctcaaaagcagtcattgttgtcggttgatatttcttgctctgaagtagctgatagtgggatagatcttcttagagattgctcaagcatgcaaagtttggcatgtaattactgtgatcaaatatccgaaagtggtctgggagtactgtcaggattgtcaaacctatcttctttaagcttcaagcgaagtaatgctgttactgctgaaggaatgagagcctttgcaaatttagttaacttactaaatctcgaccttgaaggttgcctaaagattcatggtggccttattcatttaaaagatctgacaaagctcgagtcattgaatatgagatattgcaattatattgcggattcagatatcaaatatttaacagatctgacaaatttgaaggaccttcaattgtcatgttgtaagatcacagatctgggggtgtcgtatatcagaggcttgcagaagctcactcacttgaacctagagggctgcccagtgactgctgcttgtttggaagctatttcaggattgtcttcattggtattgttgaacttgaaccgttgtggtatatacgatgatggctgtgaaaactttgaaggtcttaaaaggttgaaggttttaaacttggggtttaactatattacagatgcttgtttggtgcatctgaaagaattaatcagtttggagtctttgaacttggattcgtgcaagattggagatgatggtctatcacatctgaaaggtcttgtgctactgcaaagcttggagctttctgatactgaagttggaaacaatggactccagcatctatctggtcttcgtaatctgcaaagtattaatctctcatttactttggtcacggacattggtgtgaagaagatctctgtgttgaattcgctgaagtcagttaaccttgacaatcgccaaattactgatgttggcctggcagcacttataagtctcactaggctgactcatcttgacctttttggagcttgcataactgacaatggcacaaattgcttcagatattttaagaatcttgtttctcttgaagtctgtggtgggttcgttactgatgctggagtgaagaacatcaaggatctgaaggccctgacgttgctgaatctttctcaaaatgctaatctgacagacaaaaccttggagctgatctctggcctgactgctttgatcaacttgaacgtgtcaaactcacgggtgtccaatgctggtctcaaacacctgaatgacctgcacaacctgcgttcactgtctctagattccacccgggtgacggcaaacgagatgaggaagcttcgagcaacagtgctgcataatctgatcagcatgcggccagagtagtacccatttggcacctgctgtaaataatcattaggttcgagcaggttgttctgttggtaagtactgccttcgttctcgaatatttgtcgtccgctagttcatttttgaactagaccgcgataaataaaaaagaacggagggaatatcttgtaagaacctgaattgaaggcaggcatataattatataagtttccc

SEQ ID NO: 14448 - DNA, 1035 bp, Zea mays
  Clone ID: LIB189-025-D7_FLI
ggagcagatcaggatccattaacacccctacgtacgcctttcctctggaaacccttctctcgcctgcctctcccccgccgcgccgccacttcccctctcccgtcaactccggcttccgcgcgaggtcgagctagcgtttggagttctcgagacctgctgtgatggcgacagagcaagcggcggagaactacacggtggaggacctcgtggccctgaacccctacaaccccgacatcctcaacgacctcgagaagttcgtcaatgagcaggtctcatctcagacatataacttggatgcaaatctcagccttcttcgcttgtaccagtttgagccagaaaggatgagcatacagattgtggcccacatactgattaaggctctcatggcaatgccagcccctgacttcagtttgtgcttattcttaatccctgaacatgtgcaaatggaggagcaattcaaggtattgatagttctttctcactacctagagactgctaggttcagtcaattttgggatgaagcagcaaagaaccgccacatatcggaagcagtgccaggtttcgaacaagcaatccaatcctatgcgattcatgtactttccttgacataccagaaagttccaaggcctattcttgtagaggcaatcaacatcgaaggtctcgcgttggacaagtttcttgagtaccatgccgcgaactcaggttgggtgattgagaagggtgggcagtctcaagtgattgttcttccgcgtaatgagttcaatcacccagagctcaagaagaacacagccgatatccttccgtttgaacacgtaacacgcatattccctgtccttggctgattcaggcgtgctgagagatctatacaaaactcagcgagtgaagcttctcttagtcattgcatcttcagtttgtagtgtaccctattgagattatctcggtataccagtcctttttatgccggagttggtttctgcaacctatggttattgttattactataacgaaatgctcagatatgagattggtcttgtc

SEQ ID NO: 14449 - DNA, 787 bp, Zea mays
  Clone ID: LIB189-025-F3_FLI
ggtctagttaaaccattttacacactccgctctactcccggaagagacgatggcggaggcgacgccgacgatggtgttcgtctacggcaccctaaagcgcgggttccctaaccactcgctcctcgtggcctccgccacccccttcgtgggagccgcatccacggccgagccagcctccctcatcatcggcccctactcggtacccttcctcctccccactcccgcctccgcctcctccggtcgcgtcgtctcgggcgagctctacgccccatcccccgccgcgctcgccgagctcgacgccctcgagggcacccacatcggcgtctacgagcggcgcccgatcaccgtcgtggtcgacgggtcgggcgaggtggtgcaggcggaggcgtacttcgcgcacccgagctacgcggaggcgctctggcggcgctgcggcggtgaggaggccgagattggagagtacaccgtggaccatgccggcgagtacgtcccgaagagtgagcgccttgccgacgctgctgggcttattgacgccatccataagttcgtcgccactgccacggacaactgacgtcgtgctcacggattactaccatagttcagtgaatgtcacatgtttcctcttttcctgggctagtgcttcggttgcagcttttgttttctggagtctgtcacgaactgtaattcatcctgcaaatttgcagacactgcttataggctatgcaggtcgtcgtattctgtattcagcatgactgaatccgagttttacgaatgagaaatgttatac

SEQ ID NO: 14450 - DNA, 993 bp, Zea mays
  Clone ID: LIB189-025-F4_FLI
gagtataatcaagatgcttctggttttcctcggccaacggaggatgaaaatgccgcgtctgctacaggagataattctggcttccaagaaaacaacacgggttctcatatggatctggatatgatgaatgactatgaagtgaaggaatgcaacgattttgggagtgcgattcatggcgttgatacagattttctgaactatggtgacgacgacaacgacgacgacttcgacgacgacttcgagccaaatcccagcgagttccagtctctcgacaacagcggctggtcttctcgcaccaggggtgtcgcgagatatctcaagactctgttcgacgaggactccggtctggggaggaagagcgtcgccatcgaccatctggtgcgcgggaagacgcggaaggaagcgtcgaggatgttcttcgagaccttggtgctgacgacgaaggactacatcagcgtggaccaaccgaaccccttcgacttcgtgagcgtgaagccaggcccgaagctgctcatgtcagaattctagatcaacaaagtcagcgtacccctggcgcgatacattccttgttaccattgtatccatcatcgcaccgaccagcaacaacaccgcagatattccccccaaccacagtaccacaccctccctcccttccaaatccatttttgtgtatgttgttgcagttcccctcccctcccctgtagcatgtgctgcgctgatctgttgttgttgccagggcgtctgtccgagtaggatggtggttgtgttgtaccgtcggctatccaacagtatatagtagtagtacgattttagcgacactcgtgaagcccgccgtgtaatgtgctagggttcgcgctcccctaagttactgtcgctttagactggctaaagcccgtaggaattgtatacgacaaggacagggacagcccgagatgatgaatgatgtattgatgtgcctgttgactatgtgaggactgacggttttaactcaat

SEQ ID NO: 14451 - DNA, 2023 bp, Zea mays
  Clone ID: LIB189-025-G10_FLI
gaaggacacgatgccttccccttcctccgcccactggctgagcctcgtcgggagcatctggctgcagaccgtcaacgggccgaacgcggacttccccgtgtactcgtcgcagctcaaggagctgaagcacatcacgcaggtgcagctcaacttcctggcgttcgcgtcggacgcgggcaagctcttcgggtggttctccggggtggcggcgctgtacctgccgctgtggctcgtggccttcgtcggcgccgcgttcggcctcgtcggctacggggtccagtacctgttcctggacagcgccggcctccggtactggcacctgttcctgctcacctccctggccgggaacggcatctgctggatcaacaccgtctgctacctcctctgcatgcgcaacttcggctccagcagccgcgtcgcggtgagcctcgccaccagctacctgggcctcagcgccaaggtgtacaccagcctggcggactcggtacccggcctggtggccagcggctccaaggccaagacctacctcctcctcaacgccgccgtgccgatgctcgtcgccgtcgcggtggcgccgtcgctcagggtggtccagctcaggagcgaggcgagcacggagtcggacgcggcattcctcgtaatgttcgccatcacgctcgccacgggagcctgcgccgtggtaggcagcatcgggtccacgtccggcagcggggggctgtcgtcgagggagcacgtgatcagcctcggcgtgctgctggccacccccgtactcatcccgctggcgctcagggtgcgagagagcctcaacaagatacgggccaccaagcgggagaacaggatccacgatctcggcgccgacgacgacgcgggcgctggcgcaggcgtcgtcgtcgacgtgggcggtgccggccccgagagcaaggagggagagggagacggcggcgtctcggagaaaccacgggaggagatcggcggcctccggctgctgaggaagctggacttctggctctacttcttcagctacatgttcagtggcaccctgggcctggtgttcctgaacaaccttggacagatagccgagtcgcgacggctcgggcagacttccacgctggtctcgctgtcgtcctcgtttggattcttcggtcgcctgctcccgtccttcttggactactactccgccaagagtgggtactccatctcaaggacgggatccatggcgtcgctgatggcgcccatggcgggcgccttcttcctgctgctgaactcgagcgacttcttcctgtacctgagcacggccgtgatcggcacgtgcacgggcgccatcgcgtcggtggccgtgtcggcgacgagcgagctgttcggggccgagaacttcggcgtgaaccacaacgtggtggtgagcaacatccccgtgggctccctgtgcttcggctacctcgcggcctacctgtaccagcgcgcggcggggggcagcagcagccaccagtgcatcggcgccgcctgctacagggacacgttcgcggtgtggggcgccacgtgcgccgtcggcacgctgctctgcgccgtcctctacgcgcgcggtcgtcgtcgccgcgcagctccgccgggagaagtaataaggacggcacgagcctcgcccgcttagctatagctgcctcgtgtctgccatcgtaggtgcatggtactacgtagcagggctagctagctgcagaagtttctgatcgatctgagggcttcagaagaagtttctgatctgagggcctgattaatcacacaccacccatcgatcgaccaagcatcatctgcctgtagggctctacagatgatgatgcttttgatctttgcttcttctctttttttagtgtgtgtgtgtgtgtgtgtgttcttggagtttctcttgactgatcccgatgccttgggcgaggaggctgatcatgagtagatattgtgcagcaggttggccacctttttcacttgttattagtgcgtgtcgtatatatgatcggtacacttaattaacttg

SEQ ID NO: 14452 - DNA, 869 bp, Zea mays
  Clone ID: LIB189-025-G11_FLI
aaattttatgatgatgatacagacaaagggcagtaccattgcatcgattgtggcatatgcagggttggtggcaaggaaaacttcttccactgtgtgaagtgtggatcctgctattctgttatactccgtgataaccatcagtgtgtggagaactcaatgaggcagaattgcccaatctgttatgagtatctatttgactcattacaaggaacaagagttcttaactgtggacacacaatgcacttgacatgttttgaagaaatggtggcgcataacaaatacacttgtccaatatgctctaaaacagctcttgatttgacacatcattgggaaatgttggatcaagagatcgaagccacgatcatgcctcttgtgtatcgctacaagatttgggtgctttgcaacgattgcaacaaggtctcagaggtgaactttcacgtgattggccacaagtgcagccactgcagatcgtacaacacccgaacaacatcgcgccctgcagatttatccggaagcagctcaccttcaacagactcatccgacaacaacatatagagaagaaaccattgacagagccaatatgattgaagaaccggaggaggaaacattgtttcggggcgtgcgtgcttgccaaacttgaagactcccagccgtttattggccctcatcttgtctagattcagttcattccatgagtctttgctgttgtggcaacttccagcttgcgcatcgctgggtcaacaacccacatggccggcgtagctgtccctttgaatcttgttcgcagccgtgattttatcactgtggatgaaacgtaatcacatacttactgtaatctactatggttgaagatgtgtgcccccctgact

SEQ ID NO: 14453 - DNA, 742 bp, Zea mays
  Clone ID: LIB189-026-A12_FLI
cgcaagggtttgtttcatcatatgacactgctcatcaatacagtgacagtgaagaagatgcacataagtgggtcagtcaccgaaaccatcgagggaacatctgcggagttgatttcatatggcttttaaatcctgacaagtgcaggaagcccctgaagaccagctggaatgaagctgtttttggtatcattaagtacttcctccaagttgttgcattcctttccgaggagaatgcatttgcactcctgaaggcagacagcctttatgatcacatcacatattcaagtttctaccaggcattgtgtcagttaggaatggtccatcctgatagactaaaatcagaagaaattgaggagttgtggagtgaagctgaccgtgatggcgatggtgttattaactacaaagaatttcagtgcatctggagcccaaactgctgtagtcaagaggaggaggatactgaaattgacatcactgatgaaagtctggacacttttgaggcaaacaacgaagccttcggcttcaccgtgaaggaagctgttctctttcccccagaagtagagaagggcatgtggccagaaaactacagcctctcagatcatgctcccctcactgtggtattctcccctattagaatgccttgctctccacgcaatcgtggggagctctagctatctaatgtcaatgatctcatgtatacatatacatgccccacgaaatcgttgttagatttggtggggactac

SEQ ID NO: 14454 - DNA, 1037 bp, Zea mays
  Clone ID: LIB189-026-C9_FLI
cttcctccaccacagtcatcagtggcgttatcctcttcgttctcgcctccctggttgttgttggctgggtgttggcgagctgggagtagagaccgagaagtggagcggccatgaagatccagtgcgacgcgtgcgagggcgcggctgccacggtggtgtgctgcgccgacgaggccgcgctgtgcgcgcgctgcgacgtcgagatccacgccgccaacaagctcgcgagcaagcaccagcgcctcccgctcgaggcgctctccgccaagctcccgcgctgcgacgtctgccaggagaaagcggcgttcatcttctgcgtggaggaccgggcgctcttctgccaggactgcgacgagcccatccacgtcccgggcacgctctccgggaaccaccagcgctacctggccaccggcatccgcgtcggcctcgcctcggcttccgcctgcagcgacgcctgcgacgcccacgactccgaccaccacgccccgcccaaggccaccatcgagccaccgcacgccgccgtctccgccgcggtgcagcaggtgccctcgccgccgcagttcctgccgcagggctgggccgtcgacgagctcctgcagttctccgactacgagtccagcgacaagctgcacaaggagccgacgctcgggttcaaggagctggagtggttcgccgacatcgacctcttccacgagcaggcgcccaaagccagcaggacgttggcggaggtgccggagcttttcggataccaggcggcgaacgacgcggcgtactacaggccggccaaagccgccgccggcggcggcgctggggttcgccagagcaagaaggcccggatcgaggtcaccgacgacgaggattacctcatagtccctgatcttggttaaataagagagcgcaggagttttgtttcgtctcctgatgtgtacggtgtaccagagaagaattttactgtgtacaagctagtgtcaagtgttgtgcatctttgactgtagtgtcgctcaattctgaacatctattaagccacttttgttgct

SEQ ID NO: 14455 - DNA, 916 bp, Zea mays
  Clone ID: LIB189-026-D8_FLI
accgcacctgcgccgccggcgtggggctggtggtcccgtcctgggcgccgcagacccaggtgctggcgcacgccgccacgggcgccttcctcacccactgcggctggaactccgtgctcgagagcctcgtctacggcgtgcccatggtggcgtggccgctctacgccgagcagaggcagaacgccgtgctgctctccgacggcgtcggcgctgcgctccgggtgcccgagtcgtccaagcggagggagattatcgcggacacggtgcgcgaggtgatgcgcggggaagggaagggcgccgcggtcagggccaaggtggccgagctgcagaaggccgccgccgaggggctccgcgacgggggcgccgccgccgccgcgctggccgaggtggtacaggggtggacgacgacgacaggtggaggagagaaggactaggtggtggtgactggtgatgccgacgcgattggcgcctgccacctgccgcctgccgcctggtgccacagcgatcgtcctcatccagaccaactccaacttgggccgggccaaacgattcgtttgttccttgtccttgtgtataactttggttcacatgctttgcttgctgtatgtaatgtgacctacagtcctgcactttggcacgtagttaattagtagagtactcctagatagctgatctgtgtcatgacgatacgatgtagaagaaggctaccgcttttaattaatttggcactttgtaacttacaactatactgttgggccaggagcattattctcccgaagatcctcatatactacaggagtaatgctgaagattggcttcagcctatgccgttgacagacgtggacacaaagacaacaacttgaaacaaatattgtgcgtgtataaaagagtgaggtaaagtaatatcccttaagat

SEQ ID NO: 14456 - DNA, 1031 bp, Zea mays
  Clone ID: LIB189-026-F11_FLI
ggttctctgcaccttatgtttgcagctctgctctgttcagtgggaacgggtcagggggtagatacatcagtaacgggaagctgttgtccagacggcctcgtggaatcgattccaagaagaggctctggactaacgtccttcttgctcttaatgtcctggcttatgtcgctcaggtagcatcacaaggaaagcttcttatgtggggagccaagatcaacagtctgattgatagagggcaattttggcgtttggcaacatcatctctacttcatgcaaatctcacccaccttgcattcaattgtttctctttgaactctattgggcccatggttgaaatgttaagtggtcctagaagatatctagctgtttatttcagttcggcgctggcaggttcactgatgagctaccgttgtagtgcgtcacctgctgttggtgcgtcaggtgccatttttggattggttggagcctatgcagtttatatgtggaggcatagaagattttttgggaattctagagagagtttagaacatattgggcgtgtggttgtcctgaatatgggtatgggcctcctttcaaggggaattgataactggggccatctgggaggcttgcttgggggagttgccatggcatggttcctaggtccggcatggcaatatcagtacgtggcaaaggatggtagagcggttttcaaagacagggctccagtcctccgactaataaaggggtagacctgtgggtattcgtggaaatagcgtggaagaggatgaaaaggggaaagggggtgaagattcagacatgcgccgagcaaagggagtggcgaaaaaacaattaggccctctttggaatgaaagaatttcagagaaatcatacatgaatcagttcatttttcatagaaaaaacacatgaaccttaacatgtaactagttttggtgtcgaaacatttcactgcagagctaattgctgaggaaacacacacgagaatcatattgctttgttcgaatcgtggcaattgttaaatcttcaaagct

SEQ ID NO: 14457 - DNA, 1775 bp, Zea mays
  Clone ID: LIB189-026-F12_FLI
gagaaggaagagaaagaaaaaaagaaaaagaagatcagttagaataccttgaggagcgtcgcctcaaggatttggtcaagaagcactctgagttcatcagctaccccatctccctgtggactgaaaagacaacggagaaggagatttctgatgatgaagatgaggaagagaagaaagacgctgaggagggaaaggttgaggatgttgacgaggagaaggaagagaaagaaaaaaagaaaaagaagatcaaggaggtttctcacgagtggtcattgatcaacaagcagaagcccatctggatgaggaagccagaagagatcacaaaggaagaatacgctgccttctacaaaagcttgacaaatgactgggaggagcatctggctgtgaagcacttctctgtggagggtcagctggagttcaaggctgttctctttgttcctaagagggctccatttgatctcttcgacaccaggaagaagcaaaacaacatcaagctctatgtgcgcagggtgtttatcatggacaactgtgaggaactgatccctgagtggctgagctttgttaagggtattgttgactctgaggaccttcccctcaatatctcccgcgagactcttcagcagaacaagatcctgaaggtgatccggaagaaccttgtgaagaagtgtgtcgagctcttctttgagattgctgaaaacaaggaggactacaacaagttttatgagtctttctccaagaacctcaagcttggcatccatgaggactcgcagaacaggagcaagattgctgagcttctgagataccactccacgaagagcggtgatgagctgaccagcctgaaggattatgtgacgaggatgaaggagggacagaacgacatctactatatcactggtgagagcaagaaggcagtggagaactctcctttcctggagaagctgaagaagaggggctacgaggtcctgtacatggttgatgccattgatgagtatgctgttggtcagctcaaggagtttgagggcaagaagcttgtctcggccaccaaggagggtctgaagcttgatgagaccgaggatgagaagaagaggaaggaggagctgaaggagaagtttgagggtctgtgcaagatcatcaaggaggttctgggcgacaaggttgagaaggttgtggtgtctgaccgtgtcgtggactcaccgtgctgccttgtcactggtgagtatggctggacagccaacatggagaggatcatgaaggcgcaggccctgagggactctagcatgtcggggtacatgtcgagcaaaaagactatggaaatcaacccggagaacccaatcatggatgagctccgtaagcgcgccgaggctgacaggaatgacaagtcagtcaaggatcttgtgatgttgctgttcgagacagctctcctgacctccggcttcagcctggatgaccccaacacctttggcacccggatccatcgcatgctcaagctcggtctgagcatcgatgaggacgagtctgctgaggccgaagctgagatgcctccgctggaagatgacgccggcgaaagcaagatggaggaggtcgactaagcttcggatcactgtcgtttatccctagttacatatgataagctaaatcttgactactgttttgaggttttccgcacgttaacggttctcctgccggccaatcaatgagtttgctgtagctatatggtactatgttttacagtttgttcttgttatctgtaatcctactagtatagtatatgttct

SEQ ID NO: 14458 - DNA, 1652 bp, Zea mays
  Clone ID: LIB189-026-H12_FLI
cctccctcctgccgggtccttaataaagagcagcagcgcaaggtgagccgccagcttgccccaggttggtagagcgagcgagaagaaggcaatggcggcggagagcttcctgttcacctcggagtccgtgaacgaggggcacccagacaagctgtgcgaccaggtgtcggacgcggtgctggacgcctgcctggcgcaggaccccgacagcaaggtggcctgcgagacctgcaccaagacgaacatggtgatggtgttcggcgagatcaccaccaaggcgagcgtggactacgagaagatcgtgcgcgacacctgccgcgagatcgggttcacctccgacgacgtggggctcgacgccgaccgctgcaaggtgctggtgaacatcgagcagcagtcccccgacatcgcgcagggcgtgcacgggcacttcacgaagcggcccgaggagatcggcgccggcgaccagggccacatgttcgggtacgccaccgacgagacccccgagctgatgccgctgagccacgtgctggccaccaagctcggcgcgcgcctgacggaggtccgcaaggacggcacctgcgcctggctcaggcccgacggcaagacccaggtgacggtggagtacgtgaacgagggcggcgccatggtgcccgtccgcgtgcacaccgtgctcatctccacccagcacgacgagaccgtcaccaacgacgagatcgccgccgacctcaaggagcacgtcatcaagcccgtcatcccggagaggtacctggacgagaagaccatcttccacctcaacccgtcggggcgcttcgtcatcggcgggccccacggggacgccggcctcaccggccgcaagatcatcatcgacacctacggcggctggggagcccacggcgggggcgccttctccggcaaggaccccaccaaggtggaccgcagcggggcctacgtcgccaggcaggccgccaagagcatcgtggccagcggcctcgcccgccgctgcctcgtgcaggtgtcctacgccatcggcgtgccggagcccctgtccgtgttcgtcgactcctacggcaccgggaccatccccgacaaggagatcctaaagatcgtcaaggagaacttcgacttcaggccagggatgatcaccatcaacctcgacctcaagaagggcggcaacaggttcatcaagaccgccgcatacggccactttggccgtgacgacgccgacttcacctgggaggtggtcaagcccctaaagaaggcatccgcttaagaatgtattgggaagttcactggacatgaggttcatcttcgtctggctctgctgatacctgcaaggattgctgctgctgctgccgcccctggatgtgtgtttgatcagtgactggctgctctgctccatagaagatgaatgaagagagagatggtgaagaaggctttggcaaatggcaattgccgcagcaagccatgtcggcgccactgaccggcttagtgattggtataatttggtgtggcagcagccaggattaatgcgctggtcttttatctttactactagtttggtctcgtccggtatcttatttttctttccccttttcgagtctgtactgaaactgctgagagatttgcagttttgatctatcatatcctttggt

SEQ ID NO: 14459 - DNA, 1174 bp, Zea mays
  Clone ID: LIB189-026-H9_FLI
ctttaaaagcatcctctccgccgcggcgcaacggccacaccttccgtcccccggcctccgctcgcctctctctttctctctcctcgctgagtcgccgccagccatgaacaacctcctcacggattcctttgagctcccccggcgggactcctcaagagatgcagacattgaaatgggaatgcatcaagctgatgcttcagactacttaaaagatttcttgaagaaggtcgatgcaattgagagtttaattgcaaagctgacaaatctattgaataagctacagactgcaaatgaggaatccaaagcagttacaaaagcaagttccatgaaagcaattaagcagcggatggagaaagatattgatgaagtggggaaaattgctcgtcaggcgaagacaaaagttgatgaattggaaaaagacaacttatcaaataggcaaaaacctggatgtggaaaaggttctgccgtggaccgatcaagagagcaaactactggagcagtgaaaaagaaattgaaggagcggatggatgactttcagaccttgagagaagcaatcaggcaagagtatcgggaggttgttgaaagaagggtttttactgtaactggtaatcgtcctgatgaagagacaattgatgacttgatagagactggaaaaagtgagcaaatattcaaagatgctatccaacatcagggaagaggccagatactagacactgttgctgaaatacaggagcgacatgatgctgtaagggatctagagaggaagcttctggagttgcaacagatattcatggacatggcagttcttgttgaggcgcaaggagacatgatcaacaacatcgagacccatgtctcgaacgccaccaaccacatacagcaaggtgtgagcgcgctccagaacgcgaagaaactgcagaggaattcgaggaagtggatgtgctacgccatcatcatactgctggtgatagtcgtggtcattgtcgtcgcagtcatccagccatggaagaagggcacctagcgtggtggtgccttttttcctgtttgtgtaatatgtgtgcagttttttttgtgggtgattcgtgatttgttgttgtacctatagtcgacgcaacaggagctctggcatttcgattcattctgtctagtgaaaggacactgccatcatatgccgatg

SEQ ID NO: 14460 - DNA, 705 bp, Zea mays
  Clone ID: LIB189-027-C8_FLI
tcgtactggaccaatctgccaccacactttgatcacacacaggaagttgagatcagaaaaatgcaggctgccgctactgccgccgggttctcggccgtgctgcccgccaagggcaggccggcggcgaggagcagggtggtggcccgtgtccccgccacaaggaggagcgtccgtgtagctgccgtcgtcgcgaccgaggccgcgcagatcgactacagctcaagcgtctcggtgttcccgatggaggcctgcgacctgcttggtggcgacgcgtgcaacgggcccatgttcccggaggccaagcccgcctcggcggcggcggcggcgagcaaggagtgtggtcggggtggacagggactacctgtcctacgacgagccaaagacggtgttcccgggcgaggcgtgcgatgaccttggcggcgagttctgcgaggcgccgtaccaggacggcgtctccaaggagctggcgcacgcctgaagaccctgatccatccatttctgtccaccacgctatgtacgtatgtgtagcagatggtttacatctacgtgttagagcccggagagctggagaagctagctagcgtgcttacagaataacagcagccaagcaaagccaagggtgtgtatataataggcatgccttgggttgtgtcagctgcgactgtatgtatagtttaaaccaagatgaaatggtactgatggtga

SEQ ID NO: 14461 - DNA, 766 bp, Zea mays
  Clone ID: LIB189-027-D3_FLI
ccgaaagccggcgagaagatctttaagaccaagtgcgcgcagtgccacacggtcgacaagggcgccggccacaagcaaggtccaaacttgaacggtctttttgggagacagtcgggtaccactgcaggctactcctactctgcgggaaacaaaaacaaggctgtagtctgggaagaagacactttgtatgagtacctgcttaaccctaaaaagtacattcctggaaccaagatggtcttccctgggctgaagaagccgcaggagcgtgctgatctcatcgcgtacctgaaggaagcaactgcatagttcattgacatgccttttgccatgaagagaaaaattgttttgcagtttaataaaaaacattttagacaatttgggtcaccctgtttgaacagggtgcaaccacgtctcattattttcgttcttatggtgtcggtatggaatgcctaggtgtttagctgtgcacaaataacagttaaactttgacggctcctatttcaactgctggagaaatgccagtgccctatttttgccccccagggtgtggaatggaaatcggtaatgcacccattttgaagggcctgagatgtttatatatgttctgttgaccgactgttcggctgctagtttcagcatctgtagtgcaactaaatcagctagccgaacagagagctgcagcgcagtagctgctcttgcagccgaacattcgagcagcgatggattattttatttatttaatgatattgcgtatggatgttaggat

SEQ ID NO: 14462 - DNA, 1896 bp, Zea mays
  Clone ID: LIB189-027-D5_FLI
acaggtagggtttcggccaccagccatggccgactccgcgccgtccatcccgggcgtcatcgcctccctccaggcctactccacggccctctccgcctttaccgccgcatggcgtgccgtcgagacccacgcctccaccctcgactccgccctcgccgcccgcctagccggcttctcggagctcgagctgatctgctcggcgatggacggagccggcctccgcgcgtacctcaccgagcacagggacgagctcaaggatcccacgcgcgccctcgacgcagccctccaagttgcgcccgacccggggcttctggtcctctccgcggcagcgagtttctgccgcacgctgccggaggtggccaagagcgacggtagcgtcaaggcgtcctgccgcctgctcatcgccttgctcgaccggctgcgcgcgattggtgtcaagccgtcgcctgaggcgcgcgaggaggccagagctgttgcgacggactggaagcgaggcaagcggatcgggacggagacgatgtttaagcaggagacgttcgccttcttgcatctcgtgggagtgtttgggctcgtggaggatgtgggcggtaccagcgaggtgcttgatcttgtcgtgtcgatctcaggtcgtgagcgcgccgttgatgcgttcgtcgtcctgggcctggacctcgaccagcatatgccaatcctcattcagaaaatggtaaacaaaaacaaacagctagaggcagtcaaattcattcaagctcttaatatagcgcacaaatacgctttgttgcctattatgagatcgtacattgatcatgccgcagttgctggtaagatgatccgcatcaggggagatgatcttgctactcagaatgcagctgatgcaaaagagcgcacacttattggaacattgcagaagttcattaaggaacagaagctagaagaactgcccatttttgaagaagctaacaagcgaatggcacatttggatcagcaaagtgctgagagaaaaagaactgctgctgcagcggctgcggctgctcgaaaggttagtaagaacattgaggagcagcagaaaaggatacaggagctgatgcagcctgctaagagaccaaggtctgagaatgtggtgaaaggatcttcgggccagaacgtgaactttgctggaacctctactcaacagtttaagccacaacagagcattcataaagctggagtgtcaaatcagtatcaagctgctttaacccagaatgtactgccagcaatcgctcagatttcacagctagttgctgggagccatcgtccagttggcatcccaaatcaggcccttgctgttccgcctcaatatggtagtggtagtgcaaattattatggagtgacgtccaccaggccatacaggcccatcactctacctcctggacctggtgctttgaatggtccaagtgcgcaggcatcttcaagatcaaggctctattctggagatccccttgcggctgtctcccgatcatcagataagaagggatcgtcttacaagtattctttgtccagtatgtcaacttatgatcgtaaatgaggatttgttttatctgccagtggacgaacctagtgaaccttgaaagtttgggtttcagaccagagatttggtccctccgtagatgttaagtcattgtagctaacaatgggccttttttacagtaaaggatgtgggtttgtatctagaagagattctcctacagagtctaataaatattgtaggaattctaacttataaggacaagttaggtgtaatggtgagagttatcttaccgagccaccagatcctaggtttgaagtagcctcttcctattttcattgggtcatgaatttgtagtatctgtatttgcagcggaaagcttaccttgtttt

SEQ ID NO: 14463 - DNA, 1701 bp, Zea mays
  Clone ID: LIB189-027-D7_FLI
ttccaggttaacgtctgagaatgcatctttgctgaagcgactggctgatatgactcagaaatacaaggacgcttccgttgacaataaaaatctaacacttgatgttgagactatgaggagaaaggttcgttcgtcttgaatgcatcacagacctttttcttctttttgttgtacgagagctcttaactgcatccatttatcgatcataacatttttactgggctctgcgtatactcaccgtaatcaacgtttacatctctctagatggctgcaaagggcagtgaaagtaatatgattgctcatagttcttattttagaacctgcaagtacagttttagtttctaatggtttttaactgcacccaaaaggtatggcagcattttcatttgattctctgacattctgcataccttctacaagtgtgataggaataatttagtttcttggtgataggaataatttagttccttggttttgttttcttgcagtatcatttcagatattttatttccttgtattatatatatatatattttaaagaataacagtgttctcttacaggtgtgaggagttgtaaaacgaaacaaaacattaaggggctgtttggtattatgcctaaactaccaactcccgccagacttttgctgccgcaggtgtggcggccgattcggccgccgcagcctaggcgcggcgtggcgtcgggcgtaagacaccaaactggccctaaaagcgcacataccatgccgcaatgcgccaagtgtgtgtcccattaagcctgtggggtgttgcccttgccttgccttgtggatgggctgctctatctcaaatgataccgagaggagtccaaacagaatactaccatacaaacatttcttaatgcttgtgtgtgagtatatgcacaactctgtactcttgtatcattagtaaaactgtgtttttttaaatatccatgctgaagggttctaacataatcatgttaagtttttatgaaaaaaatttgcttaaactatgactgttccaatcagttttttacctaaagaaggtattcacaagaatcttggcatttaacagacctgcacaccttgactttatgaaaagggacatgtcttcaggaacacagtactgttttaattccaggtgaacatagccgaggaagctgtcaggaggctaactgggatcaccctcatgctaccgaccgcttttgagaagcccacgagcagcgcgcccctgtcatcatgtccatctgatgcagcttctgcttctgcttctgccgccattgaagacagcgtgaagcatttcctccaggcgccacttgaaaacagtgggatcatcccaaacgcagcagtttttcagaccaagccagcttctctgcaccgtgttgctagcctggagaacctgcagaagaggatcgtcggggatgcaatgtattccgagaccgcgtcaacgacattctcagatcctgaagctcttgccgataggtaaaggttgctcctgtcctgtgatgaacagccgtgtgatgctctagcggcctaagtgcttctggtaatggaagttgtagcacccatgcgcctgggtggggtctacacagtgatttgtacactattttgaaggttaataataattgttgagaaatgatctcatccctttgtacctatataagtaaagtattccattaataaagagaatagagttttcactctt

SEQ ID NO: 14464 - DNA, 1914 bp, Zea mays
  Clone ID: LIB189-027-E2_FLI
tccctgcgggctgcggccctgccttttctcccattcccctcaccacgtgacacgcgctctctcccgagtcccgacgaccgggcaacagccgccgccgccactcagcctccgtcgccgtcgggcccttcgccggcggcgaacaccatcaggtgtacatgcgtacgcccatgcccttggctgcgcccgcccctgcaagtggtttcctgctggtctgtgtggatttggctgccggaagattgattgatgcggccttcaggatcactgtagactcgctgtgagattccaaggctgctcaggtcatgttgggggaccagtgcatcatacaggcgttagactcggttagctcatcaagctctgcccctgattcgaccctctccggagagcttccttctgtgagcaggaactgtgtgattgggaacctgcaggtggcgcgggcgcagaaggggggacatgtggagggtctggtgaattgttgtcatagcaagaagaagaagaagaataggactggcagtggtttgtgggattctgcaaccaaatcctgggcttctggcatggggggtgatgatgagaacagtgaggccaacatgagtgagctcatcggcgggatcggccgggagttggccatctcgtgcctgctccgtcttccccggtcatactattacgatgtggcatgtgttaaccggtctttctactcccttgtgaggtctgggaacctgtacaggctgaggcgggcggcggggattgccgagcagatgatctattgctcgtgcaacgttctcgagtgggaaggtttcgagccgtgccgccagcggtggttcggcatcccttccatgcctcccatagagtgcttcatgctcgctgacaaggaatccctggccgtgggcaccagtatccttgtcttcgggaagagggtggaagcccatgttgtgctgaggtatagccttctaactaactcctggaccacaggagagatgatgaacataccgaggtgcttgtttggctcggccagcttcggcaagaaggctattgtggctggtggtatcggccagagtggtccgttgagctcagccgagctttatgattctgagatgcagacatggactaccctaccgagcatgagcagggcgcgtcagatgtgctctggtttcttcatggacggcaagttctacgtcattggtgggaaagctgagaggcacaacgaggtccttagctgtgctgaggagtttgatttggagaacggctcctggcgcttgatcccggacatggcgcagggccttaatgggggaagcggtgctccgcctcttgttgctgttgtgaataatgagctttatgctgctgactatgcaaccaaggaggttaggaagtatgacaaggaaaataatgcctggatcactcttggactgttacctgggagatatacatcagttcatggctggggcattgcttttcgtagttgtggagatatgctcattgtaattggcgcgatgagttctggtggtagcggggtgattgaaatttgttcctgggtacccaataatgaactgccagattggaagatcattggcacccgccgttctggaagcttcgtgtacaattgtgccgtgatgagttgttgacataccagggctactacattatcaactgtacatcttgaccaaaaagaaggataaagaaggcaaattctgctgagtctgttttgctccttaatgggtaacttctgcccactggcattttaggctaagctgaaggtaagctatctaggaggacacaagttggatgataacccattgtcttcatgagcttataggtgtagtgattagtcatgtatatgtttagcatataataggtgattgtgtaatttagtttgtgtaatggtccattcaaacataacaaaattggtaggaggatgagcag

SEQ ID NO: 14465 - DNA, 723 bp, Zea mays
  Clone ID: LIB189-027-E8_FLI
gacagcctaaacatcaccgagcataatgacatccaagacaagatagcaatcaaccaaatcaatgctttccagctcattggaatgtcctcctgccttgatctatccggattttttgagaaagaggatgtttctgaaaggaaaatcagatttgcatcaaattattccccagcttatttatttgagaagattgagagcattgtcagaaaaatggggttccaggtacataagagcaacggcaagctaaaagtgatccaagactgcaagggactagcaaattcaagagggcaagagtcattattaatttctgctgaggtgtttgagatcaatgaatctctttatgttgtcgaactaaagaagtcatctggagactgctccctgtacagaaagttgtgtgagacgctctcagaggacttgggcacatgcaaaagccagcaatttttaaagcaggactctatcagacaagatataggtagatataatagtagcttttaacaaagagacacttactaaatagcctatagacacaaactaacacaaacaatatactgaatttaaaacagtatattgtccatgcacctattttaaatgtgctctcttatgccttttgtcatgaaacctcaagaatcttagtttatgacaaattggcatctgacgatgtattgagctcctaagggataatatgatgtaaacaagtaaactacacatataagagattcagagtta

SEQ ID NO: 14466 - DNA, 1047 bp, Zea mays
  Clone ID: LIB189-027-H6_FLI
cgctgtccccatgtcaggaggccctgctcttcttcggtcggttttaaggcctgtttggagaggagcctacggcgccgcagcccgccacacctgcggcggccgatttgggcgccacacccgcggcagccggagtgtggcgcggtgtggcgcccgagccagcccaccaaacaggcccttagatagccaaaacgcagtacacacagcgctgcttaccttgacgacgaccacttgtgttggagcagcagtcatctacagccaaaactcttcacttccttcgccattgccgtgttaccagcccagccagcgacgtgggcgtgccgcgacagggttttttccccctgggaaacgttgtgttctggcagatgccacaaaaggtaccttgggctcggcaaatcccttcaaccctgagcctctttcattcatccacgcaagtgacaaggccaagaaccactccagctcaatgatcctctagcatgcttatacttatggcaaaaaatgtaccggactatcgtgttcgacaaccatcacattttttttggagatgacatttcaaaaagaccaaaaactatgatctctcatgatccatctgctactctttgggtatcaatgcctcatcagcttatcgtttccttgcaccttccgtgcagctctctgcccacagcacgccttaaccagttgctaataagagagaagacagaaaaatatctcagacatcagaaggattggacttgaagtaacttggcatagaaacatcagttgcctactaatctatataagtagctaaaaacatcttgccgacttagattctgttctttagttcagatatgccacatgcccacaggacaacacacactacaaacagtgtcacggtgcccaaacaaactgctaaatcatgcccatttcctggtggaaatcctggtatcgcgctattgctgtgtttaccaacaaaattagcatggctttatagtatatctagcagcgacacggttttagtgcagcggctggtagccaattttgtctatctatcacatgaacacttgtgttagg

SEQ ID NO: 14467 - DNA, 428 bp, Zea mays
  Clone ID: LIB189-028-A11_FLI
gctagctactaccttattacctctctccggtctccgcagctgtaggcggcggcggccatggacttcgtgctccaggtcctgctgcgagtggtgatgagaagaagcatccgcaggctgcaagaggtcgttgacatcgccgtggacatcggcacggctgtcttcgtggccgtgcgggtctccggcctcgtcttccgccgccggctgcccacgccgactacgacatcgtcgtcgtcgacgacgtactactactccccggggacgtcctcctcgatcggcatgcatgtccaggaggattaattattggcaggcactagatgagctagctagctagctagggccagaagatgtatacttctcgcgggggggcatgtaagtaccaaggtcatatatctgtgcgttcttttttgtggaatcaaactaatttcgct

SEQ ID NO: 14468 - DNA, 236 bp, Zea mays
  Clone ID: LIB189-028-A6_FLI
atgattaagataggagattattgttgaggagagagatcgattattattattgctgctagtgcatatgtttagtgggtgtataggttgggaacacacattcatggaggatggaaccacacaccgatcaattggagggagaaagagattgttcgggtaattaattgtaatatatatagagagagacaattgagccacatacatatataagctattagtgcagtgcttgctgttgggtc

SEQ ID NO: 14469 - DNA, 1016 bp, Zea mays
  Clone ID: LIB189-028-B1_FLI
gtcaagatggttggtgggaccctggcagagcagacgtatttgttccttggtgctggggaggctggaactggtattgcagaacttattgctcttgagatttcgaaacagacgaatgctccaattgaagagtgccgcaagaaggtttggctggtggactcaaagggtttgattgttgactctcgtaaaggctcccttcagccattcaagaaaccttgggcgcatgagcacgagcccttgaaaaccttgtatgatgctgttcagtccatcaaacctacagttctgatcgggacatctggagttggaagaacattcacaaaagaaatcattgaggccatgtcttccttcaacgagaggcctatcatcttttcactgtcaaacccaacctcgcattctgaatgcactgctgaacaagcatatacatggagtcagggccgttcaatctttgccagtggcagtccatttgcccccgtggagtacgaaggaaagacttttgtgcctgggcagtcgaacaatgcctacattttccctggactcggcctcggtcttgtgatctctggagccgtccgtgtccacgaggacatgcttctcgccgcctcgaaagcgctagctgatcaggccacacaggacaacttcgagaagggctccatcttcccacccttcaccagcatcagaaagatctctgcgcacatcgctgcagccgtggctgcaaaagcctacgagctcggtctggcgacccgtctgcctccccccagcgacctggtgaaatatgcagagaactgcatgtacactcccgtctaccgcaactaccggtagtgctgcggggatcaattttgcagtaataaaaaatctatcaacgcggatggtactctgttgtttatagtccctgctgctaaccacccttgttgctggtgctgctggagaggcattgtacctgtccatgcatatatgatatatatatgttgtaacgttgtgaaagcaaacaatcttgggtaccaatgtttgttattctttcgctc

SEQ ID NO: 14470 - DNA, 561 bp, Zea mays
  Clone ID: LIB189-028-B11_FLI
ggattaagccgaaagatcaaaatgacgcatcaattgtcacaaaaactaatttcaagcatctgtattggacgctgacacagcagctagcacaccacaccatcaacggatgcaacatgaggccgggggatatatttgcgactggcacactgagtggacctgaacgggactccctcgggtgtctgctggagctgacatggaacgggcagaaggagataccggtggggaatttgacccgcaagttcctagaagatggagatgaagtcatcttgacaggatgttgcaagggtgaaggctacaacattggttttggaacctgcaccgggaaggttctgccggcacttccctgagccaacacgtcttggcatcagttctccggagtctcaacgatctcagctatcagagagttgtctcaacggtctcaactatcaaagagttcatgccgctatctagcaaggctgctatgtaactgaacaatatgaatatgggttgttttcctgggctgttgaagatgaggagactgatgctctgctgtgcaataaaatcgcttcaccattttatacg

SEQ ID NO: 14471 - DNA, 758 bp, Zea mays
  Clone ID: LIB189-028-C10_FLI
ccatggcctcaccgccgcctcccccaccgtcgtccgagctgggctctcctcctgtgaaccaccaaccccgcagcagcacgcaaaacgcctccttgccatagcgcctcacgaaagcatcgcagcagctagggaggaggagagccacttgcgtcaagagctcgctgcagcgggcaataataacgaggccggcggcggcaggacgaggacgtgcgcgctgccgacgtgggcgctcatcggcggcatcacggtgggcgtgaccgtggcgctggccctgtccgcggggccaggccccgccctggcgctggggccagagggccccctggtggaggagttctgggacaacatgcggcggtacgcgctgtacgttgtgacggtgagcacaggggtggcgtacacggtgctgcagcccatagtggagctgctcaagaaccccgtcacggcgctgctcatcgtggccgtcatcgccggcagcggcttcctcgtctcgcaggtgctcaatgccatggtcggcaactccgacttcatctacaggtacgagtaggtggatggcgagcgtgtggtggcgctgaggtctttgcgtgaccgagaatggagagaggtgaacgtgtgctttagtgtgtcaatgaaccaggagctagaacaggaatgtctgaaattgaagtttgctgtctggatgtattttactctgtctgatatttactttgaccaacaggctatgctatgcatgagtgaaagaacgtggacgtcttctagtacct

SEQ ID NO: 14472 - DNA, 464 bp, Zea mays
  Clone ID: LIB189-028-C12_FLI
gtgacgaggaggagctccagaaggagaacatcaagaacgccgcctcctccaccggcaacatcacgttgagcgtcaccaagagcaacccggagaccggcgaggtcatcggcgtcttcgagagcgtgcagccgtccgacaccgacctcggggccaaggcgcccaaggatgtcaagatccagggggtctggtacgctcagctcgagtgattcgagtgtctaactgctaggtgtccgaccgtcctcatggatcttgggaaggtgtacgtaccatggaaaactttggagagcagaggaggaatcgtgtacgtaatgtacttgttaatgcaaattcgggctgtcgcttttttattttcagtttgggtttcttctctttcttgtgttctcaagaactacatcccctgtgcaaaacacaaagagaggttgtttgataccagagatgaattgttagttataaaaaaatgtcat

SEQ ID NO: 14473 - DNA, 1662 bp, Zea mays
  Clone ID: LIB189-028-F5_FLI
agcctaaatttcaatgtgtcgtctgctttaaaaaatttaaagtcaaaagcaatttaaaagcccatttagccgttcatggattagcttcttattctttttgattcctaattttttaaaaaattatgttcctgacattttgcttccgtttactccgaaataagcaaaaaaatttttcgtcccaagggtctaatttacgaaaaaaccaaattttatcgtccaatgtatataaagactgtaaataaaaaacattttttaatgaatttgtttaaaaaatacattttttctaacattgtaaataaaccatattttccttcctccctttccttatttgtttatctttattattatttttttttattatttattattttttttaggtctctttgtatgccctcagtgtggaaggtcttatcgaaagttgggcactttgagccgccatgttaaattcgaatgtgggcgcgaacgtcaatttaaatgccacatatgttctaagccttttcacaggagagacgtacttaagcgtcatatggtcatacacagcataaatatttttccttagtttttgttttttttttctgttatattttttctgtatattttatttctattatattttatttttatttattttgttttctaatctatttttgactcctcacttttttcggagactgtcgacctgagaatccatggaaatatggggaaagccccccgcctaggtccctccctgttacaacaaaatagggctttcgcttttatgtcgctgtactcatgattttataacctgaaaattttgtttctttttttattgatctatgttgtttttagggttttattgtgaatgcggtaaaagatatttacgtttgaacacgttgaaccgtcacaggcggtacgagtgtgggaaagaaagacgtttcatatgtactttttgtaataaagcttttaaaagaaaggaccacctacaggtccacctgttatccgctcgtcattaaatatcaagtaagcgttgtttttcttgatgggcccatggcgggggctttaccgttaggccaaaaggttattccattttttttctgttatgtttttgttttaaatcaaatatttgacatttttcttttgtttttagttaagccaccatttctgtgtgtctgcgggaggaaatatcaccatctcggcaatttgactcgccataaaaaattcgagtgcggtcaagaaaaacgtttcgtctgctcaacctgtgggaaagcctttaaaagaaaagaccaacttactgcccactctattcaacactatcctcaccaataaattattttgaacattttcattttttttaaaccctctcattttttccattgattttcagcaaacaaaaattagttttaattaaaattttgtttttaatttttttccttctttttttatagatgggttattcatgtgcttccgttgtggtaaaaagttgaagaacagcaccgtcctttaccatcatgttaactacacttgtggtgtcgagccgaaatttcgatgtgaagtttgcagcaaaatgtttaaaaggaagacaaatcttaaatctcattatattgccatacatggacaagatacttaaattgtccagataattaattaattattggtttaattaaataataaataattattttt

SEQ ID NO: 14474 - DNA, 899 bp, Zea mays
  Clone ID: LIB189-028-H1_FLI
ccaagaaccaaaggtagctagctagccgcgactcgttggctagacgattcaagcagcagcgcaggatggtggcgccggtggtgattgcgtcggccgggctgggcatgctggccggcgtggcgatggccaaccggtccctcgggaacgggctcccggcggcctccaggtgggacgcgcgcccgcgctgcgccacgtgcggcggctccggccgcgtggagtgcatctgcaaccgctggtccgacggcgactccggctgccggacctgcgctgggtcggggaggatgccctgccgcagctgcggcggctccggcacgggccgaccgctccctgcacggctcaccgtccagcaccagaagccgccgccgccgccgccgcccggctacaactgatcgatggtggatgattaggtatccgtatccgtggattatatacttctcgcgggcgatttgcgatgcgacccatacaagaaagaaatcagttaaactgcgatatgatgcgctctagctagttaatcatatatacatatatacacgtccgatccattcgtgtggatgacatccatgttgcatatgtacaagtacatgtctcttcttcaagagtcaagactagctgtaattgagctgagcatacttggtgttgctgttgttcagttaatttgcaaaaacgcacaacacaagaaagaaggagaaaaaaaaacagagtggaaatgttttttttttaagatctggagaacaacatgattgagaagggagggaaggtgattctgagcacagttttgttggaaaggctgtagttaattctggtggatgtaatatattatatgtatgtatatgcttagattcgttaatatatatgcatatatatgcacccacatgaatatgatttacagagattatatt

SEQ ID NO: 14475 - DNA, 808 bp, Zea mays
  Clone ID: LIB189-028-H2_FLI
ttcccgtccgccgcctccacctccgccccttcccgcgtctcggccagcagccaccgcggtcagcggcactccagggccgccaccgtcagatgttccagcacgtcgcccaacgtgtcccagggcgcgccggcgccggcgccgcccaagccgcaaatcgagctcgagttcgtcgggccgaagcccggtgccgacggctccttcccggtggaccgggcggaggcggccagcggcgagaagctcctccgtgacgtcatgaacgagaacaagatcgagctctacgccgcatacggcaaggtgatgaactgcggtggcggcggaagttgcggcacttgcatcgtcgagataatcgatggaaaggagctcctgaatgagaggacgaacaccgagaatcggtacctgaagaagaaaccagactcatggaggctagcttgccagactattgtaggcaacaaagagaactctggcaaggttgtcgtccaacggctgccccagtggaagagatgaccgtgcagtgcagtgcagcaccacgttggtggatgatcgatcgtccagttgtatgtgactaaaacgccatgccctgtgcattagagaagagacagaatcgcctcgtcatatcgcttgtgaccagttctatcatctatgatactagtttgcaagtgtgggcttcggtccacagtatatatgtgggatatatatctgtaaacaaaaaaacaagcttgggcttcggtccacagtgtataagctgttttcacaaatggagaccagagtactccggtcagtccggtgtatgttggtagttttctgaaag

SEQ ID NO: 14476 - DNA, 680 bp, Zea mays
  Clone ID: LIB189-028-H7_FLI
cactcatcgatctacacacatacatagtttcttctactacacgacgacaaacatggggaagcctgcgaagatcggagagtggggtggatacgccggcgatcgtcgggatctgagggctactccggaccggctgatcgaggtgaaggtcacggcggacaacagcagctgcatccgctccatctccttcatctacatcggagccgatggcaaaccgtacgaggaggggccatggggtttcggccatgctggcacggagtacaagattgatctgtgcaggttcgacgagagcttgacggagatctccgggaccacgggcccagcctacaacattgacaatctggtcaagtctctcaaattcgtcaccaacaaacgcgcttacggaccgtacggcagggacgagggcaccccgttccgtgtcaaggtgatgaacaacggccacgtcgctggcttctttggccgctctggagattgcctggacgcgatcgggctctacgtgaaccccaactaataactaaaacgatggatcggatcatctgcatgcatgcatatgcagtatgcatgctgcttgcctgcctgtaacgaatatgaatgcataaaataacgcccctgctgctcccatgcatcagcagtgtgtacactatgttatatatatatatatatactgtatttcgctgccgaat

SEQ ID NO: 14477 - DNA, 881 bp, Zea mays
  Clone ID: LIB189-029-A3_FLI
ggcttgggttgtgaggatgctcttgttcatctgcttaactatgtttggcccaacatatttgagacatctccccacgttataaatgctgtcatggaggcaattgaggggatgagggtcgcactaggtgcggctgtgattttaaattattgcctgcaaggtctcttccatccagcaaggaaagtacgagaagtgtattggaagatatacaactctttgtacatcggcgcgcaggatgcacttgttgcttcttatcctgccctggaagacgatggggataacatctttagtcgtccagagttggcaatgtttgtctgattaacgctggatgtgcatgtccatgtgtcttcatccatattcttatgaagcttgaactgggtggtactctgagttagagctttgtattttacttggtgacacctcttgtgatgcatgtaattgaagttgcatctatttttttgtatttgcaggattgttccttctgaagggggtgcaatgtttaggaattttttttcctggtttactataatgcaactcaaaatctctatcatagtctggtcttactaacgatttgggaactgttttgttttcagggtacctcatgttgcagctgctgaagcgttacactggatttaggaccaatcctaaggctgcagcatgccaattaatccatcaagatcctatattgtgaaggacaaatgacaatcctagcgcgctgtcatctttttatgaatattaggcgttgggcatttaccgtgttttaaaactttgtattacacatggatgttgtattatgtggtgtggacaatggaacgttgcaagctgacctgaacctgattccttactgtattactgagatgttgatatgcatgtcatgttagtgt

SEQ ID NO: 14478 - DNA, 957 bp, Zea mays
  Clone ID: LIB189-029-C3_FLI
ggagtagttaaacctacaatagcacctatatgggcacgggagttaataccaaacccacctaaaatgcctcctgggccaccaccatccttcgagtgcttcgggttcaaacattttgttatggatgtggcagttaacaatattgcacatgtcaagagtgaatactttcaaaccaatggacactattgctctacatttgatgttgccattgccaaggtttggcaagctaggacaagggcaatcaagtacgaaccaaatttcaaggtgcatgtttgcttctttgccaacactcgccacctcctcacacatgtgctacccaaggttggtggcttctatggaaattgcttctatccagtgactgtcacagcaactgctgaggtagttgctagttcaagattgcttgatgtgattaggatgataagggatgggaaggctaggtttcctttagagttttccagatggtccacgggcaatgtgaaagtagacccatatcaactaacattcaagcacaatgttctatttgtgtccgattggacacggcttggattctttgaagttgactatgggtggggtgtaccaaaccatatcctccctttcacttatgcagactacatggctgtagcagtttttggagctccaccgtctatgaagaaggggactcgaataatgacacaatgtgtcgaggaggagcatctcgtggacttcaaggccgagatgaaagccttcttttaggtcctcggattttacttgaaagttcaaacattatgcatttatgtgttcaattcaaataaaaatggtgttgacttgtacccttattagccatataaaacataacatttatattttcatagattttccacgaaatatatatgtagaaaccagtgacccatggaaaccatgtacaatagttatgttttagttttttatcgtgtttatggtatgaaagtacatgtagtctat

SEQ ID NO: 14479 - DNA, 653 bp, Zea mays
  Clone ID: LIB189-029-C6_FLI
aaagttatggcgatggaatcccaagcggaggcactcggccaattagcaactgacgatctagaaggaaagtttgcactgctcgagaattcatctgtcgatgatgatctttcacagctgaaaaaagaactctcgggaagctctttgaaaggggagctcccatcaggcagaagagcggccagcaactcaggcgccgggcgccctttccccgacctagagattgagagcgagctaaacgagctgcggaggaaggccaaagaatactagagagtagagactctccaccaaccatctttcccgggcctgacagaatctctcatttccaagtacatatagcacagctgcagatttgctccatcgcgccttggaaagttggaacagaggtgcgcctttgactgtcactgtcaaagggtatatggagtcgccgagtttctcggcattttcccgtcgacggacatttgtacagctagccataaattgttgtaaatcactacgctccctagagcccttttttttgcgtactacgtatatagtcaaagtttgaagtttccgcgtcgtggtttttacccccattttttccgtgccataacatgtgttttgtgactggagacttgggatcctcagccaggtcgatcaaatactccctttttttcttt

SEQ ID NO: 14480 - DNA, 840 bp, Zea mays
  Clone ID: LIB189-029-D1_FLI
ggagggcgggcgggctggtggttcgggcggagatgtttggcagctcaccaccggcctcgagtccgcctggaacaagctgaggggagtcgatgtattgacaaaggaaaacatagctgaaccaatgcgggatatcagaagagcacttttggaggccgatgtaagtttgccagtagtaagaagatttattgagtctgtaagtgaaaaggctgtaggcactgatgtgatccgaggtgtccgacctgaccagcagttggtgaaggttgtgagtgatgaactggtacaactgatgggcggggaggtatcagatttggtgtttgcaaaatctggaccaactattatattattggcaggtctgcaaggtgttggaaaaactactgtttgtgcgaagcttgccttctatctcaaaaaactgggcaagagctgtatgctagttgctgcagatgtttacaggcctgctgctattgatcaactcactattctgggtaaaaaggttggtgtaccagtttactcagaaggaactgaagcaaaaccttcacaaatagccaaaaacggcttgaaggaggcaaaagtcaataaggctgatgtaattatagtggacacggctggaagactgcaggtcatacacatgttgcttcgatatttgttccattgatctgtttcatctgtgagtataaatgataaagggcaactatgtaagatcttggatccaggtcataatcatactgaaatttgaaaatgttaggctgtactttacatatgtggttaaattgcactatttgttttcgtgtaaggaatcaagttggtggcaacatgaaaaatggtctgaaatgttgactttga

SEQ ID NO: 14481 - DNA, 537 bp, Zea mays
  Clone ID: LIB189-029-F11_FLI
cgcaaccctgatgtatgggacgaccctcttcgcttcgaccccgaacgccacatccctttgagccccgagatggaggtctcactcgttgagcgtgatctacggtttatctccttcagcactggtcgtcgcggctgcatcgctgcagctcttggcactgatatgaccatcatgctcttcgctaggctcctgcaggggttctcttggagcaagatgaccggggtggcggccatcgaccttagcgagtccaggcacaacactttcatggcacggccactcgtgctacaggctaagccacggcttccagcgcacctctaccccgggatcttgctttgtaagtagtcccaaataacggctgagcatgtagaaaatttcaccacttatacatgcttaaaatcgaggaatgagagaaagcgcgagaggaatagaaaaatagatgtgtactgctggttttctgaacggttatatttaagatgtaatgaatactattcatcgcctgaaaaaaaatctgtaaatcaggcatctgaaaaatagcagctc

SEQ ID NO: 14482 - DNA, 1188 bp, Zea mays
  Clone ID: LIB189-029-G7_FLI
gcgctgtccgctagaccccgcccgaatcaatggagattagggctccgccgacgagcctgaggctcgcgccgccgcccgcctccgccagcttccgccgaaccccgcttaggacctccttccttcgcggcagcgtgtcacttaaagttgtgcaagtacggcagtcaaatgtcaacagatttaagtgcaatagcatacgaagtaacctctttgataggctaacaagggttgtcaggtcctacgcaaatgcagttctaagttcgtttgaagaccctgagaagattctagaccaggcagttctggagatgaatgatgacttgacaaagatgcggcaggccactgcacaggtcttggcatctcaaaagcggcttgagaataaatctaaagctgcagaacaagcttctgctgattggtatcggagggctcaacttgctcttcaaaagggtgacgaggatcttgctcgtgaagcccttaagcggcgtaaatcatatgctgacaatgcaagctccttaagatcccagcttgatcagcagaagggtgtagttgaaaatctgatttcaaatacccggcttcttgagagcaagatatcagaggccaagcagaaaaaggataccctaaaagctcgtgctcaatcagcaaagactgctacaaaagtgagtgaaatgttgggcaacgtgaatacaagtagcgccctttctgcatttgagaaaatggaggaaaaagttatggcgatggaatcccaagcagaggcactcggccagttagcaactgatgatttagaaggaaagtttgcactgcttgagacttcatctgttgatgatgatctttcacaactgaaaaaggaattgtctggaagctctttgaaaggagagcttcctccaggcagaacagcagtcagcaactcaggtgctgggcgccctttccccgacctagagattgaaagcgagctaaacgagctgcggaggaaagccaaggaatattaggctcattccttgtcgattcagcaggcctgacggaatctcacttccaagaaaatatagtgcagctgcagattgctccattgcgcgtttcgaaagttgaaacacaagtgcgcattgactgtttgttaaagagtatggaatcggctaatttctcggcattttcccccctcgagtgacatttgtacagctatccataaaattgttgtaaatc

SEQ ID NO: 14483 - DNA, 1370 bp, Zea mays
  Clone ID: LIB189-029-H10_FLI
gcttccgggctccggcttcttctcctcgccgtcgcgtgagactgcgctaaaacctaggctttgagacaccaatggcctccgcgacggcgacggcgcccacattcgctctcgcatcgtccttctcgcgcggcggcttccttccgctccctcgtcgcgccggccggcccatgcttcagtctctgcggctcgtcgcgtcagccgtgaagcggcggcgcggcgcggtcgtggtggcagcggacgcggcggcggcggccgggagcgcggagttcggcgacgaggagaacccgtatgagcttctgggcatcaggccgcttgatagcttcgatcacatgaaaatggcctacaagaagaagcgcaaggacgccgaggagactggagacgacgagttccttgccaagttggacagggcctatgacactgtcatgatgcagcagctgcagtatcggaagaagggagtcacatacgggtctgttcaggtgtccaaggatatcaagtatgctgacaatcaaccagtggtgccttggggaccaagattctcccgatcaacaatgaaggacatgcgcataaatatggcagtatcagcagcatttgttgtttggatagctattatgggcaatgcagactggaagcctttgcagttcctatgttttgctttcttctacagaatactacagaagctaagagctactgaaccaccaattactccaatatacaatgaatatggtgaggtcgaaggacgagggataagaatggcaaaaagagtagtccgtgctttgggtttgatatttggatgtgtgttcgctgcatccctgggttatacagcagctattaacttgatcgagctttcaatgcagtacactccccgccttgtttattactaccaggagctgattgttacggcggctacctccgttcttctgtgcatcacagcctcatactaccgatgaacacgacgacgagcagtgatggcctggctgaggcgattgtgagatagccgagaatccacaaattttgtagcatacttccaccagcacctgtcagctttgaggcagagagttcttagtgcaggatcatacatgaccacttgtggcacaatgcagatgaccaatggatgaaaaacattttgcgtgaatacttcaacagcagtgttgtgtgtgtgcaatttttaattaggtcttggacatgtttagacaacagggttagctgcaatgtgcatgtgctttgttttgcctcgatcaacgaatgaatgaaagtactagctgctgcttctttgttaagctgcctctccggagcggagctcccatttgtcggacacacaatgctgctccatttgtatacgaacctgccaatgtgaactttaaacttgtgtc

SEQ ID NO: 14484 - DNA, 872 bp, Zea mays
  Clone ID: LIB189-030-E11_FLI
ccacgaaggagaacatccggatggcgatgcactggctggtgcagggctgcagctacggcgactccctggtgttccacttctcgggcatcggcgcgcaggtggcggacgacgacggcgacgaggcggacgggtacgacgaggccatctgcccgctggacgcgttccagagcgggcccatcctggacgacgagatcaacgaggtcatcgtgcgcccgctggtgcacggcgccaggctgcacgccgtggtggacgcctgctacagcgccacggtcctggacctcccctacctgtgccgcatgtccaggaacgggttctggcagtgggaggacgagtgcccgccgtcgggcgcctggaagggcaccagcggaggccacgccgtgctcatcagcggatacagcgagggcaaaggcaacttcgccatgatgcccgacgcccacgcgtcggtcgtcggggccatgacgcacagcttcgtccggacgctggagtgccagccgcgcggggtcacctacggccacctgctcagctccatgagggccatcatgaagaaccgcggcgggggctgcgatctgcagggggccatcggcgcacccatccgcaccgtcgccaacttcagcggcgtgcaggagcctaacctgtcctcttcggagacgtttgacatttaccgcaagcagttcgtcctgtagacaccacgccacaccagtgtttgccccgccggccgcttgtaatgaattgccgtcgtagtatcagaataatcaattatctatcggccatgatatgatatgatatatcaagaaagaaggaactaatacctagagtacttcgttcatctgtattagcagtgaacctctcaatgaaataactaagcatgttca

SEQ ID NO: 14485 - DNA, 1102 bp, Zea mays
  Clone ID: LIB189-030-E4_FLI
cgaggacccggcggcgggggcgagcggcagcaagtggcggctggcgacgctgacggacgtggaggaggtgaagacggtggcgcggatgctgccgatctgggcgaccacgatcatgttctggacggtgtacgcgcagatgaccaccttctcggtgtcgcaggccaccaccatggaccgccgcgtcgggggctcgttccagatccccgcgggctccctcaccgtcttcttcgtcggctccatcctgctcaccgtgcccgtctacgaccgcctcgtggtgcccgtcgcgcgccgcgtcagcggcaacccgcacggcctcaccccgctgcagcggatcgccgtcggcctcgcgctctccgtcgtcgccatggcgggcgccgcgctcacggaggtccgccgcctccgcgtcgcgcgcgagtcctccgagtccgcctccggaggcgtcgtgcccatgtcggtgttctggctcatcccgcagttcttcctcgtgggggcgggcgaggcgttcacgtacatcggccagctcgacttcttcctgcgcgagtgccccaaggggatgaagaccatgagcacggggctgttcctcagcaccctgtcgctgggattcttcgtcagctccgcgctcgtcgccgccgtgcacagggtcacgggcgaccgccacccctggatcgccaacgacctcaacaagggccgcctcgacaacttctactggctgctcgccgccgtctgcctcgccaacctactagtctacctcgtcgccgcccgctggtacaagtacaaggcgggccgccccggcgccgacggcagcgtcaacggcgtcgagatggccgacgagcccacgctccactgatccatccatgttcgatcgatcgacgaggcacgcgacggacgaccctaaattgaaccctatacaccgagcttaattatatatccgtccgatcgtcgtcggtcagattcattgctagctccgcgtgttgtaccatcgtgtcagtcagtgtatacgagtgtgtatcttttgtatccaagtacagcacgcgcgcgtgcgtaagcgtgtagttataaaaattaataacatgtttcttagaggagtgaggggggaattgtt

SEQ ID NO: 14486 - DNA, 581 bp, Zea mays
  Clone ID: LIB189-030-F9_FLI
gcgacgcgcagtcgcccattccgcatctcgccctcccgtcctgtcccgtccgtccgttctccgattggccgccgcccgcctcgccctcgtcaacaaaagcccaccgcaagcgagcgagcgagccaccctccccgccgccgccaccgcccccgtcccgcccccaccccgactcctcctgaccgccggcgtggggtgcccgggctccacctccggcgacgacaccctccccgccgcgcgcgcccccaccgcctgctccgtttgcgggggtagccggggctccggcctcggcggctttcaaagccccctccctcacaacaggatccaaaatcccgtcctagacttcttctacctccccttccagaacttcctcttttggcatcccggacggtcgatctcgacccccttcgatttcgattcatctcttcttatcgattgatctttcttctagcttatttcgtatactgtcattttgattccttccttcttcccgccgccggtagctaatcccaaatcccaatcgaatcgactcccccctgttcgtcggattctcttcctccgtccgcacccagctaacgccaccg

SEQ ID NO: 14487 - DNA, 1209 bp, Zea mays
  Clone ID: LIB189-030-G11_FLI
agtcaccacagaatcaaagaaaagctttcccccgatcctctcgcggacaccagcgatgggttcccgctacgaggtggaggtcaccgtcggctccgcccgggacctcaagaacgtcaactggcgcaacggcgacctcaagccctacgccgtggtgtggatcgactccggcagcaagtgctcgacccgcgtcgacctcgacaacggcgagagcccggcgtgggacgagaagctgctcgtcccgctcccgcccacctcccgcctcgacgacgccgtcctctacgtcgacgtcgtccacgccaacgccgcccagggcgtcaagccgctcgtcggctccgcgcgcctcccgctccgcgacgtcctcgacgacgccggggtcgggggcaaggcctcgcgcagcctccgcctcaagcgcccctcgggccgcccccacggccgcctcgacgtccgcgtcgccgtcaaggagccgtccaggtactacgaccccaacccctacccggcccccgcggcctacgccaacacgggcggcggcacccgtgacccctacggctcgtccgctgctgctgccggcggctactacggctccggaggcggatacggttccggtggtggcgcctacggtggcggcgcctacggcgccgcgcagccctacaccgcagcgcccccggcggggtacccttccacctacggcgccgcgccgccgcctcagccagcggcagcgtacggcgctcctcctgccgctgcatacggcgctcctcctgtcgccgccaccgccgcgtacggaaccggcgccgttgcttccgacgggaagaagaagaacaagatggggatggggacggggctggcagtgggcgcggcggcgggcgtgctcggagggctggcgctggccggcggggcgagctacctggaggacaagttcgaggagcgcgtgtcggagcgggtggaggacaacctggagagggaggagtcgtacggcggcggcggcggcggctacgggggtggctacgacgactatggcggcaacgacgactatggcggcgacgacgactactgatgggtcctgatcctccgatcgtttgcccggctgctacgcttgccatccacctccaccttcgtctcgctgtcctagatgtttgctgtatgaatcgcatagtagatcatgttctctattcctgccttcagtttcttttctcagttgtggtttatcgcggc

SEQ ID NO: 14488 - DNA, 1696 bp, Zea mays
  Clone ID: LIB189-030-G4_FLI
acaagcaccagtttggctcgtctcggcctcggcgcgtgcccccgacccgttgctgaccccgctccccggtgatctgatgtcggcggcggcacgcgcgccaccgccgccgcgcgcactctacgcgccgtcgagaagagtccctttcggtgccgtgatcctatccgcgccgcgacccggggctagggttcgcgcggcgcggcctcgcgaggggaatgttcataaccattgcctgttgacatcgtctagtctgaattcaaattctttgctatgtcctccatgcaattgtgctcaaatggctttggccgacacaagaattgcttaccagcctgaagttgacaagcatgctggagttctggtatggaagctttgatactatttttgcatgggatgagtcctcttctcttgtcctgacaaatgttttgtattcatctgcaggcctatgaactggttcaagggaatcttgttcagtggaattcatttatggacaaatcaatacctgatccaccaacagctgttcttcttcatggcatccttggaagcaggaaaaactggggatcttttgcgaagagattggctcaggaattcccaatgtggcagttcctcttggttgatttgcgctgccatggcgactcaacatcaattaagaagagtggaccacacactgttgcctcaactgctcttgatgttctaaagctgataatgcagctcaggctaacccctcgggttttggttggtcacagctttggtggaaaagtggccttgagtatggtagaacaagctgcaaaaccacttgctcgtcctgttagagtatgggttcttgatgctactcctggcaaagttcgggccgggggagatggtgaagatcaccctgctgaacttattgaatttctcagaagaatgcctgagcaggtttcttcaaaacaggaggttgttgatgctcttgttaaaggacaattttctatggacgttgcacggtgggtggctacaaatctacgtcgaaccagtccattgggtcagcgaccatcttcaagcttctcatggacttttgatctaaatggcatctctgagatgtacaagtcttatgaggatactaacttatggaggattgtagagaatgtaccaaggggtgttcatattaattttctaaaagctgaacgaagtttgcatagatgggctctcgaagacctccaaagaatttatactgcggaggaattagctgcagatgagggtggaggagttgaaatgcacgtgcttgaagatgctggacactgggttcatgcagacaacccagacggtctctttagaattctttcgtcaacctttcgaatcgaaactactataagaggaatgcaggactgaggatcaaacctttatcgatccaatgacaatagaggggaggcatttctgaatcgattctactgtaagaggaatgcaagaggatcaaaccttaattgacaatctgagaggaggcgctgacactatcagaagatgtgtacattacaagcagggaggtggagccagcatttttctgaatgataggcgtctttgttcatttggtcaatccttcttttcttttttacaaaaaaagagtacgtaacatgagttatacaactaggctgttcttcgagaaacaacctgtaactgtctgtcatatacttgacgaatgaaaagcgttttcgtacctgttttagcctgg

SEQ ID NO: 14489 - DNA, 796 bp, Zea mays
  Clone ID: LIB189-031-B2_FLI
cggtgtaccactgggaaattgttctctctgggatctgtaattttttcccccttcctgtgcgcgcatgtcatgtgcagggctggtgcagacctgggcggcggtgatcatgggcgtgttcgcgggcagcgtgccgtggttcaccatgatgatcctgcacaagaaggtggcgctgctgacgagggtggacgacacgctgggcgtcttccacacgcacgccgtcgcgggcctgctgggcggcgtcctcacggggctgctggccacgccggagctgctggagatcgagtcccccgtgccgggcctccgcggcgcgttctacggcggagggatccgccaggtcggcaagcagctggcgggggccgccttcgtggtggcgtggaacgtcgtggtcacgtcgctcatcctgctggccatcggcctgctggtgcccctgcggatgcccgaggaccagctcatgatcggcgacgacgccgcgcacggggaggaggcctacgcgctctggggcgacggggagaagttcgatgccaccaggcacgacgcggtcagggtcgccggcgtcatggatagagaagggtccgcggagcagcggctatcagggggcgtcaccattcagctgtaggcgcacgcccgacggtccataagacacgactttttagcggacatttttttttcatgggagaagagcagtgttttaggctttttattattagcatgaaaggttgtccatgtatcatatttggcccagagcacgtagtctctgctagtttataaagaaattaggtcatgtatttttcctctt

SEQ ID NO: 14490 - DNA, 964 bp, Zea mays
  Clone ID: LIB189-031-C4_FLI
tgatgaagtcatgcgagcagcgggggagggacctcctgaaccagaacgtgataacggccgcggggctggcggagtggctgaggggggcgaaggagggcgggcaccacgagaccgtgagcctgggcctgccgtcctactcgctgctgtgcaccgtgctgcagtcgatcagggccgggtccgggggcctggtgctgggcagcttcgaggtgaaccagcacaaccggccgcaggaccggctgctggactggttcttccaccccgtgctggtgctcaaggagcagatacaggcgctgaggatgaccgaggaggaggtcaggttcctggagaagctgaccgtcttcgccggcaacgtcgcgggcgctggcgctggcgggtgggagaacggcgccgggatgatggtggtgccccaggaccctgtgaggctggcgcagatccaggccataagtagaaggctggttgggattgtgaggagcctgtccaagttcccgacgtacaggaggaggtacaggcacgtcgtgaagctgctcatcgcctactccgtcgagagggagagctcgggcaggtcgtcggcttcagggcgctcggcctcctactttgagataacacagctggacgtgtagtatagtttgggaagcgttctccgattgtaattaagctgttaatttctaggatcaggtagtagctgtcagtgccttcgtgtgtttgaagcctagctggtgaggtttttgtagaacactagtgcatggttacaggagaaaggcgctccattgcagatgctgatcaggcgcgttcacgtgccaaaagcttcagacaattgtacacattctcttttgttctgtatatagcctgtaggttcaatgcacatgtgttgttcttttctctctccctctcttccaaagctggagccttttgtgacacggccatcccctacaattttagcttgttgatttttttttcaccaacc

SEQ ID NO: 14491 - DNA, 1593 bp, Zea mays
  Clone ID: LIB189-031-E9_FLI
ggaatgcctgagggaggcaaagagtaacgggattatcaatggtggcaatgtggagagcgagctctccaagcggtggagagcacagaggatggatgagcttgatgtcttgagccggaggctgaggttgctcgtcgagtatgctgcagcggctgggcattgaagcttagattttggtggttttggtgatgtgcctcccaccatttgcccctttgttgtgtatagaacctaggttattgtgctatgctttgtaatgtcttcctcagctggacccttagaaagcctactatatttgcctatgtacccctcgtgtttaataatttgagcagcataataatctatggtgttagcactgttatttgcatgggttcttgctgttgatatagatgatagctccgttagtgtaaatctctgggcttgctcgcttgcccagagggccagagtgcatccacgcttccatcccaacacgcccacccgcagcacccgcattccctccgggctcaacagagctctaccagaggacgatggagctgcttgggctagcagataggagtggtgggatagcacacttccttctctcccggtggcagcatgtgggagcaagctccaaggaggtgacagtttcctcttcacgatgctaccagggctggtctcctccttgcaggctatacaaggttttgggtgtgtgggctctagtgtcaccacggccttggccctcagaatccatggagaagcaggtgcttcattacctagcgtgagtagtggcgcgggagaagcaagatcatagccacctccgtctccgctggtatggcggtatctctaacccgttgtggtgcaggccgccgccgccaccaccgtgaaagttttgttttcatcgtattagttttgttctctctgttatgtacatactcatttgtgctgtgataggaagaggcaggccgcggtatggcttcgtagctatccagaatgagatgctggagcgtgagtcatccctgcgctaacattggaagggcaggagagataccgtggacatcgatgccacctcaggaaagcaggcaactgggcgattacaaaggtataactcttatagcacacatcagattcggtgttgcaggagcagactgaggctgtggttgctctcctcaattggaacaatggaattggcaatgagataaatcataaatgtggactgcaaaatggtggtaccatgcagcagtggcatcaaatggcaaatgatgtgctggatgcctggacgtgtttgaggagtgagtgcctccgtaaggttaagagagaattatcaatggcgacaatgtggatggtggtgttgaggaaagcgaacttgccaagcggtggagagtgcagaggatggatgatcttgacgtgaccggaggctgtggttgctcatcgaggatggatggtcttgatgtcttaagccggatgctgaggttgcttgtcttctagtcgagtgctccaggggctgggcaatcaagcaagttcgctttcgcccatacagtatgttactacgaatagaagttaggttgctgtgttctatactttgtaatgtcttcctgagttctgctcttgccttttcggttt

SEQ ID NO: 14492 - DNA, 664 bp, Zea mays
  Clone ID: LIB189-031-F6_FLI
gggctgcctgtcgcacatgctggcggactccatccacgcggacgtgaccatcaacacgacggacggggtgctgaaggcgcacaaggcggtgctggcggcgtgctcccccgtgttcaagagcatgttcgtgcacgacctgagggagaaggagtcgtcgacggtggacatcggcgacatgtgcgtggagtcgtgctcggcgctgctgggtttcgtgtacgggacgatcgagcaggggcagttctggaagcaccggctgccgctgctggcggcggcggacaagtacgggatcggcgacatcaaggactgctgcgaggagagcctgctggaggacataggctcgggcaacgtgctggagcggctccacgtggcgtggctgtaccggctggagcggctgaagaaagggtgcctcacctacctgttcgtgttcgggaagatctatgacgtgagggacgagatgcacggcttcttccaccacgcggaccgcgagctcatgcacgacatgttccaggaggtgctcagcgtgtggaagcccatgtgaatggaagtgtccctttccacgcgagctgtgtgtgtgtgtgtcgtgcttgttcagtcagcagtgtgtggagagcatgctggttatgcatatttgaaacgaaaaggatgctcagaatttgaatggaac

SEQ ID NO: 14493 - DNA, 989 bp, Zea mays
  Clone ID: LIB189-031-F8_FLI
gcggcggcatgtccgcgatacaggggagccgccggctcgcgcacaccgatcagttcaggttcctggacaaggcagcgtcggtggagccatcggacgacaagtcgcgtccggcgagcgcgtggcgtctgtgcacggtgacgcaggtggaggagctcaagtgcgtgctccggctgctgccggtgtgggcgagcgggatcgtgttcgcggcggcgtacacgcagatgaccaccaccttcgtcctgcagggcgacacgctggacccgtacgtgggcggcttccgcgtgcccgccgccgtgctctccgtcttcgacacgctcagcgtcatgctgtgggtgccgctctacgaccgcttggtggtcccgctggcgcggcgcgccacgggccacgaccgcgggttcacgcagctggcgcgcatgggcgtgggcctcgtcgtgctcaccgccgccatgctcgccgcggggacgctggaggtggcgcggcgccgcgtcatcgcgcgttacagcatgtatgacaccaacacgggcgccggcggggacggcgagtacctgccgctgtccatcttctggcaggtgccgcagtacgtggtggtgggcgcgtcggaggtgttcacgttcatcggccagatggagttcttctacgaccaggcgcccgacgcgatgcggagcctctgctcggggctctccatgacgtccttcgcgctcgggaactacgtcagctccgcgctcgtcaccgtggtggcgcgcgccaccgcgcggggcgggcgggacggctggatccccgacgacatcaaccgggcgcacctcgacaacttcttctggctgctggccatgctctgcgccggaaacttcggcgtctacctgctcatcgcgcggtggtacacatacaagaagactgtggactagtatagtgtatgtatctataaagaccatccctgaacgatctcgtgaaatgtactgccgatctcaatcaattcaaagacacttcacttg

SEQ ID NO: 14494 - DNA, 1066 bp, Zea mays
  Clone ID: LIB189-032-B11_FLI
atcccaccaaaaatgagcaccgaatctctcgtcttcaagggcagcctcgtcggccacaaggatggcatcaccgcgatcgccacctcgtcggagaaccccgacatgatccttaccgcttcccgcgacaagaccatcattatgtggaccctcactcgtgacgattcgtcgttcggataccccaagcgtatcctccacggacacaaccacttcgtctctgacgttgttgtttcgtctgacggtcaattcgctctctcctcctcgtgggacaagaccctccgtctttgggacctcaacacgggacttaccacccgtcgcttcgttggacacacttcggacgttctctccgtctccttctctgctgacaaccgtcaaatcgtttccggttcccgtgaccgaaccatcaagctctggaacaccctcggagagtgcaagttcaacattcaagaggatggtcactccgaatgggtttcctgcgtcaggttctcacccaaccccatgaaccccgttatcgtttccgctggatgggataaggttgtcaaggtttgggaactctccaagtgcaagctccgtaccaaccactttggtcacaccggttacattaccaccgttactgtttcccccgatggttcgctttgcgcttcaggaggaaaggatggtatcaccatgctttgggacttgaacgagggcaaacacctttactcgttggaagctggagacacaatcaacgcgctcgtcttctctcccaatcgctattggttatgcgccgccacgcaatcatgcatcaagatcttcgaccttgagtccaagtcgatcgttgacgagctccgacctgacttcaacatcactgccaaggctcgtgagcccgagtgcacctccctcgcctggtcctctgacggatcctccctcttcgctggttactccgactcggttgtccgtgtcttctccgttgtcgcctaaacgaaactggatccttgtggagcaagagattcgaaaaaattgtcgtacttgtagtctcattcgtgccgggaatttgcttgtcgatgaaatcacagcagtctcgcgggct

SEQ ID NO: 14495 - DNA, 756 bp, Zea mays
  Clone ID: LIB189-032-B12_FLI
caccagcccctctcgcctcacgaaaaggcgcaggccaaggccaaggccaagccgccccctccctcctctcctctcctctcctctcctttcctctccactctctggcagccaaaggcgaggccgagatcctgcgcgcggaggatgccttccaggtccatgagccggctgtccgtcgagtccgcctcgggcagcggcggcggcggctgccgggaggccgagccggtgctctgcgcgcctcggccgcgcagggcccagcagcagctggtccacgtccacccccgcggcgccgacctcatcctcggcccgccgcccttccttctcaacgaggtacccaccaccaccgcccttgtgcctggaaccgagaaagcaatcttgtctccaagctctcccccgctcacaacacaaacacgttcttttctcgcagagcagcgaggagggtcggtgcagctgggcggcgttcggcggcgggtcgccgccggcgcgcgcgggcaacccgctggtgcacgaccccagcttcctgctgagccagcgccaccccgcggcggacccgccgctggagctcggcttcttcgaccacctgatccgcaccagcagctacgttcaccggccgacgccgacgacgtcgtataccagcaccagcagcagcggcagtagcagcaagagtagttttggcccgtcgtcgttcgcgcccgccgtgaggatccaggggttcgacgtcgccgcgtgccggagctcccacagcggcggcggcggcgc

SEQ ID NO: 14496 - DNA, 1072 bp, Zea mays
  Clone ID: LIB189-032-B3_FLI
ctcagcgagctggaggcgtcagagcggcggatggagcggtggaagcagcacagcgggccaatcccggcgcagacgacggggacgggcaaggggtcagcggccgatcccggagagaagctgatgagtaagctcagggagcagcggcagaaggtgcgacgggtcatggagggatcgctgtggaacgtcgccgccagcaaggcggcgaggctcatggccaagtcggtcctcgccgtgctcgcgcgcatctccctcgcctttgccgcgttcgttccaggccttcccccttggacggtaggacgcgcgtgggcgctcggtcactcatccggatccggcccgttacaccggtcggcgacgcccgcggcgctccagcattcggctcccatcttcggccagagagactccgcctccctactgtcggcgtcgtcgatcaagccgtcagtgagcacggtcggcggctcgagcatggagctgcgatacgcgaacgtgatcttagccgccaagacgttgctcgcggcgctgaggccgccggcaggtgacaacgaggaggcgcacgaagggatgatcgacctgtcgaagagagacgcgctgtacaagatgctacccgtcggcatccgcaaggccatgaacgctaagctgagagagatctggaagaaagcgcaaccggtggacgaggtgtctgccgcggcatcgaaggatgcggtggagtgtctgctgcggtggttgagcccgatggcgcacgacactgtgcggtggaacgacgagcagagtatggagcgggcgcagcggttcagcatgcagcctcgcgcgctgatggtgcagacgttgcacttcgccgaccgcaagaagacggatgctgctattgttgatgtgctcatcggcctcacctgcgtatgctggtacgacgatgagcagcgaaggctggagtctctagacagggacgacgacgacgagtatcagctatagatttttgagctgtgattttatcgtgtgtgtgaatatcatgtaactgcaaatcgcgtgtacatagaacaacttaacagcctttatataatcaaatctagccgttttagat

SEQ ID NO: 14497 - DNA, 1208 bp, Zea mays
  Clone ID: LIB189-032-C5_FLI
cccacttgcacatgctgttggagcgggtaatctgtcactagaattagaggatctttcatttcgttacttgtttcctcattcctatgaccatgttgatcagtggttgagaagccaagaaggtgactgcaaggctataataaatttgtacaaggagcagttgcttcaagcactgcaggctgataatgagttgaggaggattgcacaggacatctcaattcaagggaggtataaaagccgtttcagtactatgaagaagctagtaaaagatggacggaagccagaagaagttaaagacattctaggtttgagggtaatcttggagcctcggtgtggtggcaattcatctgattggggccctagggcttgccacaggacacatgaaattattcaggctatgtggaaggaaatcccgggtagaacaaaagattatataactcacccaaaacgaaatggttaccagagcttgcatgtggccatcgatgtcagtgaacctgggaaggtgaggccattaatggaggtacagatacgcaccaaggagatgcataggtttgctgttggtggagaggcatctcactctctctacaagggtggtcttactgatcctggagaggctaaaaggctcaagactattatgttggcggcagcggagttagcagctctgcgcctacgagacctaccaggcagtgaccacgtagttgggaactgcaagaacccggctttctgtcagcttgacaaaaatggggatgggagaatcagcatcgaggagctcactgaggtgatggaggatctaggtgctggaggcgaagacgcaacagagctcatgcatcttcttgatgcaaacagtgacggctccttgagctctgacgaattcgagtcattccagagacagatcgaagtgatgagaaacttggaggatgatgataaccactataggaagatcttgaaggagaagctgcacacgatcgacagtgcaggtctcatccatgtgtaccgcaaggagctcagtgacaaattgcttgtgggctgacctggcagccatcttattgtagttttgtatgtataccacaccgagaggtgactccagcactgatctgtaaatagtcgttgaacgtacgtggtatcgagcaatattacggtagtgaatttatagggtggattgcgagatcgagaaatgaaggtaaatatataagagattcgaagatttagtc

SEQ ID NO: 14498 - DNA, 753 bp, Zea mays
  Clone ID: LIB189-032-D4_FLI
ccatcgccccgatggacaccgccgcctcatgccgcctcctctcgccggcctcgtcctctccgcccccctgtccgaagcagctacccaagcggcgaccgaccttcgcggcctcgccgcagcagtcgtcgcccagctccagcgctaagttcaggctcctctgcctcctccatgacaagtccgcggcgccaacgtcgtcggtgcagatgcagagctcgcacttgcagaggctggcgacggtgttgcagtgcggagccgtctgggcagctgttgaggcgccggcggcgctggcggtgaccggcgaggaggacatcgacctgctagggatcctgccgccgctcgcggtgttcgccttcttctacttcctcgtcgctcctccggtgatcatgaactggatgaggctgaggtggtacaagcgcgaattcgtggagacgtacctgcagttcatgttcacctacctcttctacccagcgatgatgttctgggcgccattcgtcaacttcaggaagttcccgagggatcccaccatgaagtacccttggtccaagccgaaggagggcacgccgctgttcaaagacagatacccgcctatagactcctagatacagccttgatacttgtactcggctcgtcgcgcgccacgggcatgcaggcagcgaaaaggccggtttcttcacctaaaaatctgtgtaaaacattactatatatcacacagtctaataatacccgtgctagtacatgggaaaggttactatc

SEQ ID NO: 14499 - DNA, 1851 bp, Zea mays
  Clone ID: LIB189-032-E4_FLI
gcgacaaggccatcgcggacgggagcctcctggacctcctgcgccaggtgttcacgttcgggctctccctggtgaagctggacatccggcaggagtcggagcggcacaccgacgtgatcgacgccatcaccacgcacctcggcatcgggtcgtaccgcgagtggcccgaggacaagaggcaggagtggctgctgtcggagctgcgaggcaagcgcccgctgctgcccccggaccttccccagaccgacgagatcgccgacgtcatcggcgcgttccacgtcctcgcggagctcccgcccgacagcttcggcccctacatcatctccatggcgacggccccctcggacgtgctcgccgtggagctcctgcagcgcgagtgcggcgtgcgccagccgctgcccgtggtgccgctgttcgagaggctggccgacctgcagtcggcgcccgcgtccgtggagcgcctcttctcggtggactggtacatggaccggatcaagggcaagcagcaggtcatggtcggctactccgactccggcaaggacgccggccgcctgtccgcggcgtggcagctgtacagggcgcaggaggagatggcgcaggtggccaagcgctacggcgtcaagctcaccttgttccacggccgcggaggcaccgtgggcaggggtggcgggcccacgcaccttgccatcctgtcccagccgccggacaccatcaacgggtccatccgtgtgacggtgcagggcgaggtcatcgagttctgcttcggggaggagcacctgtgcttccagactctgcagcgcttcacggccgccacgctggagcacggcatgcacccgccggtctctcccaagcccgagtggcgcaagctcatggacgagatggcggtcgtggccacggaggagtaccgctccgtcgtcgtcaaggaggcgcgcttcgtcgagtacttcagatcggctacaccggagaccgagtacgggaggatgaacatcggcagccggccagccaagaggaggcccggcggcggcatcacgaccctgcgcgccatcccctggatcttctcgtggacccagaccaggttccacctccccgtgtggctgggagtcggcgccgcattcaagttcgccatcgacaaggacgtcaggaacttccaggtcctcaaagagatgtacaacgagtggccattcttcagggtcaccctggacctgctggagatggttttcgccaagggagaccccggcattgccggcttgtatgacgagctgcttgtggcggaagaactcaagccctttgggaagcagctcagggacaaatacgtggagacacagcagcttctcctccagatcgctgggcacaaggatattcttgaaggcgatccattcctgaagcaggggctggtgctgcgcaacccctacatcaccaccctgaacgtgttccaggcctacacgctgaagcggataagggaccccaacttcaaggtgacgccccagccgccgctgtccaaggagttcgccgacgagaacaagcccgccggactggtcaagctgaacccggcgagcgagtacccgcccggcctggaagacacgctcatcctcaccatgaagggcatcgccgccggcatgcagaacactggctaggcggcttctcttcactcacctgcagagtgcaccgcaataatcagcttccggatggtggcgttttgtcagttttggatggaaatgccgaactggcagcgtctgttttccctatgcatatgtaatttcctgcctctttatattcactcttgttgtcaagtccaagtggaaaatcttggcatattatacatattgtaataataaacatcgtacaatctgc

SEQ ID NO: 14500 - DNA, 1869 bp, Zea mays
  Clone ID: LIB189-032-E7_FLI
agcgaggagctgcccgtcatgccctgggccacctccgtcgcaagcggttacacccttttgagggatccacaccacaacaagggtcttgctttcacagaggaggaaagggatggacactacttgcgtggactgctccctccggcagtactatctcaggaactccaaattaagaagttcatgaacaccctgcggcagtaccagacccctttgcagcggtatatagctatgatgaaccttcaggaaacggacgagaggcttttctacaagcttttaattgataatgtggtggagctgcttccttttgtttacacaccaactgtaggtgaggcctgccagaagtatgggtccatctttggacgaccacagggtctgtatgtcagcctgaaggacaaggggaaggtcctagaagttctaaggaactggccacataggaacattcaagttatctgtgttactgatggtgagcgaatcttgggacttggagacttgggttgtcagggaatgggaattcctgtaggcaaacttgctctatacactgctcttggaggagttgacccatcagtttgcttgcctatcacaattgatgttggtacaaataacgagaaactgcttaatgatgagttctacattggactccggcaaaaacgtgcgactggcgaggagtatgatgagcttattgaagagttcatgtctgctgttaagcaattctatggtgagaaagtcctcattcagtttgaggactttgccaatcataatgcctttgatttgcttgaaaaatatagcaagagccatcttgttttcaatgatgatatccagggcacagcatcagtggtccttgcaggtttgttagcagcactcaagatggttggtgggaccctggcagagcagacttatttgttccttggtgctggggaggctggaactggtattgcagaacttattgctcttgagatttcgaaacagacgaatgctccaattgaagagtgccgcaagaaggtttggctggtggactcaaagggtttgattgttgactctcgtaaaggctcccttcagccattcaagaaaccttgggcgcatgagcacgagcccttgaaaaccttgtatgatgctgttcagtccatcaaacctacagttctgatcgggacatctggagttggaagaacattcacaaaagaaatcattgaggccatgtcttccttcaacgagaggcctatcatcttttcactgtcaaacccaacctcgcattctgaatgcactgctgaacaagcatatacctggagtcagggccgttcaatctttgccagtggcagtccatttgcccccgtggagtacgaaggaaagacttttgtgcctgggcagtcgaacaatgcctacattttccctggactcggcctcggtcttgtgatctctggagccgtccgtgtccacgaggacatgcttctcgccgcctcgaaagcgctagctgatcaggccacacaggacaacttcgagaagggctccatcttcccacccttcaccagcatcagaaagatctctgcgcacatcgctgcagccgtggctgcaaaagcctacgagctcggtctggcgacccgtctgcctccccccagcgacctggtgaaatatgcagagaactgcatgtacactcccgtctaccgcaactaccggtagtgctgcggggatcaattttgcagtaataaaaatctatcaacgcggatggtactctgttgtttatagtccctgctgctaaccacccttgttgctggtgctgctggagaggcattgtacctgtccatgcatatatgatatatatgttgtaacgttgtgaaagcaaacaatcttgggtaccaatgtttgttattctttcgctcc

SEQ ID NO: 14501 - DNA, 627 bp, Zea mays
  Clone ID: LIB189-032-F11_FLI
cgaggtgatcggccaaagctgccagaacctcagggtcctcaagcgcaacgtcttcaactggatcgacccatcggagcatgccggagtagttcctgaggactatctgagagaatgccccgaagacggcaacagggaagccattacgatatccaggttcatgccgaagctgagacacctcgagctgaggttctcgaagctgaccgccgtcgccctcggctccatccctgaaggatgcaaggacctggaggtcctggacctgttcggctgcgcgaaccttacgagccggggaatagaccaggccgctgctagtctgaagagtctggtgacgctggtgaagcccaacttctacatacctcgctcctccttccacatggggaggtacggccactggcagctctacgacgagaggttccagaccaatgtgtttcagatatgatcatagtctcaggtcaggtactcaggtgctccctttgacctatggtttatattctgtgtatgtgggcgcatatagtggcaccaataacgtgtggtttgaatcgtttctctcgacaacattttgtacagatggttatgctccagcggtttgtggagtgtggttggttttaatataaatgacttattgcctgc

SEQ ID NO: 14502 - DNA, 590 bp, Zea mays
  Clone ID: LIB189-032-H12_FLI
ggcgctgccgagggacgacagggagcggatcaacatcgagcagcactgcctggcccgggagatcgtgaacctggtggcctgcgagggcgaggagcgggtggagcggcacgaggtgttcggcaagtggaaggcgcggctgatgatggccgggttcagcccgtccccgctcagcgcgctggtgaacgccaccatcaagacgctgctgcagagctactcgccggactacaagctcgccgagagggacggcgtgctctacctcggctggaagaacaggcccctgatcgtctcatcggcatggcactagtgttgacttcagagaatgttgacctgatggagaatgtttcttgtaaccttcgaagtacctcttagtggtttagatatgtttggctggtcactggaactatctataggaagcctatggtgatagatactgagttgtagtagaacacatatagcctaaatgcctaatgctgtgatggcagtcactaccagcctagcctagaacaggttgatgatgtgtagtagtaagtttgggtatatgtttcagttaatcagttttgcttgggtgcattctgaagggtggcctcttc

SEQ ID NO: 14503 - DNA, 435 bp, Zea mays
  Clone ID: LIB189-033-A2_FLI
atctcttgaagagctaagctgggagacactagaacttcttgtggtacctcatatattcaggtatccaagctctgtgctaccgattaattgctgaaaactgaacttgggttcatgttaaatattcccaaggaaatataattgggcaacggtgtgtgtatatgttcagattcagaaagtgaggacaatatagcgtttgcagcagtggtcgtcgccctgtgcagggagggcctgctgatcagagatcaagagggaaagcagaagacacgttgtgccgggaggaaacacacgacgaagtagagacttagaagcaataagctaaatatttagacaactttaattcgagcactccaagaggtgtctcaaacaactggttaattcgttttatgaccaaaagaggaaaaatggccatctaatagttttgtaaaacaactccct

SEQ ID NO: 14504 - DNA, 650 bp, Zea mays
  Clone ID: LIB189-033-B1_FLI
caggcgacgctgtcgagcaggacgtggcgtccagtaatgcacactgtgtcgcgttcctcatcaaagacccccaaaaggtgaaaacggtcgatgagatgagggagcggctgaggatgcgtggtctccgctgccacatcatgtactgcaggaactcgacaaggcttcaggttgtccctctgctagcatcaaggtcacaggcactcaggtatctttccgtgcgctggggcgtatctgtggggaacatgtatctgatcaccggggaacatggcgacaccgatctagaggagatgctatccgggctacacaagaccgtgatcgtccgtggcgtcaccgagaagggttcggaagcactggtgaggagcccaggaagctacaagagggacgatgtcgtcccgtctgagacccccttggctgcgtacacgactggtgagctgaaggccgacgagatcatgcgggctctgaagcaagtctccaagacttccagcggcatgtgaatttgatgcttcttttacattttgtccttttcttcactgctatataaaataagttgtgaacagtaccgcgggtgtgtatatatatattgcagtgacaaataaaacaggacactgctaactatactggtgaatatacgactgtcaagattgtatgct

SEQ ID NO: 14505 - DNA, 1693 bp, Zea mays
  Clone ID: LIB189-033-C9_FLI
gcctcatcgccccctgcacggtcacggattactggtttcttattgccaccagatcgaaaaggggggaggaattaaattgtggagtcgggtggtgagatctgatttatagattatttgattagcccggttggtagcagcagtcggtggtggtggtggtagtggtgcaagagcaagaccctgaccgacggcctctgcctccttgcatctctgttcgggtttgtgaagcgcgggctctataaatacgactcagatctgagaggccttctcctcgtccgccccagtctaatccgattcaaaccgcccgttccccgtgtccgtgccaagcaagccgagcccaacccccaagagccagctgctcggtgctccacgcgatggcgcagaaggagactaatggcagcaacggcgatcacatctccacccgcccgccgccgaccccctcgcccctccgcttctccaagttctttcaggctaacctgcggatcctggtcactggtggggcgggcttcatcggctcgcacctcgtagacaagctcatggagaacgagaagcacgaggtcattgttgctgataactttttcactggttcaaaagacaacctgaagaagtggattggccacccaagatttgagctcatccgtcatgatgtcaccgagccgcttcttgtggaagttgaccaaatctatcaccttgcttgccctgcttcaccaatcttctacaagcacaaccctgttaagaccatcaagacaaatgttattggtaccctgaacatgctaggacttgcaaagagagttggagctaggattttgttgacatcaacctctgaagtttatggtgatccacttgagcatcctcaaactgaggcctactggggcaatgttaacccgattggtgttaggagttgttatgatgagggtaagcgtgtagcagagacgctgatgttcgactatcacaggcagcatggcattgaaatccggattgccaggattttcaacacctatgggcctaggatgaacattgatgatggccgtgttgttagcaacttcattgctcaggctgtgcgcggtgagcccctgactgtccagaggccaggaacacagactaggagtttctgctatgttgccgatatggttgatggtcttattaagctgatgaatggaaacaagactggaccgattaacttggggaacccaggtgaattcaccatgctggaacttgctgagaatgtgaaggagttgatcaacccagatgtgacagtgacgatgaccgagaacactcctgatgatccccgccagaggaagccggacatcacaaaggcgaaggaagttctgggatgggagcccaagatcgtcctgcgggacggcttggtgctcatggaggatgatttccgggagcgcctgaccgtgcccaaaaaaaccaaggcctaaattgccctgcagttggggaagaatatccccccggggaagcatactcatagtcgggctcgtcattatttgtggccacatttcattacggaatttgagttccaataaacttaatattcctttgtcgttcaccttgaaggattgtattattagaattttcatacagggctggccattcgagtctctgcctacgcagatcttgtggtacttgtgtttgtagccaatgtgtgagtaaaagtcgattatagcaatgttgatgccattttgggctt

SEQ ID NO: 14506 - DNA, 514 bp, Zea mays
  Clone ID: LIB189-034-E1_FLI
gtgggacaagggaatattgtatggttctgttggattcttttgtggtcttgtgggacaagggattgctaatttgataatgacagccaaacggagtgttaagaagtcagaggatgatgtacctgttccacctcttctcaagacttctgctttgtggggtgcattccttgctgtttcttccaacacacggtaccagattattaatggattagagcgcctggttgaggcttcacctgttgcgaagcgtgtcccggctgcttctttggcattcaccgttggtgtgaggtttgccaataacgtgtacggagggatgcagtttgttgactgggcaagaatgagtggctgccaatgagttgcgagctttcatttccgtggtgaggtcttccttcttctatacatgcccccctctcccccccacaataaatgcagttctcttctcttgatgtagccaatggatagataacattatgccaataatgcagatgctttttattgcagtcactattcaccgcgatgc

SEQ ID NO: 14507 - DNA, 517 bp, Zea mays
  Clone ID: LIB189-034-F11_FLI
gcggcggccgtttgcctcgacgaggtcctctgggttgcccgcctcgtgcacgccttccagtgggccctgcctgacggcgcggcggccgtttgcctcgacgaggtcctcaagctctccctggagatgaagacgccgctcgtcgccgcagccatcccccgcaccgcctgatccgtcctgccgccgacgcgtcacgtcacgcgttgtttgcatggatgatggtatctttgtctgtctgtgtggtcttcgctaaagtttgcttcttctcgatcgtcggttcgttcgtgcctccaccttagcctagggtttggtttcttgcaaggtagtgagtgtgtcttagtctcaccatcaccggggctccaattttggaaagctgcgtgttaggagttaacccctagacatgtttgcgtcttgatcgccaccacccatcagtatcagcgcagaaactacatatagatcagtgtttgtcgaccagtcatggaagtcgtgtgctctcaagtctgatgtattatatacatat

SEQ ID NO: 14508 - DNA, 667 bp, Zea mays
  Clone ID: LIB189-034-F8_FLI
atcgccccggagatcttcggcaagatgggcatcatccccccggagaccgcgctgccgtggttcaagacgggcgtcatcccgcccgcgggcacctacaactactgggccgactcctacacgctcttcgtcttcaacatggcgctcatgggcttcgccgagcaccgccgcctccaggactggtacaacccgggctccatgggcaagcagtacttcctcggcctcgagaagttcctcgccggctccggcgacccgtcctaccccggcgggcccctcttcaacccgctcggcttcggcaagaccgagaaggagatgaatgagctcaagctcaaggagatcaagaacggcaggctcgccatgctcgccatcctcggttacttcatccaggggctcgtcaccggcgttggcccgttccagaacctgctcgaccacctcgccgaccccgtcaacaacaacgtgctcaccagcctcaagttccactagaacgttggtgcatcagcatacctgctgccgccgccgccagttgtttgctgtggaaagctagatgcatgcgtgttgtaaaggaacctgaagcgttgcatcggtcatgattcatgcatggccagcctgctgcctgtaacaacaaactagtattgatcttattgagaccggaaactgtattgcacatggt

SEQ ID NO: 14509 - DNA, 772 bp, Chlorella vulgaris
  Clone ID: LIB191-008-A1_FLI
ccagggtaacccatcagcagggattgaaggccaagaacaatggtcaggcacaacaacgtggtgcccaaccagcacttcaggaagaagtggcaggacaaagtcaggacctggttcaaccagcccgctcgcaagctccggaggaggaatgcccgcgccgagaaggccaagaaggtgttcccccgccccaccgcgggcgcgctgaggcccatcgtgcacggccagaccgtcaagtataacatgaagaagcgcgcgggccgcggcttcacgctggaggagctcaaggaggctggcattccctccaagcttgcccccaccattggcattgcagtggaccaccgccgcaagaacaggtcccttgaggggcttcaggagaatgtgaaccgcctgaaggcctacaaggccaacctggtggtgttcccgcgccgcgccggcaagcccaaggccggcgatgccagcgcggaggagctcaaggcggtcgcgcagctcagcggcccggtgctgcccgtcacacgcgctgcgcccgctctggagaaggttgccatcaccgccgagatgaaggccgagaaggcataccacaccctgcgcacggagcgcatgaatgcccgcctggttggcgtgcgcgccaagcgcgccgcagaggaggcagcagcagccaaggacgccgcataagcggggggcggcggtggcatttggagcacccgtggaacccgcagtgctggctagggaagggctgcgctcgggatatagatgatcatgtaacatgttcatgcag

SEQ ID NO: 14510 - DNA, 874 bp, Chlorella vulgaris
  Clone ID: LIB191-011-E8_FLI
ccaaacctgctcaaggagctggagcagtccaccgagccgctgccttacaagctgtggcccggcatgggcggctgccccgacccccacatcccgatcaaggcggagaactaccagctctttgagcagatgcacaacgatgacaggatggcggttgacaagctgaaggagggcatcgacaactttgccaaggaccagcgcaagctggaggagatgatcgtgaaggtggcgcagtaagtgatgagtcagggtgactcaccgctgtaatgagaaatctgacaattggcaattgaaaggaagggtgcatagagccactggcggtgattggtcaacggccgaccgggcagtcactttccagctcctgacgctcgctgacactcgtattatgaagctggctgctgcctgcattgttctggcactcctgtggctgactgttatactaaggtattatgtccaagaaccgcatgatgcagcaataactaatgacccttgcacgtctttgctgggccacaacccgcggtccctgtgttgttgtatataagaccctgcgctctcatggaatgcctcgaggtttcttaattgctaacttgtctgcattgtagctcctaggttcccatgtgcgcgttcctgacttttgcacctggcaacgacctggctggctctgcatttgcctactgctccccctcagttgatagcttggttcggttagtggatcctgttagctcgagttcctatcttaggttgatcaagggtgttactgctgactgcttggctgcttagtcactggaagtgcggtcactcatttcagtaatgatgtgcagtcagatgcagtcatataccttgttgctgattggcgagtgcaagcggtgctgtgttt

SEQ ID NO: 14511 - DNA, 1036 bp, Chlorella vulgaris
  Clone ID: LIB191-016-B10_FLI
ctcgggcatcaacgccgaggtcatgcccggccagtgggagttccagattgggccggtgggcgccctggaggttggggaccaggtcatgattgcccgctggctgctgcaccggctgggggaggagtttggcatcattgccaccttcgcgcccaagcccatgaagggcgactggaacggcaccggcgcgcacaccaactactccacggagagcatgcgcaaggacggcggcatgcgtgcgattgaggacgcgatcgagaagctgtccaagtgccacccggagcacattgcgcagtacgggtacggcaacgaggagcggctgaccggcaagcacgagacatgcgacatcaacaccttccgctacggcgtggccgaccgcggctcgtccatccgcatccccctgccggtccagctggccggcaagggctatctggaggaccgccgccccgccgccaacgtggacccgtacaccgtggcccgcctcctcataaagaacaccatcctggcttgaagcccgcccacctgcctagcgtgcggcccaggctaaggcttgctagccccgcaagggacttgaccaaggcagttctcatgtggatgcacctgtcgtgccaacatggagccaggcggtggcgtggtggcaggcgtcgtgaggattcctggtgcgcctcctgtgcttgggcaaggatgctgcagagagtgtgatttgggcttcgcaaccaaatcctgtccaaacgtgccgctggtacgcctcgcggtatgcagaggcgtacagcctgcataccgcgaggcgtacagcctctgcaaggttatgctcttggcttcctgcgctcttatgtaccctgtggagaagactcctggtggcagcggtatgctgcggccccccacatttcataagctagcgcctctacctacgtgtgcacttcattttatatatacaggcgtactatggtagtacctgccttgcctttttctcctgtactacctagctaggtactggctaccagtgtactgcgcaagcctttgaaaagcacgccttgtt

SEQ ID NO: 14512 - DNA, 1907 bp, Chlorella vulgaris
  Clone ID: LIB191-027-B2_FLI
gatcgcaccgccatcgatgctctggactgcagggatgctttcgcgcgccctgctaggcaggcactggaccgccggtgcagcatgtgccctagcctcgagcaggcagataaacacgtctgcatggcgcgggcacgtgcagcccgtcccagctgatattgatggtgacagtaacgcagctcccggggaggctggggtcaatggagcactgggtcaccggcgatggctagcagatctgggagccatccgcaccgactggacgagggaggaggtggccgatgtctttgctacccccctactggagctagtctatcatgcagccactgtacaccgcatgtacaacgacccttccatggtccaacggtgcactctgctcagcatcaagaccggcggctgccctgagaactgcggctactgcagccagtctagccactggagcaaggacactggtctgaaggcggagaagctcatggacttggaggaggtctaccaggcagccctccgagccaagcaggccggcagcacccgcttctgcatgggggcggcatggagaggaccctctcaggtgggcaaggggcaatggacccgcgtgctagacatggtgaagcggatcagggcgctggacatggaggtgtgcaccacgctgggcctgctgacgccagaccaggcgcaggagctgagggaggccggcctgactgcctacaaccacaacctggacacctcgccagagtactacgagaaagtcacaaccacacgcaagtatgaggaccggctgaacaccctggagaacgtgcgccaggccggcatcagcgtgtgtgctggtggtatcatcggtctgggcgagggcaagatggaccgggtggggctgctgcaccagctggccaccctccccgcccaccccgagtctgtgcccatcaacgccctggtggctgtcaagggcacccccatgcaaggcaaccaggccccggaggcgctggatgtggtgcggtgcatcgccaccgccagagtcatcatgccgcgcacggtggtgcgcctgtcggctgggcggatgaactttgggctgggggaccaggcgctgtgcttcatggcgggggccaactccatcttcgacggcgacaagctgctcaccacccccaacaatgaccgcaacgaggacctggccatgtttgaggccctgggcctccgctcccgccccgctttcttgccctatggtgccggcaatgagtcctccgccaccgactttgccgctgctgctgccggcgaggcaggcggctgccgcggcgacggcagctgcggcggcgggcacgggcacgggcacgggcatcaccaccatggggtggagactgactcccatgagcagggccgcggcgaggcggctagtgcgcatgttggcggggggtgtgggggcaggggcgcgtgcgggggccaccagcatgctgcgcacgcttagccagccaccaagctgagcgggtgcaggtgatgggcatgctgcatatgctacgagtaccatgtctgccctgcatcctgctgtgctgcccgccagcctgtacctttgggtgtaaggcccagctgtcaccagcctgagtagcacttgatgggggccatggtgttcgccaaagctagagacgggttctagggatgcttggctcccctgttcttgtggcgagcgaagactgctggggcgcactgcgactggcactgaactgttaactgtcttttccctccacaaggaaggtgagagaggaaatagtgcattcccttcaagacttgggtggtgtctttccaggactgttgacgcttgctggctgccttgtgttgggcaactggcctgattgcagcatgtgtagcattcatgcagatgagagcagcgaatgtagtagttgcgagtgttaacacagattgcttcaggc

SEQ ID NO: 14513 - DNA, 795 bp, Chlorella vulgaris
  Clone ID: LIB191-030-E4_FLI
gttcgtgtggagggcaagccagttctcttgttctggtatcgcaaccagatatatgctattgaggccaggtctccagccgaaggcgcctacagtgagggctttgccaacgccaagttcacgcaggactactgcattgagtgcccctccaccggcacgctgttctcgctgaaggacggcaccatcgtgagctggtaccccaccaaccctgtgctgcgggtgttgacaccccaggacacctgccgcaacctggaggtgtaccccgtcaggctgacacaggaggccattgaagtggatgtgtccggcagctccagcgggggccggctcaccaagggcgggtcaaacacgtcgctggagaacaacaatgtgtacgggctggagcccaagcagtatgtggacatcgattcccagacaggcgaagcctccacgacggggtccaccacggcggtggctgccacggtagtagtaggtggcttggctgcgctcctcacaggagcagccatatacttttttgctttccagcccctctgatggagacgaggatcctgtggcgccacgcttgcggtgttttgcaaggctgcagtgggagcttgtcttggttctatgtagaggataactcactgctgaacatgcttacaatttttgcgtatttgattgatgagagagagtgcacttcgtgcactgctttttgcattgcacacttttttacggagacagcggggatgatcaaatgcttgaccttactccttgtgcgtgttgaactttgaaggcgtacactacatgtgatattatgctacc

SEQ ID NO: 14514 - DNA, 851 bp, Chlorella vulgaris
  Clone ID: LIB191-032-C1_FLI
ctctgctactctttctatggcctatgcagctgcccgctttgctgagtcggtgctgctggggctgaacggcgagcaggatgttgtcgagtgctgttacctggagtccaccctggtgccaggcctggattactttgctagcaaggtgcgccttggaccaaacggtgctgaggagattctgcccattggcgagctgtcagcctttgagcagaagggcctggaggaggcgaaggagcttttggcaaagaatatcacagctggcattaagtttgccaaggcggcggcagcatgaacatatgcctgaaactgtggtttgcttagagatctgggacactaatacaccaagtccccatagctgtcttgggtggtggtgacgtgtccttgtgcttgtttgtctgctggtatgggatgtcgccctgggcgccacgtcaaggtggtgccgtgccgtggtgctaaaccacagcacagcttacctgcaaagcttggaggccccgcttgatactttgctggggcgtgttgctaagtgcttctggccgaaagggtgccagtccggaagtgggttatggcggggtgtgacaatccatttcattactcttttcgcattgcttcactgcattattttggctacttgcttgtttgaccttctgagtattagtgcgcgcctacccttgtgaagggcgccactgtgtaagtggagctcctgactcttgagcaaaatgcatctgcaccgagcccctttggctggtctctgctcatatttccaagcgccagggccacagactagtcacagacaagcgttcaggcctgctctctcggacacaactggttgcttctgtgtaagacagcgtgaagac

SEQ ID NO: 14515 - DNA, 494 bp, Chlorella vulgaris
  Clone ID: LIB191-037-D10_FLI
cggctctacgccaggtgttccggctcgcagtgcctaacaccttgaggggtggtcaccaacagctgatccaggggcagaaccagtccagaacgcctgcaaacgtagtgagagcgatgtcatctgaggaagtggcggctcagaaggcggctgagactggggccaaggacagcggtgcaccgaccattttcgataagatcatcaacaaggagatccccgcgactgtcatctatgaagatgaggaggcgctggcattcagagatgtgaacccccaggggccggtccactttcttgtcatccccaagcaccgaaatggactcacaatgctttctaaggccggggaggagcacaaggcgctgctggggcacctgctgtgggtggcacagcatgtggccaagcaggagaagcttgcggaggggttccgcgtggtcatcaacgatggcaggaacggctgccagagtgtctaccacctgcaccttcatgtcatcggcggccgc

SEQ ID NO: 14516 - DNA, 1559 bp, Chlorella vulgaris
  Clone ID: LIB191-038-B9_FLI
gcactccttgtggctgtctcgggcaaacaaccgcaaagatgcagactgctttcgccggcaaggtcgctctgttcaagggcactgtggctgcccccaaggcgcagcgcaggtccctggttgtccgcgcgggccagtatgatgaggagctggtgcagaatgcgaaaaagatcgcctcccccggcaagggcatcctggccatggacgagtccaatgccacctgcggcaagcgcctggagtctatcggcctggagaacaccgtggagaaccgccaggcgtaccgcgagctcctggtgaccacccccggcctgggccagtacatctccggcgccatcctctttgaggagacgctcttccagaagacccgcggcggcaagcagatggtggactgcctgaacgagcagggcatcctgcctggcatcaaggtcgacaagggcctgttccccctgcccaactccaacggcgagtcctggtgcgctggtctggacggcctggcccagcggtgcggcgactactacaagcagggcgcacgctttgccaagtggcgcagcgtggtcagcatccccgccggccccagcaccattgccgtgcgcgactgcgcctacggcctggcccgctatgccgccatcgcccagtcccagggcctggtgcccattgtggagcccgagatcctccttgacggcgagcatgacatcgaccgcaccctagaggtggccgaggctgtgtgggccgagaccttcaagtacctggccgacaacaaggttgtgtttgagggcatcctgctcaagcccagcatggtcacccccggcgccgagcactccaagaaggcgacccccgaggaggtggcatcctacaccctcaagatgctgcgccgccgcgtgccccccgcggtccccggcatcatgttcctgtccggcggccagtccgagctggagtcgaccctgaacctgaacgccatgaaccagagccccaacccctggcacgtgtccttctcctacgcacgcgccctgcagaactccgtgctcaagacctggaagggcgaggagggcaacgtgaaggccgcccaggacgctctgctgcggcgggccaaggccaacagcgacgcgcagctgggcaagtactccggcgagggcgagaacgcggaggctggcaagggcatgtacgagaagggctacacctactgagcgctgccatgtgctagacctgaccggcgctctgcgcttcgtctcgtaagcgctgacaggctggccggctgccgggcggcaggcgtgttggctgctgcgcggtagcaggcgctccttgcaccagcagctctgctcccgtgctgccgcctgctgtggaggagtgagtagagcgtgtatcctgctgcctttgactccgtacctccgtcgagtttgaaaatttaatttccttccgtcctgcgtgcctgccctctggcgtcgctgagacctagccttgctcagtgtctgtgtgccattgcagcaaactgagaaattgcttcttttgggctcgccctttgtacttgccttgcccgcctgcgtcgctggggctagagcggccgc

SEQ ID NO: 14517 - DNA, 893 bp, Chlorella vulgaris
  Clone ID: LIB191-038-H7_FLI
ggcgggtggtgctccttcgctacttcaacccagtgggggctcatccctcaggccgcatcggtgagcaccaggtgatgctgaacaacctgatgccctgggtgcaagccgtggctctggggcaccagaaggtgctcaatgtgtacggcagcgactacgacacgcgcgatggcacctgtgtgcgcgactacatccatgtcatggacctggcggagggccatgttgccgcgctgcgcaagctggaggccacacctgagctgggttgcgtcccttacaacctgggcaccggcacaggcaccaccgtgctggagatggtgcacgcctttgaggcggccagcgggctcaaggtgaacaccaacatcacggacaggcggccgggcgacgcccaggcggtgtgggccgcgactgagaccgccgagcgggagctggggtggaaggccaagctgacggtgaaggagatgtgcgaggaccagtggcggtgggccagcaacaaccccgatggcttcctgacgggcaagaaggcgtgaagagcatgagaagcttcgaggggtggacatgcaagggtcgggcagcgggccagcagccgcttgcatgcgcttgctgactgacgggcgagggctggaaccaagggcgggccaggggaggagggggggtagctatgagaaggggtgtggtaccccttggcgtttgggcttgtgtcagcgggactgactggcaagggctagtttctgtgggatgttgggcgataggttagaatgctgctttgcatcacgtcttgtctcaagtgttggcttgctgttattggctcccttctcctgcgcaacgtgtgacccaaaagtgcgggatctcctttgtcagaggttagtgcagctgggattgacatttaaggtgcagtc

SEQ ID NO: 14518 - DNA, 1100 bp, Chlorella vulgaris
  Clone ID: LIB191-041-A11_FLI
ggcaagcggcggactgaggagtatgccgactgcttcctggaccctgagaagctgcccctggacgtggtcaagaacgccgatgtgctggtgacaggaaccctgggcctggccaccgggcccacagcaggcgccatcaggaaggcggtggaggcagccaaggagggccgcaagtgcacggtcatggtggacgtcaactggcgccccgtcttctggtctgacctggaccaagccaagaaggtggtggaggagtatgtgcatcaagctgatgtggtgaagctgacggacgaggaagcggagtggctgtttggcatcgggagggacgaggcgctgaaccaaccagagaaggtgcttgagaaccttccccatgccaagggtgtcctggtgtcggccggggagaagggctctgcctactctttccgctccccgggaggcaaaatggatctctcgggggtggttccggtgctcagcgtggacgtcgtggataccaccggggcgggggatgcctacacagctggcttcctattctacatgctgctctccggctcgctggactccctcctggcggacccaacccgcctgcgtcgtgcagtcgagtttgccaccgcctgcggtgccgccacttgcaccaagccaggcgctattggggcccagccaactgttgcagaggtggagcagctgctagcagcaaaggataagaacaagtgaagggcacagtggtcaagcaagcagttaggtagctgttgctagccacaagtcagactctggtgcggactaccaccaagaccacccagaggggtacgttgtgctgctgtgcaagaattgagcagagctccagcatgggcaggaggagcttgaatgaggttgtgacatcggggtcaaatcctgttgaaaggtttgcgaagctgatcgatattccttgctagcatgtgaggcgtgtcgccaagtgtatctcacgcggttctcccttcgttaggttctgtcatttgctctccaacttcggcgaggcgactgaatgccttcaagtaaagtgctacagcgcccacaaatctgcaggccgcactctctggcctagggcaatgagaagcatcaattttggatgt

SEQ ID NO: 14519 - DNA, 658 bp, Chlorella vulgaris
  Clone ID: LIB191-041-E1_FLI
ggagcgtggagtgggccaggcgaagctgttgcagcacaaggagaacaagcggacccgattcctgttccggcaagaaaagacgctgaagatcagggcaaaccacatagtgatgccaggcagcaaggtgcaggagcacggcggcagcgacaaggccatggtgtggagctgcgtggactttgcggacgaggagcagcgcatggagatgttctgcatacgctttgccaacgcagagcgggcgcagcagttcaaggagtcgtatgagggcgctgctgccaagaatgagccgttgttgaaggaggtgaccacagcagaggaatctgccacagacaaggctgccgatgagctggctggcgaggtggagaagaaagcgacagtcgaggacaatgccgcagctgaggagaagccagagtgaagcacgttcaagagtcctgtcagagaacaatggctcgcttgctcagcagctgtgattggcaggggtcgccctgactctaacccctctggcgctggccccactggcagtggatgctgcgaggtcttgtggggaatccgctgaagaggcccggaatggaggggctggactgcatgagacaagggtcgttctcgtgcgaacaagtatgctaggcaatttaatttgtgggtagttggtacttgcggccgc

SEQ ID NO: 14520 - DNA, 1248 bp, Arabidopsis thaliana
  Clone ID: LIB22-004-D10_FLI
atcgattctctggtttagacaaaacagcaatcgagtctcttcctctgtttagattctctgctttgaaaggatcaaaacaaggtcttgattgttctgtctgtttgtctaaattcgaaagtgttgagattcttagattgttgcctaagtgtagacacgctttccacatcggatgtatcgatcagtggcttgagcaacacgcaacttgtcctctttgcagagatagagtctcaatggaagaagattcctctgttctcactaacggaaacagtttcaggttcttgaatcagtctgagattagagaagattcgagcttggagctttacatcgagagagaagaagaagaagaaagaatacacagagaagaacttagtgggtcgtcgagattcagcatcggagagagtttccggaagattctgaaattaggtaataaagaaaaaacgttacttgatgaacacgtgaacgataaagatgagaagaagcttatgcacaagttcaatcataggatcgttgtgtcggatgttgttttcaagaatcgttggagcaacgtgagttcatcagatttgatgtttttgaattccgagatggttaattcgatttctagcgagagattttcttcattggatcatgtgaagagaggagatgaagaggatcagataggtatcttgcgaatcaaggaagagatggaagcgaagagaatgttggagaacaagttaacttcgatgacaactatgttttcctcggaaaacggagactctggttcgaaatcaagaagcgttatgatcgaaccaggacgaagatcggtgtctgacatcactgcggttcctagactcagtatatcgattcatggagattgcagcggttcagccgcagagactgcgtctgcgttacaaaacggtgggaatgagacggaggagagaagacggcgtttgtggctgccgatcgctagaaaaactgctcaatggtttgctaacagagaaaaaagaagtcaaattaacacaacacaccaacactttgatgtttagtttctttatttttcttaaaaatttgcaattctttttcagattcaatttgagactattttcccataattagtagatacaagttttgattttaagttatgttcagagaattctactaatgttaatacttaatacatgttagttggatcaaacgaagctgatttgtgtaaataagatagatttatgtataaacaaagctttgacttataatatatgaattgattgaatt

SEQ ID NO: 14521 - DNA, 429 bp, Arabidopsis thaliana
  Clone ID: LIB22-004-D12_FLI
ggccgctgttaacggagagttatggatctggtggatcttcttcgccgttgtcggagctgacgtttggtgatacggaggaggagattcagccgccgtggaacgagaacgcgttggagaagtatccgtcgtacgagatcgattgggattcgattcttcagtgttcgagtcttgtaaattagatgttgccataggggtattttagggactttagagctctctgcgatggagtttttggtcattgcagagattttattattattaagggggtttgttatgttaatatcaaataagtttatctactttgatgttaattagtgttaatctctgcgtcggtccaagctgtttttttttggcatgcttcgaccgtgtgagatttcttatgtaatttttgtagttccttgattttcttagttcaagttaaattggcac

SEQ ID NO: 14522 - DNA, 1528 bp, Arabidopsis thaliana
  Clone ID: LIB22-004-F12_FLI
gccacccagaaaaaaccctcaagtcttcttcttcttcctcaatctctccacctcttttcaaaccttcttcacactctctctcaatcaatcctttttcttctcaaatctttcagttttgatctctaaatttccagaaaatgagcaacgataaggacagtttcaatgtcagcgatctcacttctgctcttaaagatgaggatcgagctggtcttgtcaacgctcttaagaacaagctccagaatctagctggacaacattctgatgtgctcgagaatctgactcctaaaattagaaggcgtgttgaggttttgcgggagattcagggcaaacatgatgaaatagagacaaaattccgcgaggagagagctgctcttgaagccaagtatcaaaagttatatcagcctttgtataacaagcgttatgagattgtgaatggagctactgaagttgaaggggctccagaggatgctaagatggaccaaggagacgagaaaactgcagaagagaaaggagtccctagtttctggctgactgctctgaaaaataatgatgttatatctgaagagatcacagagcgtgatgaaggagcccttatatatcttaaagatatcaagtggtgcaagattgaagaaccaaagggattcaaacttgagtttttcttcgaccagaatccttacttcaaaaacaccctattaacaaaggcgtatcatatgattgatgaagatgagcctctgcttgagaaggctattgggacagagattgattggtatcctggaaaatgcttaactcagaagattcttaagaagaagcctaagaaaggtgcaaagaatgccaagccaattaccaaaactgaagattgtgaaagcttcttcaacttcttcaatcctccccaagttcctgatgatgatgaagacattgacgaagaaagagccgaggaacttcagaatctgatggaacaagattatgacattggttctacaatccgggagaagatcatacctcatgctgtctcatggtttactggtgaggctattgagggagaggagtttgaaatagacaatgacgatgaagatgatatcgatgaggatgaagatgaggatgaagaagatgaagacgaagatgaggaagaagacgacgaagatgaggaggaagaagtaagcaagaccaaaaagaagccatcagtcttacacaagaaaggagggagacctcaggttaccgatgatcaacaaggagagaggcctcctgaatgcaaacaacagtaaacaaaatcgaaaagtctaaacgaaaaccagtaaaagaaaaacaaatgttttgggttttgagtgaagtttcatggcctagttttttgcttccatgtaaggcaaaatgttttgaagactgctcataggaatgttgctgtaggcaaaagagtgagtttctccatgtggagatacttgataaattatttttggtgcatttgttttttttttttttaatcactaagttgaattttggtgtgttcgtcaaaattatatctttttaccacttg

SEQ ID NO: 14523 - DNA, 757 bp, Arabidopsis thaliana
  Clone ID: LIB22-005-B7_FLI
cttacataaacaaatcttgttgttgttgttgtcatggcaccgacagttaaaacggcggccgtcaaaaccaacgaaggtaacggagtccgttacagaggagtgaggaagagaccatggggacgttacgcagccgagatcagagatcctttcaagaagtcacgtgtctggctcggtactttcgacactcctgaagaagccgctcgtgcctacgacaaacgtgctattgagtttcgtggagctaaagccaaaaccaacttcccttgttacaacatcaacgcccactgcttgagtttgacacagagcctgagccagagcagcaccgtggaatcatcgtttcctaatctcaacctcggatctgactctgttagttcgagattcccttttcctaagattcaggttaaggctgggatgatggtgttcgatgaaaggagtgaatcggattcttcgtcggtggtgatggatgtcgttagatatgaaggacgacgtgtggttttggacttggatcttaatttccctcctccacctgagaactgattaagatttaattatgattattagatataattaaatgtttctgaattgagtattatttgatcatcatctaagtagaagctttaagtttaagtggtgccaataatttttttttttttttggtcatcagcagatagttttaaagaattttttagtgttgagatcgtgtttcgttcagatctgctgatgttcttttaaatatcattaatgataatcctgatcaact

SEQ ID NO: 14524 - DNA, 781 bp, Arabidopsis thaliana
  Clone ID: LIB22-006-G11_FLI
tatccggcctgtttcagaggatgatacagtagtagaagagctatcaattgttcctagcggttcagatccgtctgcttctactaaagaatacatctgtgagtcgcaaacactcgttgaccggaaaagacactgtgagaacgaagctgtggaggaaccagagccaaaacgaagactgaaaaaagataactcacagagttcagattctgtctccaaacctggaaagaaaaacaaattcgtagtacacgcagctggtgatgttggtatctgtggtgatggatacaggtggcgtaaatacgggcagaaaatggtgaaaggaaatcctcatccaaggaactactaccgatgcacttcagcgggatgtccagttcgtaaacacattgagacagcagtcgagaacacaaaagcagtaataatcacatacaaaggagtacacaaccacgacatgccggtgcctaagaaacgccatggtcctccaagctcaatgctcgtagctgcagccgctccaacatcaatgagaaccaggacagacgatcaggtgaacattccgacttcaagccagtgctcggtggggcgagaaagtgagaagcagagtaaagaagcattggacgttggtggagagaaagtgatggaatcagctaggactttgttgagcattggattcgaaatcaagcaatgctgattatatgtagtttatgagttttatagagttcatcgactcaattttcgcctccttgttcttgttatataataataataaaaaaccccatgaagattaccaact

SEQ ID NO: 14525 - DNA, 924 bp, Arabidopsis thaliana
  Clone ID: LIB22-008-E8_FLI
ctcttttttcttccgtttttccacacattgtctctacctttccctttttcagatttgaccctttgttttcaaaagaaacgatttttagtagccgccggggaatcaggagaatggtgtctccggagaatacgaactggcttagtgattaccctttgattgaaggtgctttctctgatcagaaccccactttcccttggcagatagatggctcagctactgtcagtgttgaagtggatggcttcctttgtgatgcagatgtgatcaaagaaccaagttcaaggaagaggatcaaaactgaatcttgcactggttctaactcgaaagcttgtagggagaaacaaagacgtgatagactaaatgacaagtttacggagttgagttccgtattggaacctgggagaactccaaaaacagacaaggttgctattatcaatgatgcaattcgcatggtgaatcaagcaagagatgaagcgcagaaactaaaggacttgaactcaagcctccaggagaaaatcaaggagttgaaggatgagaagaacgagctgcgtgatgagaaacagaagcttaaggtcgagaaggagagaatcgatcagcaactgaaagctattaagacacagcctcagcctcaaccttgtttcttaccaaatccgcaaacactctctcaagctcaagctcctggaagcaagcttgtccctttcacaacttatcccggctttgcaatgtggcaattcatgcctcctgctgctgttgatacctcacaggaccatgtccttcgtcctccagttgcttaaagctgctgcttctctctactactattaacggttctgtaagattacttcttacgcgcttttttctgatgtaatgattctcacattctgtgattggtgacatagtccactgcaacttaaaatgtaaaattgaaat

SEQ ID NO: 14526 - DNA, 1325 bp, Arabidopsis thaliana
  Clone ID: LIB22-009-A10_FLI
caacacaaacacatttctgttttctccattgtttcaaaccataaaaaaaaacacagattaaatggaatcgagtagcgttgatgagagtactacaagtacaggttccatctgtgaaaccccggcgataactccggcgaaaaagtcgtcggtaggtaacttatacaggatgggaagcggatcaagcgttgtgttagattcagagaacggcgtagaagctgaatctaggaagcttccgtcgtcaaaatacaaaggtgtggtgccacaaccaaacggaagatggggagctcagatttacgagaaacaccagcgcgtgtggctcgggacattcaacgaagaagacgaagccgctcgtgcctacgacgtcgcggttcacaggttccgtcgccgtgacgccgtcacaaatttcaaagacgtgaagatggacgaagacgaggtcgatttcttgaattctcattcgaaatctgagatcgttgatatgttgaggaaacatacttataacgaagagttagagcagagtaaacggcgtcgtaatggtaacggaaacatgactaggacgttgttaacgtcggggttgagtaatgatggtgtttctacgacggggtttagatcggcggaggcactgtttgagaaagcggtaacgccaagcgacgttgggaagctaaaccgtttggttataccgaaacatcacgcagagaaacattttccgttaccgtcaagtaacgtttccgtgaaaggagtgttgttgaactttgaggacgttaacgggaaagtgtggaggttccgttactcgtattggaacagtagtcagagttatgttttgactaaaggttggagcaggttcgttaaggagaagaatctacgtgctggtgacgtggttagtttcagtagatctaacggtcaggatcaacagttgtacattgggtggaagtcgagatccgggtcagatttagatgcgggtcgggttttgagattgttcggagttaacatttcaccggagagttcaagaaacgacgtcgtaggaaacaaaagagtgaacgatactgagatgttatcgttggtgtgtagcaagaagcaacgcatctttcacgcctcgtaacaactcttcttcttttttttttcttttgttgttttaataatttttaaaaactccattttcgttttctttatttgcatcggtttctttcttcttgtttaccaaaggttcatgagttgtttttgttgtattgatgaactgtaaattttatttataggataaattttaaaaagggttacttagatatgtctcaagagttttattagcatgagatgatgaaaatgttgttacc

SEQ ID NO: 14527 - DNA, 2418 bp, Arabidopsis thaliana
  Clone ID: LIB22-009-D10_FLI
atgaatgtctcccacctctggatatgtctcgacagcctcccactcaagagttagttgcaaaggatttgcatgcaaatgagtggcgattcagacatatattccggggtcaaccacggaggcatttgctacagagtgggtggagtgtgtttgttagctccaaaaggctagttgcaggcgatgcgtttatatttctaaggggcgagaatggagaattaagagttggtgtaaggcgtgcgatgcgacaacaaggaaacgtgccgtcttctgttatatctagccatagcatgcatcttggagtactggccaccgcatggcatgccatttcaacagggactatgtttacagtctactacaaacccaggacgagcccatctgagtttattgttccgttcgatcagtatatggagtctgttaagaataactactctattggcatgagattcaaaatgagatttgaaggcgaagaggctcctgagcagaggtttactggcacaatcgttgggattgaagagtctgatcctactaggtggcacaaatcaagtggagatccctcaaggtgagatgggatgagacttctagtattcctcgacctgatagagtatctccgtggaaagtagagccagctcttgctcctcctgctttgagtcctgttccaatgcctaggcctaagaggcccagatcaaatatagcaccttcatctcctgactcttcgatgcttaccagagaaggtacaactaaggcaaacatggaccctttaccagcaagcggactttcaagggtcttgcaaggtcaagaatactcgaccttgaggacgaaacatactgagagtgtagagtgtgatgctcctgagaattctgttgtctggcaatcttcagcggatgatgataaggttgacgtggtttcgggttctagaagatatggatctgagaactggatgtcctcagccaggcatgaacctacttacacagatttgctctccggctttgggactaacatagatccatcccatggtcagcggatacctttttatgaccattcatcatcaccttctatgcctgcaaagagaatcttgagtgattcagaaggcaagttcgattatcttgctaaccagtggcagatgatacactctggtctctccctgaagttacatgaatctcctaaggtacctgcagcaactgatgcgtctctccaagggcgatgcaatgttaaatacagcgaatatcctgttcttaatggtctatcgactgagaatgctggtggtaactggccaatacgtccacgtgctttgaattattatgaggaagtggtcaatgctcaagcgcaagctcaggctagggagcaagtaacaaaacaaccccttcacgatacaagaggagacagcaaagtcaagagaagggaactgcaggctctttggcattcctctgaccaacaacatgaatgggacagactcaaccatgtctcagagaaacaacttgaatgatgctgcggggcttacacagatagcatcaccaaaggttcaggacctttcagatcagtcaaaagggtcaaaatcaacaaacgatcatcgtgaacagggaagaccattccagactaataatcctcatccgaaggatgctcaaacgaaaaccaactcaagtaggagttgcacaaaggttcacaagcagggaattgcacttggccgttcagtggatctttcaaagttccaaaactatgaggagttagtcgctgagctggacaggctgtttgagttcaatggagagttgatggctcctaagaaagattggttgatagtttacacagatgaagagaatgatatgatgcttgttggtgacgatccttggcaggagttttgttgcatggttcgcaaaatcttcatatacacgaaagaggaagtgaggaagatgaacccggggactttaagctgtaggagcgaggaagaagcagttgttggggaaggatcagatgcaaaggacgccaagtctgcatcaaatccttcattgtccagcgctgggaactcttaaacaaacaaaataaccaacaacccttttgctgcaagccgagcaggatgggggtcgattggtggagactggagagcaaaatgggatgatgggtttaagataagatattaaaaatgcaatttttgaagtattttgttggccacttagataattagcatcttccatcacccttattatctatctaataataattaatagatattataaagtaaaacataaaaaggttacaggtattatatagtagaatatgaaaagctcttttataagtagaatatgatggtgtggagttgtagtcggaggctggtatcggttctttttatggatgtatttttttccttcttccaaagatctcttgaagtctttttattgtttatattaatcccaatgtacataagttttc

SEQ ID NO: 14528 - DNA, 1599 bp, Arabidopsis thaliana
  Clone ID: LIB22-009-D7_FLI
actgcgtcagctcaagcaaatagctcaggaggttactcagactaatagtagtgttaatgggtggggacggcgtcctgctgccttaagagctctcagccagaggctaagcagaggcttcaatgaagctgtaaatggtttcactgatgaaggatggtcagtgataggagatagcatggatgatgtcacaatcactgtaaactcttctccagacaagctaatgggtctaaatcttacatttgccaatggctttgctcctgtaagcaatgttgttttatgcgcaaaagcatcaatgcttttacagaatgttcctccggcgatcctgcttcggtttctgagggagcataggtcagaatgggctgacaacaacattgatgcgtatctagcagcagcagttaaagtagggccttgtagtgcccgagttggaggatttggagggcaggttatacttccacttgctcatactattgagcatgaagagtttatggaagtcatcaaattggaaggtcttggtcattcccctgaagatgcaatcgttccaagagatatcttccttcttcaactttgtagcggaatggatgaaaatgctgtaggaacctgtgcggaacttatatttgctccaatcgatgcttcgtttgcggatgatgcacctctgcttccttctggttttcgtattatccctcttgattccgcaaaggaagtatctagcccaaaccgaaccttggatcttgcttcggcactggaaattggttcagctggaacaaaagcctcaactgatcaatcaggaaactccacatgtgcaagatctgtgatgacaatagcatttgagtttggtatcgagagccatatgcaagaacatgtagcatccatggctaggcagtatgttcgaggtatcatatcatcggtgcagagagtagcattggctctttctccttctcatatcagctcacaagttggtctacgcactcctttgggtactcctgaagcccaaacacttgctcgttggatttgccagagttacaggggctacatgggtgttgagctacttaaatcaaacagtgacggcaatgaatctattcttaagaatctttggcatcacactgatgctataatctgctgctcaatgaaggccttgcccgtcttcacatttgcaaaccaggcgggacttgacatgctggagactacattagttgctcttcaagacatctctttagagaagatatttgatgacaatggaagaaagactctttgctctgagttcccacagatcatgcaacagggcttcgcgtgccttcaaggcgggatatgtctctcaagcatggggagaccagtttcgtatgagagagcagttgcttggaaagtactcaatgaagaagaaaatgctcattgcatctgctttgtgttcatcaattggtcctttgtgtgagatttattgtattttgtattttcagactaagcttttgccttttggctgtattgtaaaacggtcatgttgttgttgttgttgttgttgttcttgatgttgctgtgaacacgtaaaacagtgttttgtttcaaaactcaagaaatgcttgcttaatttgtagtttgattaagagtgat

SEQ ID NO: 14529 - DNA, 1443 bp, Arabidopsis thaliana
  Clone ID: LIB22-010-D8_FLI
aataaacgacgaggcttttgtttattttataaagctccttcaccggtaaaagccttggtcctcatgaaaccgggaagcccaagtacttacttccaccatcaaatcgtcaaaccatttgcaaccatcgatggtggtcatgtcacgagtaagcttctactcttctttcttgctactactgttagaggtcgttgtcgctagcagcgagtttgatgatgaaggaagaacatcgttcagtccaaccacggctataatcatgatcgtactcgttagtgttttcttcgcacttggatgtatctccgtctacatgaggaggtgtctccagcacgctctggggatggacagcggtggtggtccaggaaactggcttaacgtgaggcaaacgacggagcctgggctagacgcgtctgttatagaaacgtttccaacgtttccttactctacagtgaagacgttgaggatcggtaaagaagctttggagtgtcccgtttgtctcaacgagttcgaggacgacgaaacgctgcgtttgattcctcagtgttgtcacgtgtttcatcctggttgcattgatgcctggctccgttctcagaccacatgtcctctttgccgagccaatctcgttcctgtaccgggtgagtctgtttcttcggagatacccggtttagctagagaaaccggtcagaactctctcagaacgccgattgatgataaccggaaaagggttttaacttcacctgacgagcggttgattgactcagtggcttggacgggtaaccaaagcatgccacgtaaatccatgtctacaggttggaaactagctgaattgtacagcccggctagttcaccgggccaaccggaggagaatctcgaccggtatacgctgaggttaccacaagagatacatgaccagcttgtgaactccagcctgggaaagcaagggtcaaaaggccaactggccttacctcaagaaaggagctcggttagagggttcagaaccggaagcctagggactgaaaagaactatttctactttgaacggtttgatcaagacggtcggttggaccggagaccattttctataactcctccataccatacccggtcgatacagtctccggatgagattatcaacgctagtggtaattatcaggatcgtgctggtgcacctaaaggtttgcttctagcaataaggtcaccgtttgatcggttatttactgggaagaaaaatgccggtgagcgttcgtaccttcaatccggcgatgcgagccctgtctaggcgaattactactattggggttattaagaatattctgaaataaagaaaatctgtatatgtattttctttcttctagtttctttatgttatatgagaaattcaattccttcaccaatataatgcatctgttactgaaatagtaataaaggaaaggaccatttcgttttatc

SEQ ID NO: 14530 - DNA, 1441 bp, Arabidopsis thaliana
  Clone ID: LIB22-010-E6_FLI
gtctgataaaaagaagaggaaaactcgaaaaagctacacacaagaagaagaagaaaagatacgagcaagaagactaaacacgaaagcgatttatcaactcgaaggaagagactttgattttcaaatttcgtcccctatagattgtgttgtttctgggaaggagatggcagtttatgatcagagtggagatagaaacagaacacaaattgatacatcgaggaaaaggaaatctagaagtagaggtgacggtactactgtggctgagagattaaagagatggaaagagtataacgagaccgtagaagaagtttctaccaagaagaggaaagtacctgcgaaagggtcgaagaagggttgtatgaaaggtaaaggaggaccagagaatagccgatgtagtttcagaggagttaggcaaaggatttggggtaaatgggttgctgagatcagagagcctaatcgaggtagcaggctttggcttggtactttccctactgctcaagaagctgcttctgcttatgatgaggctgctaaagctatgtatggtcctttggctcgtcttaatttccctcggtctgatgcgtctgaggttacgagtacctcaagtcagtctgaggtgtgtactgttgagactcctggttgtgttcatgtgaaaacagaggatccagattgtgaatctaaacccttctccggtggagtggagccgatgtattgtctggagaatggtgcggaagagatgaagagaggtgttaaagcggataagcattggctgagcgagtttgaacataactattggagtgatattctgaaagagaaagagaaacagaaggagcaagggattgtagaaacctgtcagcaacaacagcaggattcgctatctgttgcagactatggttggcccaatgatgtggatcagagtcacttggattcttcagacatgtttgatgtcgatgagcttctacgtgacctaaatggcgacgatgtgtttgcaggcttaaatcaggaccggtacccggggaacagtgttgccaacggttcatacaggcccgagagtcaacaaagtggttttgatccgctacaaagcctcaactacggaatacctccgtttcagctcgagggaaaggatggtaatggattcttcgacgacttgagttacttggatctggagaactaaacaaaacaatatgaagctttttggatttgatatttgccttaatcccacaacgactgttgattctctatccgagttttagtgatatagagaactacagaacacgttttttcttgttataaaggtgaactgtatatatcgaaacagtgatatgacaatagagaagacaactatagtttgttagtctgcttctcttaagttgttctttagatatgttttatgttttgtaacaacaggaatgaataatacacacttgtgaagctttatgggcct

SEQ ID NO: 14531 - DNA, 1258 bp, Arabidopsis thaliana
  Clone ID: LIB22-011-G1_FLI
ccctttcataaccttgtaaaccattaagaggctttgctcaattacaagaagaagaaaaaatgcttgtcgacgggaaactcgtctgcgtcaccggagccggcggctacattgcttcttggatcgttaagttactcttagagagaggctacaccgttagaggaaccgtaaggaacccaactgatcccaagaacaaccatctcagagagcttcaaggagccaaggaaagactcactcttcacagtgcagatcttctcgactacgaagctctctgtgccacaatcgacggttgcgatggcgttttccacactgcctctccgatgaccgacgatcccgagacaatgttggagccggcggtgaacggagccaagttcgtgattgacgcagcggctaaagccaaggtcaagcgcgtggttttcacgtcatcaattggtgcagtttacatgaaccctaaccgtgacactcaagccattgttgacgaaaactgctggagtgatcttgatttctgcaaaaacactaagaattggtattgctacgggaagatgttggcggaacaatcggcatgggagacggccaaagcaaaaggtgtggacttagtggtgctaaatccggttttggttctcggaccaccgctccagtcagcgatcaacgctagtctagtccatattctcaagtacctcaccggctcagccaagacctacgctaacttgactcaggtctacgtggacgtccgtgacgtggcactaggccatgttctggtctacgaagcaccctccgcctcaggccgttacatcctcgccgagaccgcacttcaccgcggagaggttgttgagattctggccaaattcttcccggagtatccacttcccaccaagtgttcggacgagaagaatccgagggctaagccatacaagtttactacccaaaagataaaagacttaggcttggaatttaaacccatcaagcaatctctttacgaatctgtcaagagcttgcaagagaaaggccatcttcctctacctcaagattcgaaccaaaacgaagtcatcatcgaatcttaggacacgatccacgaccctagaatctgatcatacctacatgaaaagctttattcttaagtaatacatacgttttgattttgactaaagtattgttaaatcttaaatcattatatatagctgattgttctttctttctttggttgtaattgagaatatgttacgcatatgtattatacgataatggaagcaatggttttatt

SEQ ID NO: 14532 - DNA, 1134 bp, Arabidopsis thaliana
  Clone ID: LIB22-011-G12_FLI
ctcgtcttcgtcttcttcttcttcaacgttcctctccaaaatcctcagaccaagaaatcatcatggccgtcgatctaatgcgtttccctaagatagatgatcaaacggctattcaggaagctgcatcgcaaggtttacaaagtatggaacatctgatccgtgtcctctctaaccgtcccgaacaacaacacaacgttgactgctccgagatcactgacttcaccgtttctaaattcaaaaccgtcatttctctccttaaccgtactggtcacgctcggttcagacgcggaccggttcactccacttcctctgccgcatctcagaaactacagagtcagatcgttaaaaatactcaacctgaggctccgatagtgagaacaactacgaatcaccctcaaatcgttcctccaccgtctagtgtaacactcgatttctctaaaccaagcatcttcggcaccaaagctaagagcgccgagctggaattctccaaagaaaacttcagtgtttctttaaactcctcattcatgtcgtcggcgataaccggagacggcagcgtctccaatggaaaaatcttccttgcttctgctccgttgcagcctgttaactcttccggaaaaccaccgttggctggtcatccttacagaaagagatgtctcgagcatgagcactcagagagtttctccggaaaagtctccggctccgcctacggaaagtgccattgcaagaaaagcaggaaaaatcggatgaagagaaccgtgagagtaccggcgataagtgcaaagatcgccgatattccaccggacgaatattcgtggaggaagtacggacaaaaaccgatcaagggctcaccacacccacgtggttactacaagtgcagtacattcagaggatgtccagcgaggaaacacgtggaacgagcattagatgatccagcgatgcttattgtgacatacgaaggagagcaccgtcataaccaatccgcgatgcaggagaatatttcttcttcaggcattaatgatttagtgtttgcctcggcttgacttttttttgtactatttgttttttgattttttgagtactttagatggattgaaatttgtaaatttttttattaagaaatcaatttaaatagag

SEQ ID NO: 14533 - DNA, 329 bp, Arabidopsis thaliana
  Clone ID: LIB22-013-D12_FLI
ggcggatcatcggtttcgaggttagactcgttccggaggattttgacaagggaaagatcttcgaacaggcgggatcattctcgcgttgaccaagatcgtgaattggatattgaaagacagtgaattcagtatatagtatatacacacatacgccggttaaaaaaaaaaaagtataaacacacatgcatccataattaatccttaattcatgaaccataatacttcttcttccttttaactttttattcttgtactgaaatcttttgtatgtgtaaatatgaatggcacactttttgtatgttacagtaattacaaaaacattgttgctt

SEQ ID NO: 14534 - DNA, 683 bp, Arabidopsis thaliana
  Clone ID: LIB22-013-F2_FLI
ggtatcagtatttcagctctgaccagggtagtaattctttcgattgttcggagtttggttggagcgatcaagctccgataactcccgacatctcttctgcggttatcaacaacaacaactcagctctgttctttgaggaagccaatccagctaagaagctcaagtctatggatttcgagacaccttacaacaacactgaatgggacgcttcactggatttcctcaacgaagatgctgtaacgactcaggacaatggtgcaaaccctatggacctatggagtattgatgaaattcattccatgattggaggagtcttctgaagagatccagtttcatgtaaataaggctgcatgtttgtgagtttcccgcatcgttcgtttatcaacctccaaaactttctaatgtctgttacttgcatcttcttctgctgtctctgtctgtctctctcaggagttcctgtttgcattgcgagaagccatgagcctctatcttgagggtagttgtgatgaagttaagtagaggcttatttttaggggttgtggtagtttttgttttagtgaatcttttgaattcgtttgtgttttgtttttgttactttatgccccaaaactcctttaacatttgtcataatgtgtttgaacctctcatctgtttaatcaaataaatcttctttgtatgctact

SEQ ID NO: 14535 - DNA, 1157 bp, Arabidopsis thaliana
  Clone ID: LIB22-014-C8_FLI
gcggagtaggaggagacggtggaggaactggaaggtggccgagacaagaaaccctaactctgttggaaattagatctcgtcttgatcataaattcaaagaagctaatcaaaaaggacctctttgggatgaagtttctaggattatgtccgaggaacatggataccaaaggagtgggaagaaatgcagagagaagtttgagaatctgtacaaatactataggaagactaaagaaggcaaagccggaagacaagacggaaaacattacagatttttccggcagctcgaagcgctatacggggattctaataacttggtttcttgtcccaatcataacacgcagttcatgagcagtgctcttcatggtttccatactcaaaaccctatgaacgttactacaacaacgtccaacatccataacgttgatagtgttcatggttttcatcaaagccttagtctttctaacaactacaactcctccgagcttgagctgatgacttcctcttcggaagggaatgattctagtagtagaaggaaaaagaggagttggaaagcgaagataaaggagttcattgatacgaacatgaaaaggttgatagagaggcaagatgtttggcttgagaagttgacaaaggttattgaagacaaagaggaacaacggatgatgaaagaagaggaatggaggaagattgaagctgcaaggattgataaagagcatttgttttgggctaaagagagggcgaggatggaagctagggatgttgcggtgattgaggcattgcaatacttgacaggaaagccattgataaagccgctgtgttcatccccggaagagaggacaaatggtaataatgagatccgaaacaatagtgagacacagaatgagaatggaagcgatcaaacgatgactaacaatgtttgtgttaaaggaagtagtagctgctggggtgagcaagagattttaaagcttatggagataagaacgagcatggactcgacctttcaagagatattaggagggtgctcggatgagtttctatgggaggaaatcgcagcgaagttgattcagttagggtttgatcagagaagtgccttattatgcaaggaaaagtgggaatggataagcaatggaatgaggaaagaaaagaagcaaatcaac

SEQ ID NO: 14536 - DNA, 3441 bp, Arabidopsis thaliana
  Clone ID: LIB22-016-B9_FLI
ttcgagcttccatttttcctcatcgcaatcttcatcttcaatctccagctatctcaaatcgatccttctcgaatcaccatcatgagtgaccatggtgagaagacttgtccactttgtgctgaagagatggatctgactgatcaacaattgaagccttgcaaatgtggttatcagatttgtgtttggtgctggcatcacatagtggacatggcagagaaagatcaaatagaagggcgttgtccagcttgtcgcactccatatgacaaagaaaagattgtagggatgactgttaattgtgacagtctggcttctgaaggcaatatggagcgcaagaagatccagaagtcaaaatcaaaatcttctgaagggagaaagcaacaactcaccagtgtgcgagtgatccagaggaatcttgtttacattgttgggttgcctcttaatctagccgatgaagatctactccaacataaagaatattttggtcagtatggaaaagttctaaaggtttccatgtcccgaacagcatctggtgtcatccaacaattcccaaacaatacatgcagtgtatatattacttatggaaaagaggaagaggctgttcgctgcattcaagctgttcatgggtttatcttggatggtaaaccattgaaggcatgttttgggacaaccaagtattgtcatgcatggctgagaaatgtggcatgcgtcaatcctgattgtctctatttgcacgaggttggttctcaagatgatagcttcacaaaagatgagatcatatcagcctatacaagagttcaacaaatcactggagcaacaaatattctgcagcaccattcagggaacatgctacctccaccactggatgcttattgcagtgacagttcttctgcaaaaccaattataaaggttccttcaactaatgcaactagtgttcccaggtattctccgccaagtgggagtgggagctccagcagatccactgcccttcctgctgcagcgtcatgggggacacatcagtctttagcaacttcggtcacctcaaatggatcttctgatatacaaagatcaacatcagtgaatggaaccttacccttttctgctgttgttgcaaacgcagctcatgggcctgtatcctctaatgacattcttaaaagaccatctcgcaaagaagaaagccaaatagttatggacaaagtcaaacctagtgtgttgaagcccttgcagcataatgttgtggtttctgggtccgagagaattaccgcacccgatagagatcctactagcaatcgtttatccagttcagtagactctgcctacggaggcagagacattgaccagccttcagcctacagtggcagagacattgacaagccttcatctactgttagctcgtttgatgctgcaaatgaagctgtagaagatgtccctactgtaagcaacttgttggatggtgttgcatgcatgcggataactatgaattgtagggatgaacgtcctgatattacaatggcgattggtagtcaaagtgatcaaggttctattagacaacctggttctgaagtatcaaagttgccagatttagagcaatgtaggatagatagttctataaacactgataagaaagctatctcgttagaggataggatcccccgcactaggccagggtgggattggatatcagatttgcaatcgcaaatgcaaggaagctctaaattgcaagtggaggatatatcaacattggatagccaacggcctcaccctgaagaggatattatccactcgcggttgctgtctaatttgtcaagttccagtttggatacaaatcatatggcttctcgttcttccctaccttgtgaagttaggggcagtgatagattgcatcttccaaatggatttggtgagaaatccatgtccagtgtggagcactctctgttcgcaaatgaaggcaggaacaaagtcaacaatgcagaggatgctatactttcaaacattttgtcactcgattttgatccatgggatgaatccttgacttctccccacaatttggcagagttactaggtgaagttgatcagcgatctagtactcttaaaccttcaaacttcctaaagcaacataacaaccagtctagattttcttttgcacggtatgaagaatctagtaatcaagcatatgacagtgagaactatagcatttatgggcagttgtcaagagataaacctattcaggagtctgccatgagccgagatatctatcgaaataaccttgggagtgtaaatggatttgcttcaaacttcgctggtggattggataactttgccgctagtcctttattttcttcgcacaagaatcctgtttcacgacctcaagtttctgcgcctccaggattttctgctcccaacaggctacctcctcctggcttctcgtcacatgaaagagtgggcctatcatcagatactacactaggaaatcgatttcttgactctacttcattgaggaatgcatatcaagtaccacctccagttggtaattcaaatggtgcaagtgatatcgactttgtggatcctgcaattctagctgttggaagagggatggtaaatgctgacttggacatgagatcaggattctcatcacaactgaattcttttgaaaacgaaacaggactccatatgttgagacagcagtctctgtcttctgcacaacaagttaatgggtttcatcatgatctcagaaacttatctccttcacttaacgacccttacggatttagctcaaggcttatggatcaaacacagggaagtagcttgtctcctttctcacagctcccaagacaacaaccatctgcaaattcaatcttgtccaatggtcatcactgggataagtggaatgaagggcaaagtgtgaacaatataggcatggccgagcttcttaggaatgaacggctgggttttaatgggagcttatacaacaacggatatgaagaaccaaaattccggattccaagtcccggtgatgtgtataacaggacatatgggatttgattctggcatgaagagaggtttctgctttgttggatctgctctggttggtcccgattcccaagtgagtggaaaattcatactcaaaaactgcttccgctgctgctgcgcatataggatcagttctcataccaaagatgcaggcccctaacatagattccccaagagcttaaaaggagcaaggatgttaaattgtcaatgtttgggtgcttggataaattttgatttctgctgatgattggtttcgtcggaattctggcaaattttgagggtccaacgatgatagaggtagaagttgcgctctgattttttggttcttatataaagttgtaaatgaatttagttataaaaaacagtgaagcttttaaaagtattctatgaaaattcaaattgttattgcaaaac

SEQ ID NO: 14537 - DNA, 624 bp, Arabidopsis thaliana
  Clone ID: LIB22-016-F3_FLI
ggtgaacctctcccaggcaccgaactgaaagaggtatggaaactcgctgatgtgccaaaggatgacaaatatcaatacactcactttgctcacaagattaatagcttcgacactgccccgaaaaagctgttgccctctgattcacggttacgacctgatagatacgcacttgagatgggcgacatgtccaaatcaggctatgagaagagcagcatggaagagagacagagagctgaaaagagaacccgcgaagagaaaggccaagcctttactccaaaatggttcgatgtaacggaagaagtcactgctacaccatggggtgatctggaagtttaccaattcaatggaaagtactcggaacatcgtgcagctgcggataactctgaagataacaccgaccctaagtcgatccaattcaacccatggcaattccaagatctgtctacttaaatgtatcgctccaaaagacagaaaagatcaaatctttttggaaacaaatgtattcttattctctcgtagttacaaaaaactttgttctacatctgctagctttcccattgctttctctagtattagtgtacaacttctactgttttgtcttaaattcattcaaatctttctttg

SEQ ID NO: 14538 - DNA, 353 bp, Arabidopsis thaliana
  Clone ID: LIB22-016-G1_FLI
tcagtgtgtatttcccgagggtttatgatatcaaacacttgatgaagttctgtaatagtcttcatggaggtctgaataaattggcggagctgcttgatgttgagagagttgggatttgtcaccaggccggatcggatagcttgttaacgtcgtgtacattcaggaagctgcaggagaatttcttcattggttcaatggagaagtattctggtgttttgtatggtttaggtgttgagaatggtcagattgttcattgataaaagcttaaagttttaaacaggttatgttatttattttagattattacatcataggttgttttaagaagtgtatgatcacaagaactaaactct

SEQ ID NO: 14539 - DNA, 1303 bp, Arabidopsis thaliana
  Clone ID: LIB22-020-H8_FLI
tttgatctcatctttaaatttttttgtttcccatttctctcagaaagtgttctgttctttttttcttttgtaatcactaaatgcttcaaaagtttgtccacaattatatttgaaaaaaatgtctgtatctgtagcagcagagcatgattacataggtttgtcagagtttccaaccatggaagcaacaacaatgtctgacaaaaccaaaaccagagacaataacaacggtctcaatttcaaggctaccgagttaagactcggtttacccggttctgagtcgccggagcgagtcgactcaagattcttggctctcaacaagagtagctgtcccgtgtcaggtgccaaaagggtgttctccgacgctattaacgactctaacaaatgggtcttctctcctggatccactactgctactggtgatgtcggctcgggttctggtccccgtacctccgtcgttaaagatggaaagtcgacaactttcactaaaccggctgttccggttaaggagaagaagagctctgctacagctccagcttcaaaagcacaagtggtgggatggccaccaataagatcattcaggaagaactcaatggcttcttctcaatctcagaaacctggtaataactcagagactgaagaagcagaagctaagtctggaccagaacaaccttgcttgtatgtcaaagtgagtatggaaggtgctccttacttgaggaaaatcgatctcaagacttacaaaagctaccttgagctctcttctgctcttgagaagatgttcagttgcttcaccattggtcagtttggttctcatggagggtgtggcagagatgggttaaacgagagtcgcttgactgatctcttgcgtggttctgagtatgttgtaacctatgaagataaagacagtgactggatgctggtcggagatgtcccttgggaaatgtttatatgctcctgcaagaagctgagaatcatgaagagctctgaggctatcggcttagctccaagggtgatggagaagtgcagaagcaggaactaggaaaagcccttttatgtgataatatatgatttgaaaaaatatgtttttaagaaattgaatagccattttgttttgaagtattcttgtgtgtttgtgtgctaggagtgatgtttgatctttcttaaaccagcctctactaagctctaataaggcctcttcctcttacttctttctctaatcaatctaatgaaacatatgggtttgtgtatgtgtgtttgccaaggaagacttcataattcatatgtataaaagttttggtagtgtgta

SEQ ID NO: 14540 - DNA, 856 bp, Arabidopsis thaliana
  Clone ID: LIB22-026-H2_FLI
tggatagtgttgcaaatcaagtagtatcttctttagacattcttggctgagagatttacactaaaagcatagaataagaaacccctgtttggttagtatctacccgagtctcgtagtcctacacagatccggatcctagtttcgaagctagttcttgtttagctgaagctcagacccaaaatgctccaagaaccgtcggctgcattctccctccggcgtaactcattcagacgccgatctcccagatcaaatgtcgatgacagaggctggaatccgctccatatcaaagccagaaaaggcgatctgaaatctgtcaagcagcttctcgaccaaggaatggatgtgaatgctctagcatggggacccaaatcaaaaggagtgagtgcacttcaccttgcagcagagggaggtcacattgaagtcatggatttactcctagaacgtggggccaacattgatgctaaaacatggggctcatgcgggtggactcctctccacgctgcagccaaagagcggaagagagaagcagtgaagtttctggtggagaacggcgcattcttggcagatgatataactgataccaggtttaatccgccggtgcattactgtcacggccttgaatgggcgtacgaggaaatgaagaagcttaacagcgagtcttcttcttcatctggtggagacacatcttccagttctgacaactgaacttcttcttggttgtttctcggtgtgttttgttttgttttctagttgagactacttatcagaactattatggttggtgtttgatcttatgggctatgtgaaacattgaaactgcggatacattcatgtaatcttcagtgtgttattttgc

SEQ ID NO: 14541 - DNA, 1216 bp, Arabidopsis thaliana
  Clone ID: LIB22-027-G7_FLI
caaagatagataaattttaaaggcatatttttttcatttcgactcagatgggttttgatgatacatgcaacacaggtcttgttcttggattaggtccctcaccaattccaaataattacaatagtaccatcagacaatcctccgtttacaagctcgagccgtcgttgactctatgcctctcgggcgatccctcggttaccgtggtgaccggagctgaccagctatgccgtcagacgtcatctcacagcggagtctcttctttctcaagcgggagggtggtgaaaagagagagagacggtggcgaagagtcgccggaggaggaagagatgacggagagagttataagtgattaccatgaagatgaagaaggtattagtgctagaaaaaaacttaggcttacgaaacaacaatctgctcttcttgaggaaagcttcaaggatcatagcacccttaatcccgtaactacatatccttaatcctaattcttttttattatacgttactaatcacttttgataattcttatccaatcagattctttgttgttatattttatttacagaaacaaaagcaagttctggctagacagctgaatctaaggcctagacaagttgaagtatggtttcaaaatagaagagccaggacaaagctgaagcaaacagaagtagattgtgagtttttgaagaagtgttgtgaaacattagcagatgagaacataagacttcagaaagagattcaagaactcaaaaccctaaaattgactcagcccttttacatgcacatgcctgcatcgactctaacgaagtgtccttcttgtgagagaatcggcggcggcggcgggggtaatggaggaggaggtggcggcagcggggctaccgcggtgattgtagatggaagtacggccaaaggagctttctctatctcctcaaagcctcacttcttcaacccttttactaacccatctgcagcttgttgaatagtagtaattcgtttaattttattacttaaaatattaattttcttttttttttgggtggcattttaactagtaggaagaacacaaaaactatgttagaaagggtaagatgcgtatagatggtctcttctacaattcccactttgtttttcagtgggattgctggtttgagaaaaagaatagtttgtaattattattttatttgtagaaaaaggtaaaatagtcttcactttaatttat

SEQ ID NO: 14542 - DNA, 1227 bp, Arabidopsis thaliana
  Clone ID: LIB22-028-F9_FLI
cgcttagctgggaccggtacacagatctacaccgctttatcttcgaagaaaacgtctgcagcagacatgttgaaggcttaccagacatacatgtcggtctgccctttcaagaaagctgctatcatatttgctaaccacagcatgatgcgtttcactgcaaacgccaacacgatccacataatagatttcggaatatcttacggttttcagtggcctgctctgattcatcgcctctcgctcagcagacctggtggttcgcctaagcttcgaattaccggtatagagcttcctcagcgcggttttagaccagcggaaggagttcaggagacaggtcatcgcttggctcgatactgtcagcgacacaatgttccgtttgagtacaacgcaattgctcagaaatgggaaacgatccaagtcgaagacttaaagcttcgacaaggagagtatgtggttgtgaactctttgttccgtttcaggaaccttctagatgagaccgttctggtaaacagcccgagagatgcagttttgaagctgataagaaaaataaacccgaatgtcttcattccagcgatcttaagcgggaattacaacgcgccattctttgtcacgaggttcagagaagcgttgtttcattactcggctgtgtttgatatgtgtgactcgaagctagctagggaagacgagatgaggctgatgtatgagaaagagttttatgggagagagattgtgaatgttgtggcttgtgaaggaacagagagagtggagagaccagagacatataagcagtggcaggcgagactgatccgagccggatttagacagcttccgcttgagaaggaactgatgcagaatctgaagttgaaaatcgaaaacgggtacgataaaaacttcgatgttgatcaaaacggtaactggttacttcaagggtggaaaggtagaatcgtgtatgcttcatctctatgggttccttcgtcttcatagatgttgtttcttacgttctaagcgactgggatttatgtagggcttttctgttgatagtctctcgccaacacgagtggattaagttcagagttagggttcttgaacactagaatgttgttatattatgcttgtgacatagcgtgtgtaagagtgtagcctaagagatatagtactcattgcatgatcttttgctatatgttcatgtaatcttttgttgcataaataatgaaaagttacatttttttc

SEQ ID NO: 14543 - DNA, 1497 bp, Arabidopsis thaliana
  Clone ID: LIB22-030-E10_FLI
gagaaaccattctctccgactaagagagagaagcgaatttgtttttttttcttttgtgggttcaattcgaattgttttccctgagactcaagttactgtgtcattactctgcattgagcaatgggtagcaacgaagaaggaaaccccactaacaactctgataagccatcgcaagctgctgctcctgagcagagtaatgttcatgtgtatcatcatgactgggctgctatgcaggcatattatgggcctagagttggtatacctcaatattacaactcaaatttggcgcctggtcatgctccaccgccttatatgtgggcgtctccatcgccaatgatggctccttatggagcaccatatccaccattttgccctcctggtggagtttatgctcatcctggtgttcaaatgggctcacaaccacaaggtcctgtttctcaatcagcatctggagttacaacccctttgaccattgatgcaccagctaattcagctggaaactcagatcatgggttcatgaaaaagctgaaagagttcgatggacttgcaatgtcaataagcaataacaaagttgggagtgctgaacatagcagcagtgaacataggagttctcagagctccgagaatgatggctctagcaatggtagtgatggtaatacaactgggggagaacaatctaggaggaaaagaaggcaacaaagatcaccaagcactggtgaaagaccctcatctcaaaacagtctgcctcttagaggtgaaaatgagaaacccgatgtgactatggggactcctgttatgcccacagcaatgagtttccaaaactctgctggcatgaacggtgtgccacagccatggaatgaaaaagaggttaaacgagagaagagaaaacagtcaaaccgagaatctgctaggaggtcaagactgaggaagcaggctgaaacagaacaactatctgtcaaagttgacgcattagtagctgagaacatgtctctgaggtctaaactaggccagctaaacaatgagtctgagaaactacggctggagaacgaagctatattggatcaactgaaagcgcaagcaacagggaaaacagagaacctgatctctcgagttgataagaacaactctgtatcaggtagcaaaactgtgcagcatcaactgttaaatgcaagtccgataaccgatcctgtcgcggctagctgaccgtggccgcaacaatgagaacccgatatttcttcctttgggttgtgattgtaacttaaaaggagactttttgtttttattcttagatttgtagctctctgcatagtgagcagaaattgatgtaatatggtttaagagattcggtgttctctggtgtgtgctgcaaccacataattggtgatagataggtttagttatataagcaaatgtattagagataaggggagacatatttgatggtctttcgtttcgtaaacacacttttcttatgtgatatataaaagaagatttatc

SEQ ID NO: 14544 - DNA, 791 bp, Arabidopsis thaliana
  Clone ID: LIB22-031-D4_FLI
aagatgcagagtcatcatcatcttccggttcatctgttggtccatctgcctcagacacattagctgcaaagctactaggagccgctgataaatacaagttgcctagattaagtctaatgtgcgagtcagtgctctgcaaggatatatcagtagattccgttgcaaatattttggcgcttgctgaccgttacaatgcttccgccttgaaatccgtttgtctgaaattcgcagcagaaaatctcatcgctgttatgaggtcagatgggtttgattatctaagggaacactgcccgtcacttcagtctgagcttctgaaaacagttgcgggttgcgaagaggagttaagcggaggaggagggaagacgagaagcgtatggggccaattctcagacggtggagctgagacaaacggaagacaagcacagacttggggagatatcaatggaggagcagagagaagccagagtgtttgggtcgaagttgtgaacgctaatggaagcggtagaaacaataatgacaacaataacagtgatgacccaatggcagaactagaagattgagcaaataaaaggtaataaaaaagccaaaggacaatccgagtaagctgaagttaggatcagacatcatgaagcggagatcttgtaacttagtgtttccactgtcgaatactatgtggatcataggagacgatttagtattgttgttgtaatacgctttccgtgtaataattggagttactagtatgataaactaaaacactcatcatcaatataaattcagtaagcttgttc

SEQ ID NO: 14545 - DNA, 1382 bp, Arabidopsis thaliana
  Clone ID: LIB22-033-E9_FLI
acgagctctcttctccgtacggagacaccgagcaaaaactggcttcttacttcctccaagctctcttcaaccgcatgaccggttcaggcgaacgatgctaccgaaccatggtaacagctgcagccacagagaagacttgctccttcgagtcaacgcgaaaaactgtactaaagttccaagaagttagcccctgggccacgtttggacacgtggcggcaaacggagcaatcttggaagcagtagacggagaggcaaagatccacatcgttgacataagctccacgttttgcactcaatggccgactcttctagaagctttagccacaagatcagacgacacgcctcacctaaggctaaccacagttgtcgtggccaacaagtttgtcaacgatcaaacggcgtcgcatcggatgatgaaagagatcggaaaccgaatggagaaattcgctaggcttatgggagttcctttcaaatttaacattattcatcacgttggagatttatctgagtttgatctcaacgaactcgacgttaaaccagacgaagtcttggccattaactgcgtaggcgcgatgcatgggatcgcttcacgtggaagccctagagacgctgtgatatcgagtttccgacggttaagaccgaggattgtgacggtcgtagaagaagaagctgatcttgtcggagaagaagaaggtggctttgatgatgagttcttgagagggtttggagaatgtttacgatggtttagggtttgcttcgagtcatgggaagagagttttccaaggacgagcaacgagaggttgatgctagagcgtgcagcgggacgtgcgatcgttgatcttgtggcttgtgagccgtcggattccacggagaggcgagagacagcgaggaagtggtcgaggaggatgaggaatagtgggtttggagcggtggggtatagtgatgaggtggcggatgatgtcagagctttgttgaggagatataaagaaggtgtttggtcgatggtacagtgtcctgatgccgccggaatattcctttgttggagagatcagccggtggtttgggctagtgcgtggcggccaacgtaaagggttgtttttattttttcataaggaattcgcaagttcgatttttacttgagatggtttcacacgtgtggtgatggttgatgatgggctttgagattgagagagttacgattatgatgataatgcagttcataatatgaatttggattttggaataggactaattaagtaattctgatcattgaggtgggtatcaaggttcatacaattcgtgattttttgttttgtctttggtatttattaattttaaaaatccattttggaatgaaatttgtgattacttttgtttatccg

SEQ ID NO: 14546 - DNA, 2852 bp, Arabidopsis thaliana
  Clone ID: LIB22-033-G2_FLI
ctcatccaacagctcttctacgtgctctgatgaaggaaatgttgaaatcatggagagaaggaggatagagatggagaagaagaagaaaagaagagctgttactgtggtagcaatggaagaagataacttgaaagatgatgatgctcatagacttactctgaatcttggtggtaataatattgaggggaatggtgtgaaaaagacgaaacttggaggagggattccgagtcgggcgatttgttgtcaggtagacaactgtggagctgatttaagcaaagttaaggattatcatagacgtcataaggtctgtgagattcattctaaagctactactgcacttgttggaggaattatgcagcggttttgtcagcaatgtagtaggtttcatgtgcttgaagagtttgatgagggaaagagaagttgccgtagacgtttggctgggcataataagcgtagaagaaaagcaaatcctgatactataggcaatgggacttctatgagtgatgatcaaacaagcaattatatgttgattactctcttgaagatactctccaatattcattcgaatcagtcggatcaaacgggtgatcaggatctactgtctcatcttctaaagagccttgtaagccaagctggtgaacatatagggaggaatttagttgggcttctacagggtggaggaggactccaggcttctcaaaatattggaaacttatccgctttgctctcactcgagcaagcccctcgagaggatataaaacatcattcagtgtctgaaacgccttggcaagaagtgtatgccaatagtgctcaagagagagttgccccggataggtccgagaaacaagtcaaagtgaatgattttgatttgaatgacatctacatagactcagatgataccacagatatagagagatcatcacctcctccgacaaatccagctactagttctcttgattatcatcaagactcgcgtcagtctagtccacctcaaactagtaggaggaattcagattcagcttctgaccaatcaccttcaagttccagtggagatgcacagagccgtactgatcggattgtgttcaaactctttgggaaagagccgaatgattttccagttgccttacgaggacagattcttaactggttagcgcatactccaactgatatggagagctacattaaacctggttgtatcgttttgaccatttatcttcgtcaagatgaagcttcttgggaagaactttgttgtgatctgagtttcagcttgaggaggcttctagatctttcagatgatcctttatggactgatgggtggctttatcttagggtgcaaaaccaactcgcatttgcgtttaatggtcaggttgttcttgacacatctttacctctgagaagccatgattatagccaaatcattactgttagaccacttgctgtaacaaagaaagctcaatttacagtaaaaggcatcaatctccgtcgacctggcacaaggttactttgtactgttgaaggaacacacttggttcaggaagcaacacaaggagggatggaggagagagatgatctaaaggagaataatgagattgattttgtcaatttttcctgtgagatgcctattgcaagtggtcgaggtttcatggaaattgaagaccaaggtgggctaagcagtagtttcttccctttcatagtatctgaagacgaagatatttgttctgaaatccgaagactcgaaagcacattagagtttactggaactgattctgcaatgcaagcaatggatttcatccacgaaatcggttggcttctacacagaagtgaactcaagtcaagacttgcagcatcagatcataatccagaggatctgttttctttaatacggtttaagtttctaatagagttctcaatggaccgggaatggtgctgtgtgatgaagaagttattgaatattctattcgaagaaggcactgttgatccatctcctgatgctgcgttatcagaactgtgtcttcttcacagagccgtgaggaaaaattcaaaacccatggttgagatgcttcttagattcagtcccaagaagaagaatcagacattagccggtttgtttagacccgatgcagctggtccaggcggtttaacaccgcttcacattgcagctggtaaagacggttcagaagatgtgttggatgccctgactgaggatcctggaatgactggtattcaagcctggaaaaattcccgggacaataccggattcacaccagaagactatgcacgtttacgaggtcacttctcgtatattcatctggtgcaacggaaactcagtcggaaaccaatcgccaaagaacacgtggtggtcaacattcctgagtctttcaacattgagcacaaacaagaaaagaggagtccaatggattcttcaagcttggagataacacagataaaccaatgtaagctctgtgatcacaaacgtgtgtttgtcacaacgcaccacaagtctgttgcctacaggccagcaatgctttcgatggtagcgatagcagcggtttgcgtttgtgtcgctcttttgttcaagagttgcccggaagtgctatatgtctttcagccattcaggtgggaattacttgagtatggaacaagctagtaaaacttccctataccagacattgaaaaagaatcttctcaatagaagatgtgttggtgtgaaatctacgagtgtaattttatgtaacgtttaattatttttactagaatatgtatcattcagctttacaagattatatgtaatgtagctttatctgatgttaaacccccgaatttgtataactacgtttttgtgtgtttgttac

SEQ ID NO: 14547 - DNA, 1883 bp, Arabidopsis thaliana
  Clone ID: LIB22-034-F7_FLI
caaagagagagatagagatattatggggaagcaaggaccttgctaccactgtggagttacaaacacacctttgtggagaaatggaccaccagagaagccggtattgtgcaatgcgtgtggatcgcgttggaggacaaagggaacacttgtgaactacacaccgcttcatgctcgtgctgatggtgatgagaatgatgatcatcacaggtttcaaagaatgaagagcatttctttaggcaataagaacaaagagataaagatgctcaagaggaaagcaattcaagaaaacatcatcattaaaagaccggtctttgaattcagttatggtttgaaggcggctgtgatagaggaggatgctagtaatagatcgagttccggttcggctgtatcaaactctgagagctgtgcacagtttagcagtgcagatgggagtccatctcaatctaatgcgtgggacacaactgttccttgcaagaggaggacgtgtgtgggccgtcctaagtcctcttctgttgaaaagctcacaaaggacctttacaatattttacaagagcagcaatcgtcatgtctctcagtttcatcagaggaagatcttctttttgagaatgaaatgtcaatggtctcagttgagattggacatgggagtgttctgatgaagaatccccactcgtttgctcgggaagaggagtctgaagccagctcactctcttcgattgagaacaagtcctccatcagtgacgcatactcacattccgtgaagcgtgttgagattggagcagtgagaggttcatattatggtggacaaacaataaagcaagaacaattcaagagaaccaagtctcaaactgaaagagtgcatgtcctggggagtcatggttcaccactatgtagcatagatttgaaggatgttttcaactttgatgagttcatagaacaattcacagaggaagaacagaagaaactgatgaacttgcttcctcagattgactctgatgaccttcctcatagcctcagaatgatgtttgaaagtgctcagttcaaggacaacttttctttgtttcagcagctcattgctgatggtgtctttgatgtgtcttcttcctcgggggcaaaactcgaagaaatcaggacttttaagaagcttgctttgacagattttaacaaatctcgtttggtggaaagctataacctcctcaaggaacgcgaaaaagggaccggagattctgttactacaacttcaaaaagctcaatcccaaatgtacctaaaaatattgtaaccattaagaggcgctatgaaaaccaaatccaagtaaagtcagagtcaagggggctaatgaggagccccaaaagggtgatgaagatgaaagcaagccatgagacagagaacaatgtctcatgcttcagaccaagaagcttggcttctgtgtttgcacaagaaggtggctctgcagtgtttagctatgaaggtaattgcagttctgatcaagatctccttcttctggacttgccgtcaaacgggtcatttcctcaagcagagctacttcaccaactctgaaaggtcaaagctacaaaacctcattgagcttctcagagcttaaaggaaggattcttaagctctctatctctcttctttgatgagagatatactcttaagctttctgagaaaacgaccaaaatgaggtttctgctttagaaattggaatttgcagacataaaaaaaggaaggatatttatttgagtcttgcttgggcttctctttggtggttaagtttataaagtgggtcttataatatacatacatatacataaagcctcttctcttacctctctttctgtgacccttttaattttaaacttgaaagttccatcttttttggtttctt

SEQ ID NO: 14548 - DNA, 902 bp, Arabidopsis thaliana
  Clone ID: LIB22-037-A12_FLI
ctctcttgatcgttatggtccgttttacttcatcagtggcaatgaagataactgtaagaagggtcaaaagcttaatgtcgttgtcatatctgctaggattccatcaacggctcagtctcctcacgccgctgcaccgggaagctctacgccgggatcaatgactccgccgggaggagcccactcgcctaaatcttcctcccctgtttctccgacgacttctcctccgggatcgactactccgcctggaggagctcactcgcctaaatcttcatcagctgtctctccggcgacttctcctccaggatcaatggcgcctaaatccggctcccctgtttctccgacgacttcaccaccggcaccacctaaatccacgtcccctgtttccccatcctctgctccgatgacttcaccgccggcaccaatggcacctaaatcatcttcaactattcctccgtcttctgctccgatgacttcaccacctggatcaatggcacctaaatcttcatcccctgtttcaaactcacccaccgtttctccatcgttggctccgggaggctctacttcttcttcaccgtcagattctccgtcaggctcggcgatgggtccttcaggagatggtccatcagccgctggtgatatctctacgccggctggagctccagggcagaaaaaatcgtcggcgaatggtatgaccgttatgtcgattactacggttttaagtttggttttgaccatctttctgtcagcttaagaacacttgtgagacttgtttcatgtcggattcgatttgttcttgtttcggttgagtttccaactttgttttaaattgtttttggatcccagtttgattctgtattattcagtatagttggattgttttgttataaataatagacagttct

SEQ ID NO: 14549 - DNA, 941 bp, Arabidopsis thaliana
  Clone ID: LIB22-044-B8_FLI
cttattcgtgtccgcagaagaaacgagagaagagagagaagcaaaagaccttaccaagaatatttataacacacaaacatctagagacagagatagacatagagagagagcttgtggttgtggttgtgcgagataatatctagagatggggaagaagaagtgcgagttatgttgtggtgtagcgagaatgtattgtgagtcagatcaagcgagtttatgttgggattgtgacggtaaagttcacggagctaattttctggtggcgaaacacatgcgttgtcttctatgtagcgcgtgtcagtcacacacgccttggaaagcttctgggctgaatcttggcccaactgtttctatctgtgagtcttgtttagctcgtaagaagaataacaacagctccctcgccgggagggatcagaatcttaaccaagaagaagagatcattggttgtaacgacggagctgagtcttatgatgaggaaagcgatgaggatgaagaagaagaagaagtggagaatcaggttgttccggctgcggtggagcaagaacttccggtggtgagttcgtcgtcttcggttagtagtggtgaaggagatcaggtggtgaaaaggacgagacttgatttggatcttaacctctccgatgaggagaaccaatctagaccattgaaaagattatcgagagacgaaggtttgtcaagatcaactgttgtgatgaatagctcaatcgtgaaattacacggagggaggagaaaagcagagggatgtgatacatcatcgtcgtcttcgttttattgaaatcgccaaggaaagtagagattgtagccgttgatgattcttttgtttggttgattagattaatcctcatcgttcatttactaacaacaatacttttagtgagttgagttagtttaaaaacatttcaatataatgatttttttttgtg

SEQ ID NO: 14550 - DNA, 966 bp, Arabidopsis thaliana
  Clone ID: LIB22-055-D6_FLI
ctcgctgtccctccttctctttctcattcattgcaatgggcagaagatgctcacactgtggaaacgtaggacataactcaagaacatgttcttcttaccaaacaagagtagttaggctctttggtgttcatctagacaccacaagctcttctccgccgcctcctcctcctccctcgattttggccgctgcaataaagaaaagtttcagcatggattgcttgccggcatgttcctcctcttcctcttcctttgctggttatctctccgatggtctcgcccataaaacacctgaccgcaaaaaaggggttccatggacggcggaagagcaccggacgtttctaattggattagaaaagcttggaaaaggagattggagaggaatctctagaaacttcgtcgtcacaaaatccccgacacaagtggcaagtcatgctcaaaaatactttctccggcaaactaccactctccatcacaagagacgccgcaccagcctctttgatatggtttcggccggcaatgttgaagaaaatagtactactaagaggatatgtaatgatcatattgggtcgagctcaaaggttgtttggaaacaaggattactcaatcctcgtcttggatatccagatccgaaagtatcagtatccggctcgggtaactccggtggactcgatcttgagctgaagcttgcgtccattcaatctcctgaatcgaatattagacctattagcgttacgtgaatctatataacacgttatgatcagtttcattagaataattcaaatgtttacatatataatatcttatcgatcctatctaatttgattttgatttaacgttagttactttgataatttcgtcgatattgtttttttggttttttcattgtgagattttttgtcttggaagttggatccatacatatttctgtaaaactttatatttaaggtatatatatctagcgctcat

SEQ ID NO: 14551 - DNA, 1090 bp, Arabidopsis thaliana
  Clone ID: LIB22-055-F2_FLI
tggtggagagattgatttagatagagagtttgaatctatcttgaggagaagacgaagaagctcagggaatatattgcagttgcttcaagggattcgtgcagggattgcttctgagtatgaaagctctgataacaattgggataattctcgagagagggatagagttataatgattaatccgtataaccaatcgctagttgttccttcggatcagaatcagaatcatccttcattgacttcacttggagattacttcattggacctggtttagatcttttgcttcagcatttggctgagaatgatcctaataggcaagggactccacctgctcgtaaagaagctgttgaagctttaccaacggttaagataatggaacctttgcaatgttctgtttgtttggatgattttgagaaaggtacggaagctaaagagatgccttgtaagcataagtttcatgttcggtgtattgttccctggcttgagcttcatagttcttgtcctgtgtgtcgttttgagcttccttctagtgctgatgatgatgatgagactaagactgattccgagagagtgctgagaacaagaaatgttcgggaaacgagtaacggaaacgttgttgagaatgtgggaaatgcggatagaggaagagaggatgaggtgaggagtggaaatgggagacggttttcgtttccatggccgtttagtggattgttctcgtcttcttcttcttcgtcttcttcaacctctggatctcaatctggtgagaacaatttcttctcaagatcttctggttcttctcgctgagagcaaaacaatcaaaaactaaaacatcttggattttgttattgttcttcatcttttgttgttctctcatttttctagctattgaacttgttatttcctctgcatttcattctctgctttactgtacatagaaatgatgttctttcactcagactgttgaaaaacaaatatccattgttggtgtacagagatgatcaaatttcagtttccattgttttagttttcaagtatgaaattatctgtcaatcgagtccaaataatgacgaaatatatacaatgattcaatct

SEQ ID NO: 14552 - DNA, 1041 bp, Arabidopsis thaliana
  Clone ID: LIB22-059-E1_FLI
tttgtattatttgagtgtttttataaaaccatttttccatcttcctcatcaccttcccaagaagaagaacaccaaagaagaagaaaggttaataatgatgggcagtgtcgagctgaatctgagggagactgagctgtgtcttggtcttcccggtggagatacagtggctccggtaaccggaaacaagagagggttctcagagacggttgatctgaagctaaatctgaataatgagcctgcaaacaaggaaggatctacgactcatgacgtcgtgacttttgattccaaggagaagagtgcttgtcctaaagatccagccaaacctccggccaaggcacaagttgtgggatggccaccggtgagatcataccggaagaacgtgatggtttcctgccaaaaatcaagcggtggcccggaggcggcggcgttcgtgaaggtatcaatggacggagcaccgtacttgaggaaaatcgatttgaggatgtataaaagctacgatgagctttctaatgctttgtccaacatgttcagctcttttaccatgggcaaacatggaggagaagaaggaatgatagacttcatgaatgagaggaaattgatggatttggtgaatagctgggactatgttccctcttatgaagacaaagacggtgattggatgctcgtcggcgacgttccttggccaatgttcgtcgatacatgcaagcgtttacgtctcatgaaaggatcggatgccattggtctcgctccgagggcgatggagaagtgcaagagcagagcttgaagtcaaattaaaaggataagtggtatcgattatatatttgattaacacattgattggtgttaattgctcttttttttcttacgatgaaatacattgttcagtttcttttgattgtctgtgttttgatctggatttggtatgtagatatagtttgtatgctattatgtgtaatgaacttaagttaaatatttgagacatttgtaatggaaaatgtgtaataatttgaacatcctattcctatgtatatgtttgtcttt

SEQ ID NO: 14553 - DNA, 1570 bp, Arabidopsis thaliana
  Clone ID: LIB22-059-H4_FLI
ctgtaagcaacttgggcgaaatgggtctatattgttggttttagatgatgtttgggctgaggaagagtccttgctacaaaagtttctgattcagctacctgattacaagattttggtgacttctcggtttgagttcacaagttttggtcccacttttcatttgaaacccttgatagatgacgaggtcgaatgcagagatgagatagaagaaaatgaaaagcttccagaggtgaatcctcctcttagcatgtgtggtggttgcaactctgcggttaaacatgaagaatctgtgaatattttgggtgttctttggcatcctggatgcttctgctgtcgttcttgtgacaaaccaattgctattcatgagctcgagaaccatgtttcaaactcaagaggcaagtttcacaaatcctgctatgaacggtactgctatgtctgcaaagagaagaagatgaaaacgtacaatattcatccgttttgggaggaaagatactgccctgttcatgaagctgatggaactcccaaatgctgcagttgcgaaaggttagagcctaggggaacaaagtatggaaagcttagtgatggtcgatggctatgcctagaatgtgggaaatccgctatggattctgatgaatgccagcctttgtactttgacatgcgtgatttcttcgaaagcttaaacatgaagattgagaaagaatttcctttaattttggtgcggaaagaactgctcaataaaaaggaagagaaaattgacaatcattatgaggtgttaatcagagcttattgcatgtctgaacagaagatcatgacatatgtctcagaggagccaaggacgggtcagaacaagcagcttatagacatggatacggaacctcaaggggttgttcatgagtgcaaggtcactgcaattctcatcctatatggacttcctagattgctaacaggatatatcttggctcacgagatgatgcatgcttggcttagactcaatggacatatgaacctgaacaacattttggaagaaggaatatgccaagtgctaggtcacctgtggttggagtctcagacatacgccactgctgatactactgcagatgcagcatcagcttcttcttcttcttcccgcactcctccagctgctagtgcctcaaagaaaggtgagtggtctgatttcgacaagaaactggtggagttttgcaagaatcagatagaaacagacgaatcaccggtctacggtcttggattcaggacagttaacgagatggtgacaaactccagcctccaggaaaccctcaaggagattcttcgccggaggtaaagacgatcccagattcaaagttatgaattgccatacaagacacgtcgacacatacataccaataccatatacatatagtcatatatatacagagccatgttttcaagctatcactttttttcggcgtttccttcttttggtgtgttcttttatttattttgggattgctgcttctatgttgctgtgtgtaaactgtttcttcttcgttttcccgtaaagttggaacctttagaggaccttgcgttaagc

SEQ ID NO: 14554 - DNA, 711 bp, Arabidopsis thaliana
  Clone ID: LIB22-061-A9_FLI
gcaggagtgaatcgcaaaaccaatttggaggattctttctgaggggtttctcagtgagaaatggcttcgaaacggatcttgaaggagctgaaggatctccagaaagaccctccaacctcctgcagtgcaggtccagttgctgaagacatgtttcattggcaaactactgattcgccgcttggtaaaggattgccctgggttctgtatcacggcgtgcataaagatcttcgaatcaatgtagtttgccccggaagagatgcagctttagggatcgatagtgttggaactgttccagcttctctcataacttttgcttccatccaagcattaaaacctgacatgctaatatccttaccctgtacccatagtttccattcttcttgcttaaacccttggcttagagcttgtggagattgtccttgttgccgtagagccatagcaaaggaatagaaacttgtaaatagaatctttgcctaaccattaggccatagccatacacatcttctcttcttcttgctatagacatccttaaaacgatcttctgagttttgtcgcccatgagtgttttttttactgtcacatgtttgtaatggtttttgttgtgccattaggcagttcaagcgttgatatcgtatggtgtgaatctttttagttttattcactgtgatctctcttttaatgtcttgttggttatatgaaagagacttttcc

SEQ ID NO: 14555 - DNA, 1207 bp, Arabidopsis thaliana
  Clone ID: LIB22-061-E5_FLI
aacagctaaggtcttcttcttatgaccttgatgtgaagaaaccacaagatgttgttcttcctgggagtttgagtttgttgggtgaagcttatgatcgatgcggtgaagtttgcgctgaatatgctaagacgttttatcttggaactttgcttatgacacccgaaaggcgaaaggcgatttgggcaatctacgtttggtgtagaagaactgatgaacttgtggatgggccaaatgcttcacatataactcccatggctttagatagatgggaagcaaggttagaagatcttttccgtggtcgtcctttcgatatgcttgatgctgctctcgctgatacagttgctagatacccggtcgatattcagccatttcgagacatgatcgaaggaatgagaatggacttgaagaaatcgagataccagaacttcgatgatctatacctttactgctactacgtcgctggaaccgtcggattgatgagcgttccggttatgggaatcgatcctaagtcgaaagcaacaaccgaaagtgtttacaacgctgccttggcccttggtatagccaatcagcttactaacatactcagagacgtaggcgaagatgcgagaagaggaagggtttatctgcctcaggatgaattggctcaggctggtctttcagatgaagacatattcgccggaaaagtaactgataaatggagaaacttcatgaaaatgcagcttaaacgagcaagaatgttcttcgacgaagctgagaaaggcgtcaccgagctcagtgccgctagcagatggcctgtatgggcttcattgctattgtacaggagaatactggacgagattgaagcgaatgattacaacaattttactaagagagcttatgtggggaaagtcaagaaaattgcagctttgccattggcttatgctaaatcagtactaaagacttcaagttcaagactatcgatatgagagcgagaggaaagtggaacaaaaacaacctaagagcgctttttgtgattaagaaaaaacttaggctcgaatttattatgttaactaatatatacatattaatggggaagcaaattcttataatgttacattatctttctgaatgtaaaaaagtatttttttttttaattttattttagttatagttctcttggcctaatgaggggatatacaatttttggttgatgaaataatcttgtgat

SEQ ID NO: 14556 - DNA, 1078 bp, Arabidopsis thaliana
  Clone ID: LIB22-061-F6_FLI
atttcacaattttcttgtgattttctctcagtttcttatttcgtttcataacatggatgccatgagtagcgtagacgagagctctacaactacagattccattccggcgagaaagtcatcgtctccggcgagtttactatatagaatgggaagcggaacaagcgtggtacttgattcagagaacggtgtcgaagtcgaagtcgaagccgaatcaagaaagcttccttcttcaagattcaaaggtgttgttcctcaaccaaatggaagatggggagctcagatttacgagaaacatcaacgcgtgtggcttggtactttcaacgaggaagacgaagcagctcgtgcttacgacgtcgcggctcaccgtttccgtggccgcgatgccgttactaatttcaaagacacgacgttcgaagaagaggttgagttcttaaacgcgcattcgaaatcagagatcgtagatatgttgagaaaacacacttacaaagaagagttagaccaaaggaaacgtaaccgtgacggtaacggaaaagagacgacggcgtttgctttggcttcgatggtggttatgacggggtttaaaacggcggagttactgtttgagaaaacggtaacgccaagtgacgtcgggaaactaaaccgtttagttataccaaaacaccaagcggagaaacattttccgttaccgttaggtaataataacgtctccgttaaaggtatgctgttgaatttcgaagacgttaacgggaaagtgtggaggttccgttactcttattggaatagtagtcaaagttatgtgttgaccaaaggttggagtagattcgttaaagagaagagactttgtgctggtgatttgatcagttttaaaagatccaacgatcaagatcaaaaattctttatcgggtggaaatcgaaatccgggttggatctagagacgggtcgggttatgagattgtttggggttgatatttctttaaacgccgtcgttgtagtgaaggaaacaacggaggtgttaatgtcgtcgttaaggtgtaagaagcaacgagttttgtaataacaatttaacaacttgggaaag

SEQ ID NO: 14557 - DNA, 712 bp, Arabidopsis thaliana
  Clone ID: LIB22-061-G2_FLI
ctttccacaacattcatacgcaactcccttaaatcttgaaacgaccaatttcttcaaaacaatagtttgtttgcgatggcgacagaacaagaagctgaagttggaacagagacatcctctgtttccggaaggtttttgaggaacagagatttatatctcttcttgccttttctcttaggcttctctgatcaagaatcatcaaacggagatgatgatgatgttgcttcatcgcgtgagagaatcattttagtcaacccttttacacaaggaatgattgtgctcgaaggctcatcaggaatgaatcctctgcttcgtagcttactggagtcacgtgaggaaggtcgtcctcctgcgtccaaggcttccatcgatgcgatgccgatcgttgagattgatggctgtgaaggagagtgtgtgatctgtttggaggagtggaagtccgaggagacggtgaaggagatgccgtgtaagcataggtttcacggtggatgtatagagaaatggttagggtttcatgggtcgtgtcctgtttgtaggtacgagatgcctgttgatggagatgagattgggaagaaaagaaacgatgggaatgagatttgggttaggttcagtttcaacgatggtcggagaattagagatttttctgcgcaggacggtggaaacagtgatggtgttgagtccgagaattaggatttacataagaagcttttgt

SEQ ID NO: 14558 - DNA, 952 bp, Arabidopsis thaliana
  Clone ID: LIB22-063-A3_FLI
ttctcatgtcttcttctctcctcgacctttgagggtttttttgttcgttgtgatggcgagagaaaagattcagatcaggaagatcgacaacgcaacggcgagacaagtgacgttttcgaaacgaagaagagggcttttcaagaaagctgaagaactctccgttctctgcgacgccgatgtcgctctcatcatcttctcttccaccggaaaactgttcgagttctgtagctccagcatgaaggaagtcctagagaggcataacttgcagtcaaagaacttggagaagcttgatcagccatctcttgagttacagctggttgagaacagtgatcacgcccgaatgagtaaagaaattgcggacaagagccaccgactaaggcaaatgagaggagaggaacttcaaggacttgacattgaagagcttcagcagctagagaaggcccttgaaactggtttgacgcgtgtgattgaaacaaagagtgacaagattatgagtgagatcagcgaacttcagaaaaagggaatgcaattgatggatgagaacaagcggttgaggcagcaaggaacgcaactaacggaagagaacgagcgacttggcatgcaaatatgtaacaatgtgcatgcacacggtggtgctgaatcggagaacgctgctgtgtacgaggaaggacagtcgtcggagtctattactaacgccggaaactctaccggagcgcctgttgactccgagagctccgacacttcccttaggctcggcttaccgtatggtggttagagatggaacaattcaaagaagttgatggagtgaggagagtaatgtaaatctttttaactcggtagtaacaagagacaatgtctaagtagtgaattctcaaatgtttgtgtaagtttctgcctatggaagaggctttcatttttatgattttcactatgtatgatctctcttcactgc

SEQ ID NO: 14559 - DNA, 1525 bp, Arabidopsis thaliana
  Clone ID: LIB22-063-C11_FLI
cttttctaaagttttgtgagagagaagagatctaaaaaaatccacaattttgttcaaatcttggagttaaatgctgaattttaggccttgttgcttagatttatggcttaaagtttcaaacttttcattggatatgtgagaagaaaatgtcaggatctgagacgggtttaatggcggcgaccagagaatcaatgcaatttacaatggctctccaccagcagcagcaacacagtcaagctcaacctcagcagtctcagaacaggccattgtcattcggtggagacgacggaactgctctttacaagcagccgatgagatcagtatcaccaccgcagcagtaccaacccaactcagctggtgagaattctgtcttgaacatgaacttgcccggaggtgagtctggaggcatgactggaactggaagtgagccagtgaaaaagaggagaggtagaccgaggaaatatgggcctgatagtggtgaaatgtcacttggtttgaatcctggagctccttctttcactgtcagccaacctagtagcggcggcgatggaggagagaagaagagaggaagacctcctggttcttctagcaaaaggctcaagcttcaagctttaggctcgactggaatcggatttacgcctcatgtacttaccgtgctggctggagaggatgtatcatccaagataatggcgttaactcataatggaccccgtgctgtgtgtgtcttgtctgcaaatggagccatctccaatgtgactctccgccagtctgccacatccggtggaactgttacatatgaggggagatttgagattctgtctttatcgggatctttccatttgctggagaacaatggtcaaagaagcaggacgggaggtctaagcgtgtcattatcaagtccggatggtaatgtcctcggtggcagtgtagctggtcttcttatagcagcatcacctgttcagattgttgttgggagtttcttaccagacggagaaaaagaaccaaaacagcatgtgggacaaatgggactgtcgtcacccgtattaccgcgtgtggccccaacgcaggtgctgatgactccaagtagcccacaatctcgaggcacaatgagtgagtcatcttgtggaggaggacatggaagccctattcatcagagcactggaggaccttacaataacaccattaacatgccctggaagtagccaagtgatctgtgtcggcttaaaaccaacaacttcccgttattagagtgatttatttctacatttggtttagactttctagttctgatggttatttctacagttggtttagactttctagttctgttcagacaaaaggagtttgataaattgaccgacctattttgtgtgtttgaggtactttcagaaccataggtgttcagaaattagaatgttctgtttaaggtagatcttttattttatgttgaggtactttcggaaccataagttgttcagaaattggaatatcctgattaatgtagatcttttattttgtgtttttc

SEQ ID NO: 14560 - DNA, 1578 bp, Arabidopsis thaliana
  Clone ID: LIB22-063-C6_FLI
ggcaagagcagtgaaagtgtaactcgaaagaagcttaaaactgatgatgttgttggcatgaatgtgtctcaaaagacaacgttgatcgtttgtccaccttctgtgatttcagcatggataacacagttagaggagcatactgtaccgggaatcttgaaggtgtatatgtatcatggtggcgaaaggacagacgatgttaatgagcttatgaagtatgacatagtgttgactacttacggcactttagctgttgaggaatcgtgggaagattctcctgtaaagaaaatggagtggctgagaataattcttgatgaggcacacaccattaagaatgcaaatgctcaacagagccgagtagtttgtaagttgaaggcttcccgcagatgggctgtcacaggaactcctattcagaatggttcatttgatttgtactctttgatggcctttctccggtttgagccattttcgattaagagttattggcaaagtttgatacaacgcccgcttggccaagggaataaaaagggtctttcacgtctgcaggttttaatggcgacaatttcgttaagaagaacaaaagaaaagagtttgattggtttaccgcctaagactgttgaaacttgttatgttgagctttctccggaagaacgtcagttatatgatcacatggaaggagaagcgaaaggtgttgtgcagaatcttataaataatggaagcttgatgcgcaactactcaacagttttgagtataatcttacggcttagacagctttgcgatgacatgtctctatgccctccagaattaagatcttttaccacttctacatctgtagaagatgtgactgataagccagagctactgcaaaagctggttgcagcattgcaagatggcgaagattttgactgtccaatctgcatttcgccaccaacaaacatcatcatcactcgatgtgcccacatcttttgcagggcttgtatccttcaaactcttcaaagaagtaaaccattgtgccctctttgccttggctcccttacccaatctgatctctacaatgctccgcctcctcctccggattcttccaataccgatggagaagacgctaaatcttcaaccaaatcctcaaaggtctcagctttactatccctgctcatggcatcgagacaagaaaaccccaacacaaagtctgttgtgttctctcaattcaggaagatgctgcttttactagaaactccactaaaagctgcgggtttcaccatcttgcgcttggatggagcaatgactgtgaagaaacggacccaagtcattggagaatttgggaatccagagttaaccggacctgtggtgttgcttgcgagcctcaaggcctctggtactggcataaacctaactgcagcctcaagggtttacttgtttgacccgtggtggaaccctgcagttgaagaacaggccatggacaggattcataggatcgggcagaaacaagaggttaaaatgataaggatgattgcgagaaacagtatcgaagagagggtccttgagcttcagcagaagaagaagaatctagcaaacgaagctttt

SEQ ID NO: 14561 - DNA, 2140 bp, Arabidopsis thaliana
  Clone ID: LIB22-063-C9_FLI
ttcagcttcacctggtgtttcaattagagggagagtaagaaagatggcaaagtggaaaccagatagtgataatgaaagtgatttggagtctgaagctgactctgctgacgattctaatgattctgatgatgagttccagatatgtcagatatgcagtggggaagatgaaaggaagaagttgctccattgttctgaatgtgacaagctttttcatccggactgtgtggttcctccagttatagacttaccatctgaagcgtggatttgcttttcttgtaaggaaaagacagaggagtacattcaagcaagacgtctttacattgccgaattgcagaaaaggtatgaagcagcgcttgaacgaaaatcaaagatcatagagatcatccgttctctgaatcttccaaacaatcctttggatgacatcgtcgatcagcttggaggccctgaaaaagttgcagaaatgacgggcaggcgaggtatgcttgtaagagcatcgaatgggaaaggtgttacatatcaagcaagaaacacaaaggatattaccatggaaatggtcaacatgcacgagaagcaactatttatggatggtaaaaagttggttgccattatttctgaagctgggtcagctggtgtttcgttgcaagcagatagaagggcagtaaatcagaaaagaagggttcacttgactttagagcttccctggagtgctgatcgtgcaattcagcaatttggaagaactcaccggtcaaatcagacatctgcacctgaatatagactactcttcactaatctcggtggggaacgccgctttgcctctattgttgcaaagagactagaaacacttggtgctttaacacagggagaccgcagggctgggccctccgggccttctttgagtgcgtataattatgatagtaactttggtaaaaaatccttgatggtgatgtatcgaggcataatggagcaggagaaactacctgttcttcctcctggatgctcgattgatgaacccgaaacagttaaagagtttttgaccaaggcaagggctgctcttgttgcggttggaattgttagggacagtgttctggccaatgggaaagatgttggaaggttttcaggacgtattattgattctgacatgcatgatgttggacgatttttgaatcgcctcttaggattgccacctgatatccagaataggctgtttgaattgtttactagtatattagacgttcttgtacataatgctcggatagaaggaagttttgactcaggaattgtggatatgaaagctaatagtgttgagctactgagcactccaaagaccgtccatgttgatcaaatgtctggtgcctcaactatgctctttacttttactctagatcgtggtgtaacatgggagtctgcgagttcaatgctagagggaaagagaagggacgggcttggttcagctaatgatggcttttttgaatctaaaagggaatggttaggaagacggcacttcatattagcatttgagagtgccgcttctgggttgtttaagattgtacgtcctgctgtaggagagtcgatcagggagatgtctctttcagagttgaaaactaaataccgaaaactatcttctctggagaaggctcgtactggttgggaggacgagtacgaagtttcatcaaaacagtgtatgcatggacccaagtgtaagcttggggagtattgcacggttggacgtaggatacaggaagtaaacgttgtgggtggccttattcttcccatctggggaaccatcgagaaagctctctccaaacaagcccgtcacagccacaagagaattcgagttatacgcatagagactacgacggataatcagcggatagtgggcctctccatcccaaatgcagctgtagaaactgttttacaagatttagcatgggttcaagagattgatgattaagacaacgagtatttataagaagcatacaccctcaaagctccacaatcaagttcccatgcctattttgtattttctttatttaagaaaaagaggaaaaagacacttgactttcatttttgtgtatatcacatgacaaattggcaagatgatacatagatgtaatattatttatctaacaagattcattct

SEQ ID NO: 14562 - DNA, 1450 bp, Arabidopsis thaliana
  Clone ID: LIB22-063-H9_FLI
ctatataaaaaaaaaaaagtgagagagagagcaaatctgtgtgatggaagttgctcttgagtttgggattatttatcttttcaatatcatttgatgaagaaggatggtgagatgggaagaagtgatgtcaggaggagtaggagatgaaagagagacaacgttggagtggtgaagaagatgcattgttacgtgcttacgttagacagttcggtccgagagaatggcatcttgtgtctgagcgtatgaacaaacctttgaaccgtgacgccaagtcttgtttagagagatggaagaattatcttaagccagggatcaagaaagggtctttgacagaggaagagcagaggcttgtgatccgtcttcaggagaaacacggcaacaagtggaagaagattgctgctgaggttcccgggaggacggcaaagcggttagggaagtggtgggaagtgtttaaggagaagcaacagagagaagagaaagagagtaacaagagagttgagcctattgacgagagtaagtacgatcggattctcgagagtttcgctgagaagcttgtcaaagagcggtctaacgttgtccctgctgctgccgctgctgcaacggttgtgatggctaattcgaatggagggtttttacattctgaacaacaagttcagcctcctaacccagtgatcccgccttggttagctacttctaacaatgggaacaatgttgttgcaaggcctccctcggtaactttgacattatcgccttccacagtggctgcagctgcgcctcaaccgccaatcccgtggctgcagcagcaacagcctgagagagcagagaacggtccagggggacttgtgttagggagtatgatgccgtcttgtagtgggagtagcgagagtgtgttcttgtcagagcttgtggagtgttgtagagagttggaggaagggcaccgagcttgggcagaccataagaaagaggctgcatggaggctaagaaggctggagctgcagctagagtcagagaagacgtgtagacaaagggagaagatggaggagattgaggcaaagatgaaagctcttagggaagagcagaagaacgcaatggagaagatcgaaggagagtacagagaacagctcgttggtttgaggcgagacgcagaggccaaagaccagaaactggctgatcaatggacctctaggcatatcagactcaccaagtttcttgaacaacaaatgggttgcagattagaccgcccctgaaccgtctcctaaactctttgttgtaacttgtaatgtaatgtaaggttttttttttgtttttttttgtttttttttgtctttgatcatttgggtgtctccaatgtttacttagacttttgggttccttacctcagctttgtatttgtttcttttacctttgtgttccatttatcacttcagtttatccatggctttgttttctc

SEQ ID NO: 14563 - DNA, 1565 bp, Arabidopsis thaliana
  Clone ID: LIB22-075-G6_FLI
caggaagtgttcaaaggaacgaaatacacttcttcttccatttgatgtctgtggtccgaatgaaaaatatctctgtattaaccagaaacgtgtttcataagcatctttaactcttcagctctcaaattcttcatgaatatctctgcttatcgatcaagtgagagcaaatgcaatttttaagagccagctattggatctataactgaagaggatatatatagagatgatgagttcttcttctccaacacaacttgcatctttaagagacatgggaatctatgagccatttcaacaaattgtcggttggggaaatgttttcaaatctgatatcaatgatcatagtcccaatactgttacttcctctattattcaggttgatcctagaattgatgatcacaacaacaacatcaagataaattatgattcttctcataaccagatcgaagcagaacaaccttctagtaatgataatcaagatgatgatggcaggattcatgataagatgaaacggcgtttagcgcagaaccgagaagcggctcgcaaaagtcgtttgagaaagaaggcttatgttcagcagttagaggaaagccggttaaagttatcgcagttagagcaagaactcgaaaaggttaagcagcagggccatttaggaccatctgggagtattaacacagggattgcatcatttgagatggaatattcacactggctacaagaacaaagcagaagagttagcgaactacgaacagcgcttcaatctcatataagcgacatagaactcaagatgctagtagagagttgcttgaaccattacgctaatcttttccaaatgaaatccgatgcagcaaaagccgatgttttctacttgatatcgggaatgtggcgaacttcaaccgaaagattcttccaatggattggagggtttcgtccatccgaacttttaaacgttgtgatgccttatcttcaaccattaacggatcaacaaatcttggaagtgagaaacctccaacaatcatcacaacaagcagaggatgctctgtctcaagggattgataaacttcaacagagtttagctgaaagcattgtgattgatgcggttatcgagtccacgcattatcccactcacatggctgcagctatagagaatcttcaagcattagaaggatttgtgaatcaagcagatcatctgaggcaacaaactttgcaacaaatggcgaagatcttaacgacaagacaatcggctcgaggtttactagctttaggagagtatcttcatagacttcgtgctcttagttctctttgggcagctcgtccacaagaaccaacttaaaagaggaacttattaaaactttaaaaacaagaaacagcagaatcaaaagtcttgaagaagcatactcatcacaaagcttggaaggatgttttaaaaaagatctttgttaattaagtagagtgagattctcttgattagaactttatggtttttgctttatgaagtatctctccagagaagattgtaaatttgggttgaaactttgtaatatatttagatacaacaaataagtttg

SEQ ID NO: 14564 - DNA, 828 bp, Arabidopsis thaliana
  Clone ID: LIB22-075-H8_FLI
catctgttaaaaaagtttgaattatttgatcataaaatgttatgttcataactttgattatattttctaatgtatttttgctaaaagagtttaaagttaatcacttggagatgaaagttagtaactttagtggatcaatctcttttttcttctttgcaggggatattacagatgtagtagctcaaaaggatgtccggcgaggaagcaggtggagagaagccgtgtggacccttctaagcttatgattacttacgcctgcgaccacaatcaccctttcccttcctcctccgctaacaccaaatcccaccaccgctcctccgtcgtcctcaaaaccgcaaagaaagaggaagaatacgaagaggaggaagaagaactaaccgtcaccgccgcagaggaaccaccggcgggacttgatctaagccacgtagactcaccgttgctattaggcggctgctacagcgaaatcggagagttcgggtggttctacgacgcgtcgatctcatcatcatctggttcttcgaatttcctcgacgtaactctagagagaggtttttcagtaggccaagaggaagatgagtctttgttcggtgatctcggtgatttacctgattgcgcctccgtgttccgccgtgggactgttgcgacggaggagcaacatcgaagatgtgattttggcgccattcctttctgtgatagttctagatgagtttgtgtgtgtagccaaaaccaaaagaaaaaaacacaatttttttattttccactgtaaaggtgtatcaatggtggattcatttttttaaaaaaggaaacccaaataataaatttaatatc

SEQ ID NO: 14565 - DNA, 1368 bp, Arabidopsis thaliana
  Clone ID: LIB22-079-G7_FLI
tcgtcgtcatttctctctctaaccccttctctcttcagtctctctctctctagacgatctctatcttgaataaaataccgataatgacctcaaccaatccggtggtcgccgaagtaataccggcggaaacttctacagatgctacagagacgacgattgcaacgacggaagctggtgaagcaccggagaagaaggtgaggaaagcttacacaatcaccaagtctagagagagttggactgaaggagaacacgacaagtttctggaagctcttcaattgtttgatcgtgactggaaaaagatagaagattttgttggttcaaagacagttattcagatcaggagccatgcccaaaaatactttctaaaggtccaaaaaaatgggactttagcacatgttccaccccctaggcctaagcgcaaagctgctcatccatatcctcaaaaggcatcgaaaaatgctcaaatgtcgcttcacgtttccatgtcctttcctactcaaataaataacctgcctggatatactccatgggatgatgatacatctgcattgttaaacattgctgtaagtggggttattccaccagaagatgaacttgatactctttgtggagcagaagttgatgttggatcaaatgacatgataagtgaaactagtccttcagcatctggtatcggaagctcaagcagaacactatcagattctaagggtttgagactggcgaaacaagctccctcaatgcatggtcttcctgattttgctgaggtttataacttcattgggagtgtgttcgatcctgacagcaaaggccgcatgaaaaagctcaaggaaatggatcctataaatttcgaaactgttttgctgttgatgagaaacctcacagtgaacttgtcaaaccctgactttgaacctacttctgaatatgttgatgctgcagaggaaggtcatgaacacttaagctcttagctgtttgtgcactcaacaagttatatatcttcttgacgacttcttgctcgcaacaactctctaccagctatcaaatgcattctacggttgttgtctgaggagaacataactgagtcgtcgtcacaaacaagaggaacatatgcagtttcggtcagaaccagtcgtgtgaatggtagatatatgtatgtgtgtgtagaaaatggttaccaattgtatcttctttttgataattattttttcatgccttttgtaatatgtaagtttctttacctcgttctctgattggttattttctggttatctgtttaaccaaaagctatgtaacacagtagcaaattgttacttaactcggaagtgagatacataactctgttgtattgcacttgtatcaagcgttaacgtc

SEQ ID NO: 14566 - DNA, 1186 bp, Arabidopsis thaliana
  Clone ID: LIB22-080-G9_FLI
attactgatgatgattttagagatcttgtggacaaggttcctccaggttgcagaatgacaatcatttcagactcttgtcacagtggtggcctaatcgacgaagccaaggagcagattggagagagcactaagaaagaagccgaggacgaagatgaatctgaagaatcttcttcaagattcgggtttaggaagttcttgcgcagcaaagtggaaggcgccatcgagtctcgagggtttcacattggagggaacaagaaggatgaagatgaggcggaagaaatcgagactaaggagattgagcttgaagacggagaaacgatccatgccaaagacaaatctcttcctctgcagaccttgattgatattctcaagcagcaaacagggaatgataatatcgaagttgggaaaatcaggccaagcctttttgatgcgtttggtgatgattcgagcccgaaagtgaagaagtttatgaaagtgatcttaggtaagcttcaggctggaaatggagaagaaggtggattaatgggaatgcttggcaaattggcttcagggtttcttgagggtaaactaaacgatgaagactatgtgaaacccgctatgcagacacacgttgggagtaaagaagaggtttatgctggtggatcaagaggttcggttccgcttccagacagcgggatactgatcagcggttgccaaaccgatcagacctctgctgatgcgactccagcggggaaaccaactgaggcttatggagcgatgagcaattcgatacagacgatattggaggagacagacggtgagatatcaaacagagaaatggttacaagggctaggaaggcattgaagaagcaagggtttactcagcagccaggtttgtattgccatgatggttatgccaacgctcctttcatctgttgaaaacagaggttttattgaatgttttttactacgtacgacacgttgattgaagtttctggtcggaaaaataagcctgttttttttttttgctgtttgatggcatttatgtaatttacaagttatgtgtgttgtgttctgtgaaacactaaaattcttcttgttttattgagatctattatgttggttgtgaaattattttttgtttttcttttcttgttaactctctgtattctgcacatcaataagaaaaagttttttttaacggaac

SEQ ID NO: 14567 - DNA, 899 bp, Arabidopsis thaliana
  Clone ID: LIB22-081-B1_FLI
gattctttctctctttcgtaaaaatggcgagttttgaggaaagctctgatttggaagctatacagagccatctcttagaagacttgttggtttgtgatggtttcatgggagattttgacttcgatgcttcttttgtctcaggactttggtgtatagaaccacacgttcctaaacaagaacctgattctccagttcttgatccggattctttcgtcaacgagttcttgcaagtggaaggggaatcatcatcatcatcatcaccagagctgaattcatcgtcatcaacatatgagactgatcagagtgtgaaaaaggcagagaggttcgaagaagaagtagatgctagacattaccgaggagtgaggcgaaggccgtgggggaaatttgcagcagagattcgagatccagcaaagaaaggatcaagaatctggctaggaacatttgagagtgatgttgatgctgcaagagcctatgactgtgcagctttcaagctccggggaagaaaagccgtgctcaacttccctcttgacgccgggaaatatgaagctccagcgaattcaggaaggaaaaggaagagaagtgatgtgcatgaagagcttcaaagaactcagagcaattcatcttcatcttcctgtgatgcattttagcatattaagagtgtgagcagtttccttaagttgtataaagtaattgtacagaggaaacgaattgtgtaggtttagtgtgcttgcaagttgcaacaaatgtgtatggatgttctgtttcttcatgtccctaagatttagaaacatcttcttatttccaagaaagttattcagtttccaggtctctaaacaacctaactagttattagatgttgtaatccattagtcaatggtttatgaaacaatcaagttctc

SEQ ID NO: 14568 - DNA, 968 bp, Arabidopsis thaliana
  Clone ID: LIB22-082-F3_FLI
cttgtctcctccggccaaccttaacccttaagcgaacggtgttcctttgcggattgcgatcgttccgtcgatcccttcatcgcccgatctaaatctctaatcgtgtcggagattaaaagcagaggttttgtggtgaatcatgtctgatgtcccttcttgttctagcggtaatgatacaaacaacaatgattcgagtaacttcgaatgtaacatctgcttagacttggctcaagatcctattgtcactctctgtggtcacttgttctgttggccttgtttatacaaatggctccatctccattctcaatctaaggactgtcctgtttgcaaagccgtgatcgaagaagacagattggttcctttgtacggtagaggtaaatcgtctgctgaccctcggtccaagtccattccgggtctcgaagtgcctaaccgtccatcgggacagagacccgaaactgcacaacctcctgatcctaaccatggttttgctcatcatcatgggtttggagggttcatgggaggttttgctgctccgatggcgagtgcgcggttcgggaatgttacattgtctgcagcgtttggcggtttgattccttctttgttcaacctccatttccatggtttccctgatgcagccatgtatggagctgctgcttctggcggcttccctcacggtttctcgaatccgtttcatggaggacactcgcatatgcatagttaccagcggcacacgggtcgacaaggacaacaagaccatcacttgaggatattgttactcattgttttcgtcgttgttgtgttttctctcttcttgagctagtgaggaaatcgatttagctaactgtatttcgctttttattctagattttattgcataaaaacatgggaaaatatgtgctgtgagttggcttgtaaactgctactttagcaaattgttcatatattaataaaacctgtcggattctctt

SEQ ID NO: 14569 - DNA, 1930 bp, Arabidopsis thaliana
  Clone ID: LIB22-085-C12_FLI
caaagacaaagaaaacgaaaatgttggcaatatttcagaaagcttttgctcacccaccggaagaactcaacagtccggcttctcatttctccggcaaaactcctaaacttcccggcgaaactctctccgacttcctctctcatcaccaaaacaatgctttctctatgaacttcggcgactccgccgtcttagcttacgctcgccaagaaacctctcttcgtcaaaggtatatactaatatacataaaacacatatatacaagtcaaatctctaaatccaattcatagattcataatggttttgttgttttgctcaggttgttctgtggactagatgggatctactgtatgtttctagggagattgaataatctctgtacattgaatcgacaatacggtttatctgggaagaactcaaacgaggcaatgtttgtgatcgaagcttatcgaacacttcgtgatcgtggtccttacccagcagatcaagttcttagaggtcttgagggaagcttcgctttcgttgtctacgatactcaaacttcctctgttttctcagctctgagttctgatggaggagagagtctttactggggaatttctggagacggatctgttgtaatgtctgatgatattcagatcataaagcaaggctgtgctaaatcgtttgctcctttccctaatggtaaaccaaaacttaagtttttcattagccctataaagaaagaaacatacttttgagtttagatcttgatgtgtgttttgtgtttttgttattgcaggatgtatgtttcatagtgagacagggcttaagagctttgaccatccgactaatatgatgaaggcaatgccgaggattgatagtgaaggtgttctttgtggagctagtttcaaagttgatgcttgttctaagatcaatagtatccctagaagaggaagtgaagctaactgggcgctggctaattctcgttgattttgcttctagtttcgttaactcttgcttctttgttgcgttttctttttatgtactcttgtttatgtaaatatagccttatgaagacgataaagaaataaaattgatttgcttcttcgtgacatagcagtctttacttagacaactgtgtgataaattcgcaatctcactctttgatagataagagggagggaagaaagcagtggtaaagacaaaactgtgttgattttgtgaatttagaagtttacaatagcaaaaaagaaactttggtcgacttttatcattcatcgttccacatgtctgtaaattcatcaggctccaatgggtttgagagttcatgcatctttcttcttgtttttgcctttattttcttagcaaatttcccagctttatttcttttctccaaagctcgaatctaaaaggcaggaaattggaatatatgagaactctgacagataatcatatatagcaatgtgatctatcaagttgcttatagaagaaccaagtacctggtttggagatacatagaatgggttctcgtaaagcgttgtacctccaaagctgcctccaaatatcttaattggatttaaacaaaaccttggaccaacctgtcatcaggtttttacttcaatcaacaactaattcttcagaaattatgtaagttagtgttagtatatatatagtcatggcctgacctcaataagagtcattttatccagatcgcctcgtgcaatcttgtctgactcgttatgaggtaccgatatctgcaatggaagccttggctagttaaacgaaacgtttccaaactgaaatgaaatgagagcatgagagatgctaaaatttcaacttacctggtaattacggaaccatatatggtcatcaacaatggagaaaacaaacacatggtcatggtaaggtttagacttcctatgtccctcgggaattccaaaaatctgtaagc

SEQ ID NO: 14570 - DNA, 1084 bp, Arabidopsis thaliana
  Clone ID: LIB22-086-G3_FLI
ttttatcaatggcgactcctaacgaagtatctgcactttggttcatcgagaaacatctactcgacgaggcttctcctgtggctacagatccatggatgaagcacgaatcatcatcagcaacagaatctagctctgactcttgttctatcatcttcggatcatcgtcctcttctttcgccccaattgatttctctgaatccgtatgcaaacctgaaatcatcgatctcgatactcccagatctatggaatttctatcgattccatttgaatttgactcagaagtttctgtttctgatttcgattttaaaccttctaatcaaaatcaaaatcagtttgaaccggagcttaaatctcaaattcgtaaaccgccattgaagatttcgcttccagctaaaacagagtggattcaattcgcagctgaaaacaccaaaccggaagttactaaaccggtttcggaagaagagaagaagcattacagaggagtaagacaaagaccgtgggggaaattcgcggcggagattcgtgacccgaataaacgcggatctcgcgtttggcttgggacgtttgatacagcgattgaagcggctagagcttatgacgaagcagcgtttagactacgaggatcgaaagcgattttgaatttccctcttgaagttgggaagtggaaaccacgcgccgatgaaggtgagaagaaacggaagagagacgatgatgagaaagtgactgtggttgagaaagtgttgaagacggaacagagcgttgacgttaacggtggagagacgtttccgtttgtaacgtcgaatttaacggaattatgtgactgggatttaacggggtttcttaactttccgcttctgtcgccgttatctcctcatccaccgtttggttattcccagttgaccgttgtttgattagttttttttgagtttttgaacgatgtgtatgctgacgtggacgtacacgtaggtgcatgcgatgaaaaaaacatctatttgttcatatttttgcgtttttctatttgttcattctttttcacaattcacaatacattatttcagttaatgattacggataatttagcttt

SEQ ID NO: 14571 - DNA, 1587 bp, Arabidopsis thaliana
  Clone ID: LIB22-089-B9_FLI
aactacatatatatatacgcacatacgtacacagttcgaaggttttagctgcgagtatgaggaaggaactgtgtagaaactttcagcgtggcagttgtaggtatggggaaaactgtagatttcttcatccacaacaagctaagccaaataatccctttggctttggtacacaaaaccaacaacaacaacagcagcagcagcaacaaaatagttcgaacccttttggatttggtgtacaaagtggtggttccagcagaccgaatcagttccagaatacttggtcacgaacggcttctacacctactggtggtggtgctgctgcttctacacagcagactggtaaacagacgcagccggcagatcataaatgcacagatcctgctgcgtgtaagcgggtaatgcaagacgattttaagaatgagagacccatgtggaagctcacatgctacggccactggaaatattttccatgtgatgttaccggtgatatcagctatgaagaactacgtgcagtggcatatgaagaagctaaacgaggaatacctctacagtcgattgttgaaagggagaggaatctgcaaaattccaaaatagccgagtttgaaaactttctacggaatccatacaaaggctctgttaccgccaatcaaagcccgtttgctgcaaccactcctagtatcttccctcagtccagtcagatcaattccccttctccagcattctctggctttaatcaacaaactgcattctccaataccaatgcgggtggactcagttcatctggacctccgaatgcctttgcaagcttcaatcaacaaactacattccccaataccaatgctggtggagtcagttcatctggacctccgaacccctttgcaagctttactcaacaatcaaataatcaacaaactgcattctccaataccaacgctggtggtctcagttcatctggacctccgaatgcctttgcaagctttaataaacaaccaaatgctttcagcgtcaacactcctcaacctgttccttcaggtccctctggtttccaaaccaatccatcaacaacattcaaaccagcatcatttggacctggacccggatttgccacaactccacaaaacaataacatctttggtcaatcaactccaacaccggctacaaacacttcccagaacaatcagaccgcattcaacttcaatgtccctgttgcatcttttactgctcctgctataaacacgacaaatacatcttccggaaccgagctgcaaataggtggtgatcctgttgatagtagtatctggctaaaggagaaatggaatccaggggagattccggaacaagcgccgcctgatgcctttgtttaacaatatgaagaatgtcattgaaacaattacgtataggccagagtcgcaaattggcgcagaagagttgttttttcttggtcatctcagatttgtgaccaatgtagtttctccacaaaatccaaagttttgaaccttaacaataatttcaatgcagataacagaaactataaacaagagaattctaaaaatcaaatctttctcaccaagtgaacatctttcaact

SEQ ID NO: 14572 - DNA, 196 bp, Homo sapiens
  Clone ID: LIB2-20-H12_FLI
acaaagacaagtttggaaagtcaaacaaacggaaaggatttaacgaaggattgtgggaaatagaaaataacccaggagtaaagtttactggctaccaggcaattcagcaacagagctcttcagaaactgagggagaaggtggaaatactgcagatgcaagcagtgaggaagaaggtgatagagtagaagaagatgg

SEQ ID NO: 14573 - DNA, 994 bp, Arabidopsis thaliana
  Clone ID: LIB23-003-C10_FLI
gcagattatcatcatgcttcatgcttctcgtggcaacaagtggtcggtcatagcgagacatttacctagaagaacagacaacgagatcaagaactactggaacacgcatctcaaaaaacgtttgatggaacagggtattgatcccgtgactcacaagccactggcttctagttccaaccctacggtcgatgagaatttgaattccccaaatgcctctagttccgacaagcaatactcccgatcgagctcaatgccttttctgtctcgtcctcctccatccagttgcaacatggtttccaaggtctccgagcttagcagcaatgatgggacaccgattcaaggcagttccttgagttgcaagaaacgtttcaagaaatcaagttctacatcaaggctcttgaacaaagttgcggctaaggccacttccatcaaagatatattgtcggcttccatggaaggtagcttgagtgctactacaatatcacatgcaagcttttttaatggcttcactgagcagattcgcaatgaagaggatagttctaacacatccctgacaaatactcttgctgaatttgatcccttctccccatcatcgttgtaccccgaacatgagatcaatgctacttctgatctcaacatggaccaagattacgatttttcacaatttttcgaaaaattcggaggagataaccacaatgaggagaacagtatgaatgatctccttatgtccgatgtttcccaagaagtctcatcaactagcgttgatgatcaagacaatatggtaggaaacttcgagggatggtcaaattatcttcttgaccataccaattttatgtatgacaccgactcagactcgcttgaaaagcatttcatatgagtcttcatatccaaacagaaaggtttcaaactattcgacgacttaaaataatggttctgtacccaaggttagtcgattactaactcgctcgaacgagatattgtgtatgtattaatt

SEQ ID NO: 14574 - DNA, 1666 bp, Arabidopsis thaliana
  Clone ID: LIB23-006-F9_FLI
cttgttttctcctccttgccgttaagttccattgaagaagaagaagaagaaggtgtgattcaacgataaacctagcgagaaaacgaaccgcataaaatcgccattgaacgagacggtggtgttaatctatggttatggaggtttgcttgactttttgaggttggcttgacttttgaagttttgatctgaagaaaagaggtttcgttgtaattggtttatacatcatgtctgggtcgagtatgtataagacgaagctttgtattctgttcaataagactggtgattgttcgaggccgaattgtacttttgctcatggaaatgctgagcttcgtcgtcctggcgaatcttcttttacaggaagacgtcacaatatggatagtgacttaagagatagacgtcacaatatggatagtgacttaagagatagacttggtagacagttttctccagagcggagaccttccttagacagaagtggaagacgggtacaaaggtttagtggacatgacaattctatgccatttgagaatcgaagagataaagactacagggagaaccgtagatttgatgaacgacgtgattatgctggtggtttgaaagttgggaataggattgaagacagggcagaagatggaagaaataagtttcatggttacaataatgttctggaagagcagttaaaagatgtagagatggatgttaagatgctaactgatgacaaactacgattggaggcgtccgttgaaaggaaggcacatgaagtagacattcttacttctaggatccaggagcttgagacccagttggatagagagaaagatgaatgtaggaggattacttcaagctcgaagaaatttgtgaaagaatataaccgtttcttgcgggcacaagatgatctaaagaggtcagaagcccgtcttcagaaattgggaaaccaacttagtacgtatcttgctggaagtgaaggcaataatagggatgtaggcctggatattgtgagcgatgaagagactaatggtcggaatttgagaactgcttgtgatccacataacgagttgcagaatacttcttcactgtccaggaaaaagcattatgtggatcaatatactacgaaagaacctgttgaagatggcttgatagggagaggtgaagaagagaaggtggagaatgagaagaagagaccaccttgttggaatatgctttcttcaaaatcatattctgaagaagaaagtggagcgtggaacgatgaagacacaattaacaggtcctcgtcaaaggaagacaattggaaaagaagaaggttctctattggcacctcagctaccgataaggttatattgtctacgagtatggcagctcgggaatttgatgatgttgcagaatctgaggaagagaatcccgaagcagccaacggctctcctctcatatctcttcctccacccccacctttcagagatgcccatgttcagagagacgaggatgatgtaaacggtgatgtgatggaacagaagaaagcctatgacgatgattccgtctgatcaagactttgaacattaaaaagtagcctgtttgttaggtgcaatattgacgaccatgattagaatcggtacatgctttgttcatcatctttagatatatattgaaaaagaactaaagcttgatcttc

SEQ ID NO: 14575 - DNA, 2581 bp, Arabidopsis thaliana
  Clone ID: LIB23-007-D7_FLI
caacggtcgagagatggtgggtctggttcgagaacccttgaacgtatatgacaataatgcaatcagagtactcaacacgcgatctgagcaagtgggtcacatcgagcgtacagtagcagccgttctcgcgccgatgattgattctcacacgatcgtcgtcgagggtattgtacccaatactcgttctaactccaataggtacagaatcccttgtcaaattcatgtatttgcaaagttagaagcgtcctctactgtgaaatcgacgatttctagaggtgggttagtattgatttcggagtcagatacatcgtttgggttatctgaggctgttgtggttaaggaacagatgggaaatggagataagaggagtgttgataagatttttaaacttgttgatgagaatgtgaagttaatggggaaattggtagcggctgagccacctagggaagtgataaagtctgaactttttgctcatcagaaggaaggattaggctggttactccatagagagaaatctggagaattgcctccgttttgggaggagaaagatggagaatttttgaatactttgacgaattaccgctcggataagcggcctgatcctttgcgtggaggggtgtttgctgatgatatggggttgggtaagacccttactttgctttccctgatagcttttgatagatatggcaatgcatccaccagtacgccaaccgaagagcctttggatggtgaaggagacaagattgaaaagaagggtaaaaagagaggaagaggcaagagcagtgaaagtgtaactcgaaagaagcttaaaactgatgatgttgttggcatgaatgtgtctcaaaagacaacgttgatcgtttgtccaccttctgtgatttcagcatggataacacagttagaggagcatactgtaccgggaatcttgaaggtgtatatgtatcatggtggcgaaaggacagacgatgttaatgagcttatgaagtatgacatagtgttgactacttacggcactttagctgttgaggaatcgtgggaagattctcctgtaaagaaaatggagtggctgagaataattcttgatgaggcacacaccattaagaatgcaaatgctcaacagagccgagtagtttgtaagttgaaggcttcccgcagatgggctgtcacaggaactcctattcagaatggttcatttgatttgtactctttgatggcctttctccggtttgagccattttcgattaagagttattggcaaagtttgatacaacgcccgcttggccaagggaataaaaagggtctttcacgtctgcaggttttaatggcgacaatttcgttaagaagaacaaaagaaaagagtttgattggtttaccgcctaagactgttgaaacttgttatgttgagctttctccggaagaacgtcagttatatgatcacatggaaggagaagcgaaaggtgttgtgcagaatcttataaataatggaagcttgatgcgcaactactcaacagttttgagtataatcttacggcttagacagctttgcgatgacatgtctctatgccctccagaattaagatcttttaccacttctacatctgtagaagatgtgactgataagccagagctactgcaaaagctggttgcagcattgcaagatggcgaagattttgactgtccaatctgcatttcgccaccaacaaacatcatcatcactcgatgtgcccacatcttttgcagggcttgtatccttcaaactcttcaaagaagtaaaccattgtgccctctttgccgtggctcccttacccaatctgatctctacaatgctccgcctcctcctccggattcttccaataccgatggagaagacgctaaatcttcaaccaaatcctcaaaggtctcagctttactatccctgctcatggcatcgagacaagaaaaccccaacacaaagtctgttgtgttctctcaattcaggaagatgctgcttttactagaaactccactaaaagctgcgggtttcaccatcttgcgcttggatggagcaatgactgtgaagaaacggacccaagtcattggagaatttgggaatccagagttaaccggacctgtggtgttgcttgcgagcctcaaggcctctggtactggcataaacctaactgcagcctcaagggtttacttgtttgacccgtggtggaaccctgcagttgaagaacaggccatggacaggattcataggatcgggcagaaacaagaggttaaaatgataaggatgattgcgagaaacagtatcgaagagagggtccttgagcttcagcagaagaagaagaatctagcaaacgaagcttttaaaagaaggcaaaagaaagatgaaagagaggttaacgttgaagacgtggttgctctcatgtctctctgaaactatcaatcattgcttagctccttaaccgtttttttaagatacattaaccggtaatttactgcttttggtacgtaacctcaaccgatgtttttgttgccttatcaagtatcaactagacttctgtctcgattagtttagtttaatcaagggttagcttgt

SEQ ID NO: 14576 - DNA, 1053 bp, Arabidopsis thaliana
  Clone ID: LIB23-008-B10_FLI
gatcactttcgaaattacatttacgctttcttgcaatcaaattttccgatcttaagttcagaagacgatgtcagaggtggaaatagagaacgctgctacgatcgaaggaaacaccgctgcggatgcgccggtgacggatgcggccgttgagaagaagcctgcagcgaaaggacgaaagacgaagaatgttaaggaagtgaaggagaagaagactgttgctgccgctccgaagaagagaactgtttcatctcatcctacttacgaagagatgattaaggatgcgattgttacgttgaaagagagaactggatctagccaatacgcgattcagaagttcatcgaggagaagcgtaaggagcttcctccaacattcagaaagctgttgcttctcaatctgaagagactcgttgcttctgggaagcttgtgaaggtcaaagcctcgtttaaactcccatcggcgtcggctaaagcatcatcccctaaggcggcagcggagaaatctgctcctgcgaagaagaaaccggcgactgtggcggttaccaaggcgaagagaaaggtcgctgcggcttccaaggctaagaaaacaatcgccgttaaacctaagactgctgctgctaagaaagtgaccgcgaaggctaaggctaagcccgttcctcgtgccactgctgctgcaactaagaggaaagctgttgatgcgaagcccaaggctaaggctagaccagccaaggcagccaaaacggccaaggttacatctccggctaagaaagctgttgctgccacgaagaaagttgctacggtggccacaaagaagaagactccggttaagaaggttgtgaagccaaagacggttaagtctccagcaaagagggcttcttctagggttaagaagtgaagttagggtttgtaggtagaagaatggttaacgatagtttagacttgtataattcaatcatctttatgcgactttgtttgcttttcttctttcagtgttcttgttattcacagttcctttggactaccccttaaatcatatatagatttcatcaatgaagc

SEQ ID NO: 14577 - DNA, 1060 bp, Arabidopsis thaliana
  Clone ID: LIB23-010-E7_FLI
ccaattttcatcttcccttttaggttggaattttgagttttatcttcccatttctggattttgtttctctctagtctattccttcaaaaccaagaacccaactttgttttatattcaaaagttgtttgctttcatcgcgtttggtgttcatcttcatctggtttgagattataataacatggaaggaatcattgtgagaagagttataccatctgataacagttgtctcttcaatgcaatcggttatgtcatggacaaggacaaaaacaaagctcctgagctcagacaggtgatagcagcagcagttgcaagcaacaaggagaaatataatgaagcatttctagggaagctcaatgaagaatattgtgcttggattctcaatccagacaagtggggaggtgcgattgagctttcgatattagcagattattatggtcgagaaattgcagcttacgacattcaaactagtcgatgtgacttgtatggacagacgagaaactacgacgaaagagttatgctgatctatgacggtcttcattacgatgctcttgctctgtctccatttgaaggggccgaggaagattttgatatgactatatatccagttggtaaagatagatccataggatcaattgaagggcttgctttgaatctagtgaaggaccaacaaaggaaaaggagttacacagatactgcaaacttcactctacgttgcggtgtttgccaaattggagttattggacaaaaggaagctgtggaacatgctcaagcaactggtcatgttaattttcaagaatacaaataagagaatgattgatttgattcttttatacagttccaagaaacaagaaagtaaaccacgaaaatgatgtgcttaattttaattttatgttgtcaacaatacaaattcagtctgttgtgcaattatcttgtgttgtgttctttactctagtgatgacctctttatgaggaggatcattgttgtctcaccaataatgccatgaaaaaaatgaacttctttggattcatttgctctgtgttaaaaccaaaaatttccaat

SEQ ID NO: 14578 - DNA, 1316 bp, Arabidopsis thaliana
  Clone ID: LIB23-010-E9_FLI
ttgattccatttttattactgttactatcatccaaacccttggtatttgtagccatgagtcttgtttcagatctcatcaaccttaacctctcagactccactgacaaaatcattgctgaatacatatgggttggtggttctggaatggacatgagaagcaaagccaggactctacctggaccagtgactgacccttcgcagctaccaaagtggaactatgatggttcaagcacaggccaagctcctggtgaagacagtgaagtcatcttataccctcaagccatattcaaggatcctttccgtagaggaaacaacattcttgtcatgtgcgatgcgtacactcccgcgggtgaaccaatcccgactaacaaaagacacgctgcggctaaggtctttagcaaccctgatgttgcagctgaagtgccatggtatggtattgagcaagaatacactttactccagaaagatgtgaagtggcctgttggttggcctattggtggttatcccggccctcagggaccgtactattgcggtattggagcagacaaatcttttggcagagatgttgttgattctcactacaaggcctgcttatacgctgggatcaacattagtggcatcaatggagaagtcatgccgggtcagtgggagttccaggtcggtccagctgttggtatctcggctgctgatgaaatttgggtcgctcgttacattttggagaggatcacagagattgctggtgtagtggtatcttttgacccgaaaccgattcccggtgactggaacggtgctggtgctcactgcaactacagtaccaagtcaatgagggaagaaggcggttacgagatcatcaagaaagcaatcgataaattgggactgagacacaaagaacacattgctgcttacggtgaaggcaatgagcgtcgtctcacaggacaccacgagactgctgacatcaacactttcctttggggtgttgcgaaccgtggagcatcgatccgagtaggacgtgatacggagaaagaagggaaaggatactttgaggacaggaggccagcttcgaacatggatccttacattgtcacttccatgattgcagagactacaatcctctggaatccttgatgatcatcagatcaagaaaaaatcttgaatgtcactcaaatttgtgtttcttgcaagattcaaagtttgtgttctctatcaagcaatgtcttaggataagtcaaagatttgctctgcttattctgctttttatttacttcacatcctattgaaaacatttctgtgtattatttatgaataaacattatctt

SEQ ID NO: 14579 - DNA, 1193 bp, Arabidopsis thaliana
  Clone ID: LIB23-014-D1_FLI
caaaacacacatttgtcttcttcatttgatttgttgttgttcttatactgtctctttggcttttctcctcctgttctcatggaagcttcacccaatgatcgacttcattttggcaaaatgggtttcgggtgtaagcattacaagaggagatgccaaatcagagctccatgttgcaacgaagtcttcgattgtcgccattgtcacaacgagagcactagcacattgcgcaatatctacgaccgtcacgatcttgttcgtcaagacgttaaacaagtgatttgttctgtttgcgatacagagcagccggcagctcaagtttgttcgaattgtggtgtcaacatgggagaatatttttgcagcatctgcatattctatgatgatgatactgaaaaacaacagtttcattgcgatgactgtggaatttgcagagttggtgggcgtgagaatttcttccattgcaagaagtgtggatcttgttatgcggttggtctgcgcaacaaccatcgctgcgttgagaattcaatgcgtcatcactgtcccatttgttacgagtacctttttgactctctaaaggacacaaatgtgatgaaatgcgggcacacaatgcacgtagaatgctacaacgagatgatcaaacgtgacaagttttgttgtccaatttgctcgaggtcagtgattgatatgtctaaaacatggcagagactcgatgaagagatcgaagccactgctatgccttcagattaccgtgacaagaaggtttggatactttgcaacgattgtaacgacacaacagaagtgcacttccacataatcggacagaaatgtggacattgcagatcatacaacacacgagcgattgcgcctcctgttcttcctcaatgacaaaaccaagatcttcccatgtattgcctccagaaagcaagcaagaactttttgttgctaaaaaaactgaggcatagattgatgatcataacaaagaaagaaaaagaaaaagattgatgatcaatttgatcattggtcacaaaagcaaaacacacatttgtcttcttcatttgatttgttgttgttcttatactgttacatttttccatttgtgtttgggtgttggaaatgcgaggattatgtataatatactctatattcttgatccaggaaaagttacctggataatatgttttcagggattttttagt

SEQ ID NO: 14580 - DNA, 619 bp, Arabidopsis thaliana
  Clone ID: LIB23-021-F3_FLI
attgatctcaatataactgctcccaaaaaagcttctctagctgatgtgggtgttgtgggggatctgagcaatgaagatgggaacaaagcatctgctgcatcgtactactcaggctggtccatgggtgcaggatccgggcttggtaaaactggcctatacagtacacagcagcagcagcaacaacaacaacaacaacaagcacctgatatctcagacgatttcttctccagcctcagtaaccaaaggtaccaatctggtggctttaagcagtgaaattgtctgtgatttggtgttgagatgaaaaggcatatcaagtttgattctacattccatactggaaatgtaagtttttttaatgggtttgttgttcttgcacttcattcatgggacaatctggtcggtgactgatgtgccattgttgttgtggcgtttactttgggtttaaatgagagagagaagaattgtctttatgttttttttgataagagagtacttttattattggtttaaagtttcgatttgttcatagaacaaaagtatatgtatctcttcccactcaacaaatattttttttatcgcgtgtgattcttaatccgaaagagactccaactttcttctc

SEQ ID NO: 14581 - DNA, 1770 bp, Arabidopsis thaliana
  Clone ID: LIB23-022-B11_FLI
gcaaatttatttatcttggtcaagagacattgattctcttaaatttctgcaaaattaagctcagagattcacaccgcatctgaaattgtgctcagaggggttccaaatattaccagtcgttaggaagcaatcacgagttgttttaggaattagtgaacgtgataatggctagcaatgagatggaaaaatcgagtaaagagaaggaacctaaaacacctcctccttcttctactgcccctccctcttcacaggaaccttcatcggctgtgagtgctggcatggctactccagattggtctggttttcaggcatattctcctatgccgccgcctcatggttatgtggcatctagtccccaacctcacccttatatgtggggagttcagcatatgatgcctccttatggaactccgcctcatccttatgttgcaatgtatcccccaggtggcatgtacgcacatccttcaatgcctccgggttcttatccctatagcccttatgctatgccttctccaaatggaatgactgaagtttctggcaatactacaggcggcactgatggtgatgctaaacaatctgaagtgaaggaaaaattgcccatcaaaagatcaagaggaagcttgggaagtttgaacatgattacaggaaagaacaatgaacctgggaaaaactcaggagcatcagctaatggagcttactccaaaagtggggagagtgcttctgatggttcaagtgaaggaagtgatgggaactctcaaaatgattcgggatctggactagatggaaaggatgctgaagcagcatcagagaatggtggttctgccaatggtccgcaaaatggaagtgctggtacacctattctaccggtgagccagaccgtaccaatcatgccaatgacagctgcaggtgttcctggcccaccaacaaatttaaatattgggatggattactggggtgctccaacttcagctggtatccctggaatgcatgggaaagtatctacaccagttcctggagttgttgctccaggctcgcgagatggtggccattcacaaccctggttacaggacgatagagaacttaagcgacagagacggaagcagtccaatagggagtctgctcgaagatcaaggttgcgtaaacaggccgaatgtgatgagctggcccaacgcgctgaggtgttgaacgaagaaaacacaaatctcagagcagaaatcaacaagctcaaaagccaatgcgaagagcttaccaccgagaacacctctctcaaggaccaactttcattattccctccacttgaaggcataagcatggacaatgaccaccaagaaccagacaccaatcaaacaggtgccgcagagagaaaggttgattcatacaaagactcaacgtgagaagacatagagcaaaaccaattcctaacacaggtataaaaaagtagcagcagcagcaacaacaacactcggcggttctttgctaacagatggtttgtaggattttaggcatcagagatcgattggttccgaatagtttattgagggttgttggtccagtgtatgtgtgtgtaagttacgaaattagatattgggagaaaaaattccctcgtttaatgttttactttgcctttgctctacttgcagaagcgaatctgaggcaatgtgcttatctgtatcaaaattgttaccctttttattagcttttcctatttattttttcttcactttatggatgcgattgaatttaagtgaaatgaatttagtaggcctaccc

SEQ ID NO: 14582 - DNA, 685 bp, Arabidopsis thaliana
  Clone ID: LIB23-023-G2_FLI
ttccgatcagggcagtaactccttcgactgttctgagttcgggtggagtgatcacggccctaaaacacccgagatctcttcaatgcttgtcaataacaacgaagcatcatttgttgaagaaaccaatgcagccaagaagctcaaaccaaactctgatgagtcagacgatctgatggcataccttgacaacgccttgtgggacaccccactagaagtggaagccatgcttggcgcagatgctggtgctgtgactcaggaagaggaaaacccagtggagctatggagcttagatgagatcaatttcatgctggaaggagacttttgaagtgatcgatggttccttagtttgtaaataaagctgtgttggattttgctgttgggggatggtacaagtcacacctcaagctctatgcattggtatctcatgagcctctcttccatagagagtttctcttttaattttgtcgaaataaaaaaggtgtgatgaagtaaatagaggtataataatatctatctattaagtcttgttttgttctttcatttttgtatttcttttctatttaaaagacagtttattagtcttctgagctctctttttgatctttgttatagcgtatcatcaccctcgaaagtgtaatgttttgtacccccaaacttgtttagcattataataaagtctctttgg

SEQ ID NO: 14583 - DNA, 955 bp, Arabidopsis thaliana
  Clone ID: LIB23-024-E9_FLI
ctagaagactcttcagggcacagagaaaacacccaccacatcaccgtcttcttcaacaaaatttaccaccagagatcgcagatttcttcattctatctctctcttttagatccgattcgatgccgtcccgtagacgtaccctcctcaaggtcatcatcctcggtgatagcggggtgggaaaaacctctttgatgaatcagtatgttaataaaaagttcagcaaccagtacaaggcaaccattggagccgacttcttgaccaaggaagtacagtttgaagatcgacttttcactttacagatctgggatacagctggacaggaaaggtttcagagccttggtgtagccttttaccgtggtgctgattgctgtgttcttgtatatgatgtcaattccatgaaatcatttgaaaatctgaacaactggagggaagaatttctgatccaggcgagtccatcagatccagagaattttccatttgttcttatcggaaacaaggttgacgtggatgatggaaacagcagagtggtttcagagaaaaaggctaaagcttggtgtgcttcaaaggggaacattccttactttgagacctctgccaaggtaggtactaatgtggaggaagctttccaatgcattgccaaggacgcattgaagagcggagaagaagaagaactatacttgccagacacaatcgatgtagggacgagcaatcaacagaggtctacagggtgtgaatgctaaggagtatcaccagaaggaaacgaggcctctcctcccattatctcttttcgcaagttatgtctacattattactatgttgtaaattttttcttttgtgtggaaaagggatgagaacaaaaaaagaaggaaccctaaaaaaaaaagagatttgtttagtgttatttgtggggattttcatttatcatgctagctaaataaatactcactttcatctt

SEQ ID NO: 14584 - DNA, 1383 bp, Arabidopsis thaliana
  Clone ID: LIB23-026-F4_FLI
ccagcctccaacaacaaaatttaccaacactctctctttctctttctctctgaaaacttaaaacgatggctataaccgccactcaaaacgacggcgtttcactaaacgccaataagatttcgtatgatcttgtggaaactgatgttgagatcatcacctccggtcgtcgtagtattccggcacactccggcatcctcgcttcggtctcaccggtactgacgaacatcatcgagaagccgaggaagattcacggcggatcatcgaagaaagttattaagattctcggtgttccatgcgacgccgtttcagtcttcgtcagattcctctattctccgagtgtcacggagaatgagatggaaaaatacggaatccatctactggctttatcacacgtgtatatggtgactcagttaaagcaacggtgcactaaaggcgtcggtgagagagtaaccgccgaaaacgttgtcgatattctccagctggctcgtctctgcgacgcacctgacctctgtctcaagtgtatgcgattcattcactacaagttcaagaccgttgaacagacagaaggatggaagtttcttcaagaacacgatccttttcttgaacttgacattctccaattcatcgacgatgcagaatcgaggaagaaaagaagaaggagacacagacgagaacagaatctgtatttgcagctgagtgaagccatggaatgtatagaacacatatgcaccgaaggttgcacactggtcggaccatcgtctaacttagacaacaagtcaacatgtcaagcaaaacccggtccatgcagtgcgttttcgacttgttacggacttcaacttcttatacgtcactttgcagtatgcaagaaaagagtcgatggcaaaggttgtgtccgatgcaagagaatgattcaactccttagactccattcttcgatttgtgaccaatctgaatcttgccgtgtccctctttgcaggcaatataagaatagaggtgaaaaggacaagaaaatggttgaggacacgaagtggaaggttctggtgagaagagtagcgtctgctaaagccatgtcttcgttgtctcaatcaaagaagaaaaaaagtgaagtgttatttaaagaagaagcagaagatttgatcagaatccggaacaagttaatgtgaatatacaatatatgtgtttttattagattatatagtgagcgattgttagaagccattaattacttgagtcggaaggtttatttgtttgttatttgtctctcggactggttgattgggttaaacttgtcaatgagtaaccctttgaatctgtcgttttgtttggtcggtcgaattatatagaaatgtattattggttataaaatggtattagggtttttgg

SEQ ID NO: 14585 - DNA, 1470 bp, Arabidopsis thaliana
  Clone ID: LIB23-027-E11_FLI
gaaacttagggtttatgtggtggatgaatgatttagcagcgaattgaagggtgtggtggaagatggagttttgtccaacatgtgggaatctgttgcgatacgagggaggtggcaattcgagattcttctgttccacatgtccatacgtcgcctacatccaaagacaggtggagataaagaagaagcaacttctggttaagaaatctatagaagctgttgtgactaaagatgatatacccacagctgctgaaactgaagccccatgtccaaggtgtggccacgacaaggcatacttcaaatcaatgcagattcgttcagcagatgagccagaatcaagattttatagatgcttgaagtgcgagttcacttggcgtgaggaatgaactgactgatgatcatcttctccgtctctttgcctctgccaattttgaaagtttctacttttgcaaccttcttagagtttgttttaccattgcaaatttagcagatcctttatgtactctgcttctttctgtctcacagctcaatagtttctgtttcgattaaattttggaatgttgtgcaaagttttaatctttgaggtgaaagagatgaagcaaattgatctgttttgagatttccagggatacttattggcttgagtatatctgtaatgtattaaaaattagttcggtaaagcttaatgattactgattctggacattagccattagtgatgtcgagtttattcccgtcattcgtaaacttgttattgctttaggtcttcccattaacgagcatacactagagaccagtttccttaatttctgttgttgatttggttgttgatgtgttgtgtgcattgctgtagaacagtagaagatatattgctttcttctttagtcgttgccattctttgggaacagtagaagagatggatttatctgagtttgcagagtgattttagaattgattctggttagaatgtagattgccttagccatagaacgtaagcgttatattctttctgtttcaggtaggagatagggaatttcgacgcagcacctgattgattctccagagatcaaaactaagtccacactaaggaccatatggtccaatcagttccagatacttggagcattgccttgtgttgtgagcataaaacggcaaaacccatgagcattgccttgtgttgtgagcataaaacggcaaaacccatgaaagaaggttgatagcattagagaaaacagagcattgcagctcacaccgtccacccatgaactgatgatactttcactattttttccggattgattgcatcttagaatcatagtcctgtttccattggccttaattagctgtttaagtactaagaaaagtcttgttaccttgtgatctagttaattagctgtttaagtactaaggaaagttttgtaaaactaattaagaatcataatcctatttccatcggcctgagggaattacttt

SEQ ID NO: 14586 - DNA, 1947 bp, Arabidopsis thaliana
  Clone ID: LIB23-027-F3_FLI
cgccgatcaaaaaaccctagaatttcttccactgttatgtaagtttgatcttgttgtctccactaagaggcgaagagagaaagagggttttaggttgtgtgttctgtttcaaagggtttacttctcgttgaccccgatcgagatggttgattcttctcgtgattcgtgtttcaaagctggtaagtttagtgctccaggttttcgatttcaccctactgatgaagagcttgtggtttattatcttaagaggaagatctgttgtaaaaaacttcgagtcaatgccattggtgtcgttgatgtttacaaagtcgatccttctgaattgcctggtctatcgatgttgaagacgggagatagacagtggttctttttcactccaaggaataggaagtatcctaacgcagctaggtcaagtagaggtactgcaactggttattggaaggcgacaggaaaggatcgagtcattgagtacaattcaagatctgttggactcaagaagactcttgttttctatagaggtcgtgctcctaatggtgagagaactgactgggtgatgcatgagtacactatggatgaagaagagctagggagatgtaagaacgctaaggagtattatgctctttataagctttataagaagagtggggctggtcctaagaatggtgaacagtatggtgctccgttccaagaagaagaatgggttgatagtgatagtgaagatgcagatagtgtcgctgtaccggattatcccgtggtccgttatgagaatggtccttgtgtggatgatactaaattttgcaatcctgtcaaacttcagttagaggatattgagaagcttctcaatgaaatcccagatgcacccggggttaaccaaagacagtttgatgagtttgttggtgttccacagggtaatagtgcagaagtgatacagagcacattgctgaataattcttctggagagtatattgaccctcggacgaatggaatgttcttgccaaatggccagctatacaacagggactcgagttttcagtcccatttgaattcatttgaggctacctctggtatggcacctcttctagataatgagaaggaggagtacattgaaatgaatgatcttctgatccctgagctcggtgcttcttcaacagagaaatccacagagttcttgaaccatggtgaatttggtgatgttaatgaatacgaccaattgttcaatgacatatctgtttttcagggaacttctacagatctgtcttgtctgagtaattttactaataacacatcaggccaaagacagcaattactttatgaacagttccagtaccagacacctgagaaccagcttaataactacatgcatcctagtaccactcttaatcagttcactgacaatatgtggtttaaagatgatcaggctgctctctatgttcaaccaccacaatcttcttctggagcattcacttcacagtcaacaggtgtgatgcctgagtctatgaatcccactatgagtgtaaatccccaatacaaggaaggacaaaatggtggtggaacaaggagccagttctcatcagctctgtgggaattattggaatcaataccatcaacaccagcctctgcctgtgagggtcctcttaaccagacctttgtgcgtatgtctagcttcagccgcatcaggttcaatggaacgtcagtgactagtagaaaagtcactgtagcaaagaagcgtatcagtaacagaggttttcttctgttatcaattatgggtgctttgtgtgctatcttctgggtgttcaaagccaccgttggagttatgggaagacctctcttgtcgtgacctagactcttgaatcttgattcagcataagttagcctgatccacatctttgattatgtatagagtttgaaagagtttaattcttaacaaaagatttcttttttcctgga

SEQ ID NO: 14587 - DNA, 1409 bp, Arabidopsis thaliana
  Clone ID: LIB23-027-H9_FLI
ggctgtataatcaagaatttcatttattaagtaagattacaatcattaacttagccttccacagtgtttacaagttacaaaaagacgactttggtttcaactgaaatcattcttcaagtctcttccttttggcagcattgtttggccttgaaggcggtgaggataaaccagagctcaaaacgggtgcactctgttgtattgtggcctcaaggccactggttacaacaaaatcttcaccccacagcggaagggatattcctcaatcaagtcaagctgaagccttgcaatggcggacaaatttcagcttctcacctgctgctggctatactagagatggtttggaacaggatatgagtgatgagagtcccgcttttgcattgcactcgggcagcagtagacaaagaaaaagtttggaattcagatttcagcagtcgccaagatgggctccatactcatctgcttctgatgggaacgaacagaaaacctccttggttaataatagtctaacaagaccaaatagctcaaatcctcaatgcttaaacgaggtaattttggtcttctttacatatcaagtcattaatcttcaagatgggcttttcttggtttcatctttggctgaaccttgtcgctctttgatgtaattacggctcaggagaacggttttgatagagacagtaccgccatctcaacgagtttcagatcgttgctgtctctttcagagtcatctgtcccatgggagactccgaccaacaatcagtcttccagccttactcactgctcttaccctcgagtcttctgcaacccggtttcagtttgtgagaatcctgaacctgatcatacgcaagaagactcgtccacaaatcctggttccagtatcatgatgtccacaagaaaccaccaaggctcaccagtagaggaagaagtatcaccaaactcgagcagcaatgacatgttgctagatgttgaaagatccaatgacacagaagtcgcaaacccgagatctgaacaaggttcaatgacacatcaaagatgcgggatttgcaagaagcttttatctcagaaatctccatggagctcatacaagatattgagatccagagacatgccagccactggtgttttcccctgccatcacgtctaccatgttgagtgtttagacaaagcaaccccaacagctcaaaccagagacccgtcttgtcctgtttgctcaaacaccattggagtaatggaacagccactgatagcaccagaagaagccataaatgggacaaactcagctgctgtttgaatataagcttctcatcttcttcctttccgtcaccggagccgccagccaaggatattggggttgctcattggcccgaaaaggccgaaaccctaacgataaatcactttttctcagctcagat

SEQ ID NO: 14588 - DNA, 2675 bp, Arabidopsis thaliana
  Clone ID: LIB23-028-C3_FLI
gtctaaaacgtcgtcggattaactcagttgttcgtcgcatcgaatcatcggaggtgatggaggaaccggagtgtccggtgtgtctacagtcttacgacggcgagtctactgtcccgcgcgtactcgcctgcggacacacggcgtgcgaagaatgcttaacaaatctacccaagaagtttccggacacaatccgatgtcctgcttgcaccgttctcgtcaagtttccacctcaaggaccatcagctctccccaaaaacattgatcttctcagattgttcccttcgatttcgaagcttaagctggaacctggccggaattttgaaaaagtcgttgaatttgtcactcgatcatggtccgacgacttttacgccacttggaaggatcggattctagtgcacgacgccgtttccgtggaaattagggagagtgaaagtagtgattttgattcatcttcgcgtttatgtggaagtctgagggatgattcgaaggtgagtcttttacgggttgcttcgttcgagcatggtgattgtgattctgtcctcaagtatagttatgtccagaggatgatgagttgtctgtggggtatgcgagaggaggaaagagatgagcttgatgcgatcatctctgttaaacagagaggtgtttctaaagtttttggcttgtggggtgatttgaagaatggtgttttgtatttagtgggtgaaaagctcattggattttcgttggaggagtttgatagcctcgaagatgagactttacgtttaggaataattggtatgcaaatatgtgaggcactacttaatttgcataaggaagggttgatcacaggctgtttgagtgtttcttgtgtgaagtttgacgaatatgagaatgcttatgttgatttgattgagttgattgaaactggaaggaatgtgtatcgaattatcgctgaagaaactagctctttgagaaaaccagttggtgcttcggaaatgggtttgatttttgttgggttacaacagaaggggatttttattagctcagaggtgttgtttgaatttttgaaagaacagaatatgttaataaaaaataccagctcaaaatcttttgtttcacataactctgatgtttggccagtgtgttttcttctcctcaagcttcgtcttggaaaacggtgtaccgaggagtttattgaaagtgtgaattgtgtggatggaaaaggctgtgaagagggtattgaggatatcttggtgctatacacaggtattacggagaaactaagtttggaatctgaactccaagggaagtttaaatcgatggttgaaattcttcgtcaatgttgctgtcttgatcctcaggcacgtcccgttttgactgatctatggaaatgcatcagggagctggtcatgaaacctaggttcaattctatgagtagattgcataagacgatttatgggaaaaggaaacagttctgtttggctcaaagtgaattatgtcgcctggtagaagtggaatccaaagaagtggacaaagagttgcctggaatgaaaattggcgatgaagcagaggagggtaaggttgacatagattttccggggagagtctcagaaggaaaggtgagatctaaagacatgcggggacaccaagactctgtcacaggtttagccgttggaggtgggtttctcttcagctcttcatatgatagaactatccttatatggtctctgaaggacttctcccatgtgcatacatttaaaggtcatcaggataaagtaatggccttgatacacatcgagggaacagaaccagtatgtgttagtggcgatggtggaggaggtatctttgtatggagcactacttttcctctggaagaacagccgctaagaaagtggtatgagccaaaagactggcgatatactggcattcatgcattggcatactcagaatatgggcatgtgtacactggcagtggagataacactatcaaagcttggtcactgcaagatggaagcctgctttgcactatgagtggtcataaatctgtagtctcaacgcttgttgtggtaaatggagtactatacagtggaagttgggatggaaccgttcgtttgtggagtctaagtgacaacagtttgttgacagtgttgggggaagagactccaggtattgtaagatctattctgtctctagctgcagacgatcaaactctagttgcagcttatcaaaacggagatatacagatatggagggatgatacattgatgaagtcaatgaaaatacagaatggcgcaatcctcagcattgccgtgaatggtaaatggctattcactggaggttgggacaaaaccatcaatgtacaggaattgtcaggagatgagatatcagtaaactgtgctcacgttggttcaatcccaggttcatcagtaatcacatctttgttatattgggaaggcaagctctttgcagggtttgcagataaaaccattaaggtatactattttggacgctaacaaaaactattgtgctctccagttttgctcatcttgtttttgaagattctttcttccataagttcctccgtagatgccactctcgccaaaacatgttgtgtgaatatctaaatgtaaatatatgtgaatatgaatccttcgtaccaatctgttgatgatatatacgtgattcgcatttttctt

SEQ ID NO: 14589 - DNA, 1578 bp, Arabidopsis thaliana
  Clone ID: LIB23-028-H4_FLI
aaaaaactctaaaaaatcaaagagcgattttttttcttcttcctgggtctctctctggtggtgacgatcgaagagagttcacggattcgtacaaggattaaattaattattctggtaaattaatcgaagcgtaaggaattggggagagtgatttttctgggttcgaatttggtggttgattcaaaaaaaaaaaagggttttgagatttgggttattttgatttcgaattttggttatgggtttaggcaataagggtaacaaattcaatttcggcgataatgatctcgccgacgaagctagtggtgccgatggcgacgaaggtgatggttttggttcggttgcgtgttcgatttgtctcgagacggttgttaaaaacggcgatcgagcatgggctaatcttcaatgtgaccatcagttccatctagattgtattggttcggctttcaatgcaaagggagtgatgcaatgccccaactgtcggaaagtagaaaaaggccagtggctttatgcaaacggttgtcgttcatatcccgaattcaatgtcgaggattgggttcacgaagaagatatttatgatattggagcatactctgaaatgtcttttggagttcactggtgcccatttggaagctcagcccgtcttccttctttcgaggatggagaattttcaccgagttcatatcacgatcttttgggacagcaaggttactatactgaaccagcagcgccaaccgcaggtcatccatgtccatatgtaacctattttggcccggttcactcgccttcctcaagcagtggtggtgctgcaggcgtttcagacagttcaagtttcagtagtcactggaacactggctcttcggtttctggtgaagtcccaactccttatggtttccctgtggatccgcactatcacggctgggattatcatccgcctccacccccaccgccacagcatttctctgcttctggcgctcatgtgggcagtccaactcagcccacgcctccaccagccgctgcgaggacttctcgagccaacggctcagatatgatcagacccagaccgccacatttcacgcgtccatttcatggtcacagttccagtggtagagcgggtagctcggtggcatctgttccgaggacaccaccatttccaggaagcaacgctcggacccgagacagaatgcaggctcttcaagcctattaccaacagtcttctgcacagtcacaccagccggattcgcctatagtctctcgagggcctgtattcccatctggccggaggcccgctagaggaatagcttcagggatgggatcaacgtcatcttcttcagatcaggcaggtgggagtggttttatccggtttaacatatgggagagagatccttatatgcaatcacaacaagcctactcggttaatcagatggacagagaaccaaacatttggacatcttcatttaatgaaggatcaggaagcttccatcagaggcacggtggcggaggaggatcatcttaagaactgagtcagtacccgttcgagattctcaccggtcgggcaattctcatgatggacaaaaaacc

SEQ ID NO: 14590 - DNA, 1075 bp, Arabidopsis thaliana
  Clone ID: LIB23-029-G7_FLI
aaaaagggtaaagcagcaaaaccctaataaaatcacaacaaattaacacaaaaaaaccagatcttaaaactctctctacccaccaagaggatcaaccagtctcttccccttcagattctcctttccacagtgaatggatcaacaagaccatggacagtctggagctatgaactatggcacaaacccataccaaaccaacccgatgagcaccactgctgctactgtagcaggaggtgcggcacaaccaggccagctggcgttccaccagatccatcagcagcagcagcagcaacagctggcacagcagcttcaagcattttgggagaaccaattcaaagagattgagaagactaccgatttcaagaaccacagccttccccttgcgagaatcaagaaaatcatgaaagcggatgaagatgtccgtatgatctcggctgaggcgcctgtcgtgtttgcaagggcctgtgagatgttcatcctggagctgacactcaggtcgtggaaccacactgaggagaataagaggcggacgttgcagaagaacgatattgctgctgctgtgactagaaccgatatttttgatttccttgtggatattgttccccgggaggatctccgagatgaagtcttgggaagtattccgaggggcactgtcccggaagctgctgctgctggttacccgtatggatacttgcctgcaggaactgctccaataggaaatccgggaatggttatgggtaatcccggtggtgcgtatccacctaatccttatatgggtcaaccaatgtggcaacaacaggcacctgaccaacctgaccaggaaaattagcaagaaactcgttctagtctcgtccaggtgaaaggagggagaccttagacaagaaaatgaaaagaacatatcagaattgtcaaattgggtgttgtagaagaatctaaagtgtttatgtctatcgatccttttctaaacgagaaatttagggatgaaccagaaagaagaatgtataaactgtaagaaacaagtgtgcttttgacaaaagtttttttatttgaatgttaatttctgtgtctttatcac

SEQ ID NO: 14591 - DNA, 690 bp, Arabidopsis thaliana
  Clone ID: LIB23-031-E10_FLI
cgatcctcttcctcagctttctccaagaacaacaacaataagtctattaatttccatactgatccacttcagaaccctttaattacgggaatgccaccatcatcttttggttatgatcactccattgatctcaacctcgctttcgctactctccaaaagcatcatttatcctctcaagctactacgccttcttttgggtttggaggtgatctttctatttatggaaactcaacgaatgatgtagggatcttcggagggcaaaacggtacttataacaatagtttgtgttatgggtttatgtccggaaatggtaataataatcaaaatgaaatcaagatggcttctacattggggatgtctttggaaggaaacgagagaaagcaagagaatgtgaacaataacaataataactcagagaatcctagcaaggtgttctgggggtttccatggcagatgaccggagattccgccggagttgtaccggagattgatcccggaagggaaagctggaatgggatggtttcatcttggaataatggtttactcaacactcctttggtctagcagatcattaataaataaatatataatatattactatatattaaagtttatgtcatcacatgtttgtacaccactttcactaatatgggggatgtttggtttttataatttctagggtttctatct

SEQ ID NO: 14592 - DNA, 841 bp, Arabidopsis thaliana
  Clone ID: LIB23-031-E2_FLI
ttttgcaatatcctttattgattgaccgaagatattttacaagcctttctccactaagcccttctctcttcttctcttggcctctcacttgaatctcccacaaagcgatcaatcacaaattccttcttctctctctctcttttcgtccctaagaatcaattatgaaaggagctaaatcaaagactgaaaccaggagctccaagctctctgtgaccaagaagccggctaaaggagcagggcgtggcaaagctgctgctaaggaccccaacaaaccaaagaggccagccagtgctttcttcgttttcatggaagatttccgtgagactttcaagaaggaaaaccccaagaacaagtctgtagctactgttggaaaagctgctggagacaagtggaagtccttgtctgattctgagaaagctccttatgttgctaaggctgagaaacgcaaggttgaatatgagaagaacattaaagcttacaacaagaaactggaggaaggtccaaaagaagatgaggaatctgacaagtcagtgtcagaggtcaatgacgaggatgatgctgaggatggtagtgaagaggaggaggacgatgactaagaagctgaatgttggtagcattagtatagatggctgcaaaaatctctcctgtttttatctttacttgaaatgttaacggggctgattaaaatgggtctttcctttttatctttttatatttccacaatctctcactaaagccccctgaatggagaaagtgaattgtagaatgtttagatggtgaaagagagacttgcagccctgtaccctttgctttataaaacgatttagttttccttttcctc

SEQ ID NO: 14593 - DNA, 1776 bp, Arabidopsis thaliana
  Clone ID: LIB23-031-G5_FLI
cttctcttcgtcttcttcttcctccgaccttggaaaatctctcgtgactcgctagtcttctctaatgtctttacatgtcaagggacctgtttgtcaaacttgtggcgacataggttttgaagaagcacttgtcttttgtgactcttgtatgtttgagtctattcaccgctattgcttagggataacaccgattccttttacggaatacataacttggatttgtgaggattgtgataacagtgagagtgattctgattgcaatgaagttgatcagactgttaagaagaagaagaagagtagaaatcaaccccttgtggttttagctgaggacaatgtgctccaggaacctttggaggggtctaagagagaagaaagctcatgtagcagaaaacctcatgaattgacttgtttagatggaaatggagaatctgttttggaggctgcagattcatctagtgtgccagatcatagttcttgtactagcaaaaggaaagaagttgatcagactgctaatcttggacatatcttggagaggagtgagaaaaagaagaagaagaagaagaagaaaaagagcatcaatcattcgccaccggttttagctgttgaggaccatgagcttcagggtactaccaatgttgttgaacctgtggaggtgtcttcttcttcaccaactaaagaaacgatggagtctaagagacaagaaagctcagatagtagaaaacctcatgaattgacttgtttagttggagattcggagaccgctaattcatctagtgtgccagagcataattcttgtgctgtcaaaaagagaaaattaagttctggaaacaaacagattcagttagctgatgggagtagttcttgcagagtggctgaatcaaatatgcctctaacgttgacatctaggaactatagagcacaacctatcaaaataccgatatggaggggattgatgtctgttaaaggaggaaacagctgtaccatggatgggattgttgctcatgtatcaagcttagcctgccctaaagtccatgaaacggctagttcattaaagggtcggctctctgctgaaatacttcctaggttggaagtatggccaaagacctttttgaagaatggaggacctaaggatgaaagcgttgccctttttttcttcccttccagtgaaaggtgtacatgaaacagtgatttgtttttctctccctatgcttatgttgtaaaagtatctgaccatttttgtgtttggtttccagtaatgatgaaaaggtttttgattcccttgttgataaaatgaagaagaatgattctgcgatgagatgtgtgcttaatgatgcagaacttctactcttcacatcttatatgttaccaaaggattcttggacttttaactcaaagtactacctgtggggcgtcttcaagcctagacagacttctcgatattagccactccaagactcgctacctttaacagtctctaacttcgagcaaggtttaacagacagatggaaatcataagtaggacttaaagtattctccttcatcctttttgagtatatgttagttctttttcggatttaacgcatagatgggtttggttgtccgattgttgatagttagccagatgctgtatagaatcggaaccgagatggcatccttgatagcatatctttgtcttttgaggctttttttggtggatttgtgccactggttagtcaaatgaatgttaactttgaaatcttcctgattggtgaacttgataattgatcttataccttc

SEQ ID NO: 14594 - DNA, 1614 bp, Arabidopsis thaliana
  Clone ID: LIB23-032-A4_FLI
attttattttctaccaaccaaaagcttttctctttggtttctcttatttagcttctaaccttgaggagaatcataccagaggattgaagtttgaaccttcaaagatcaaaatcaagaaaccaaaaaaaaacaaaaaaaatgtgggatctaaacgacgcaccacaccaaacacaaagagaagaagaatctgaagagttttgttattcttcaccaagtaaacgggttggatctttctctaattcaagctcttcagctgttgttatcgaagatggatccgatgacgatgaacttaaccgggtcagacccaataacccacttgtcacccatcagttcttccctgagatggattctaacggcggtggtgttgcttctggctttcctcgggctcactggtttggtgttaagttttgtcagtcggatctagccaccggatcgtccgcgggtaaagctaccaacgttgccgctgccgtagtggagccggcacagccgttgaaaaagagtcggcgtggaccaagatcaagaagttctcagtatagaggtgttacgttttaccggcgtaccggaagatgggaatctcatatttgggactgtgggaaacaagtttacttaggtggatttgacactgctcatgcagcagctcgagcatatgatagagctgctattaaattccgtggagtagaagcggatatcaatttcaacatcgacgattatgatgatgacttgaaacagatgactaatttaaccaaggaagagttcgtacacgtacttcgccgacaaagcacaggcttccctcgaggaagttcgaagtatagaggtgtcactttgcataagtgtggtcgttgggaagctcgaatgggtcaattcttaggcaaaaagtatgtttatttgggtttgttcgacaccgaggtcgaagctgctagagcttacgataaagctgcaatcaaatgtaacggcaaagacgccgtgaccaactttgatccgagtatttacgatgaggaactcaatgccgagtcatcagggaatcctactactccacaagatcacaacctcgatttgagcttgggaaattcggctaattcgaagcataaaagtcaagatatgcggctcaggatgaaccaacaacaacaagattctctccactctaatgaagttcttggattaggtcaaaccggaatgcttaaccatactcccaattcaaaccaccaatttccgggcagcagcaacattggtagcggaggcggattctcactgtttccggcggctgagaaccaccggtttgatggtcgggcctcgacgaaccaagtgttgacaaatgctgcagcatcatcaggattctctcctcatcatcacaatcagatttttaattctacttctactcctcatcaaaattggctgcagacaaatggcttccaacctcctctcatgagaccttcttgaatcttttatatttttaaggtttattattatataagaaaaacaaaaatgaacctttgaaatccccacatgttcttggtcatttcattaatcatcggcttatattttgcttattttcccctaaatcctcttgttaacttaggcgaacaaaaaaaaattaatggaaatctttttccctcc

SEQ ID NO: 14595 - DNA, 878 bp, Arabidopsis thaliana
  Clone ID: LIB23-032-G7_FLI
catcgataaacacatacgttcacacatatatgtctataaatccgacaatgtctcgtactggcgaaagttcttcaggttcgtcctccgacaagacgataaagctattcggcttcgaactcatcagcggcagtcgtacgccggaaatcacgacggcggaaagcgtgagctcgtccacaaacacgacgtcgttaacagtgatgaaaagacacgagtgccaatactgcggtaaagagtttgcaaattctcaagccttaggaggtcaccaaaacgctcacaagaaggagaggttgaagaagaagaggcttcagcttcaagctcggcgagccagcatcggctattatctcaccaaccaccaacaacccataacgacgtcatttcagagacaatacaaaacgccgtcgtattgtgcattctcctccatgcacgtgaataatgatcagatgggtgtgtacaacgaagattggtcgtcgaggtcgtcgcagattaacttcggtaataatgacacgtgccaagatcttaatgaacaaagcggtgagatgggtaagctgtacggtgttcgaccgaacatgattcagttccagagagatctgagttctcgttctgatcagatgagaagtattaactcgctggatcttcatctaggttttgccggagatgcggcataacaaattaaagagagatatatgattaagattatatgtactatagtggcgtatttcattgggatcatgaaggggaaaaaacgagacatatagtattcttgatgcaatttgagttttgtaatttatttaggtttatgtatgttttcgaagaaaaaaataattccaagtgatgttgtggaattattcaaaaaaagaaaaaaaactttattagatggc

SEQ ID NO: 14596 - DNA, 760 bp, Arabidopsis thaliana
  Clone ID: LIB23-034-E12_FLI
tcaagagagacttcgtgtgtctgtactgcaatgaattgtgccatccatttagtagtttggaagctgttcgtaagcatatggacgccaaaggtcattgcaaagtgcattatggtgatggtggtgatgaagaagatgcagaacttgaagagttctatgactacagcagcagctatgtcaatggagacgaaaatcagatggttgtgtccggtgagtcagtgaacactgtagagctttttggtgggtctgagcttgtgatcaccaagagaaccgataacaaagtaacgtctaggactcttgggtctcgagaattcatgcgctactacaaacagaagccagcaccgtcttctcagaagcatattgtcaactctctaacctccaggtacaagatgatgggtctagcaacagtgcagtcaaaggaggccatagtgaggatgaaggtgatgagagagatgaacaaaagaggagcgaaaagcagtgtcaggctcggaatgaagagcaacgtcatcaggaatctgcccaacaatgtcacctattagtcttgctcctcgattttcaggtctctcctctttgtttgattttgtgaccagagttttggtgagtaaatctatctaagtttttcactagtactcaagtatcttaggcccatttgggtctctgttttgtctgatttagtcttttgaaaatgttacgttttggctgagtttgtatctcttgcccagtgctttgtacactctacattaatctatatttcatttggtag

SEQ ID NO: 14597 - DNA, 1370 bp, Arabidopsis thaliana
  Clone ID: LIB23-035-F1_FLI
gagagttttgtgaactcaagaaaataaaaaaagttatagttaatgggattcggcttagagagtatcaaatcaatctccggcggatggggcgcggcggcgcgttcctgtgacgcttgtaaatcagttaccgccgccgtgttctgtcgagttgactcagctttcttatgcatagcatgtgacacaagaatccattccttcactcgccacgagcgcgtgtgggtttgtgaagtttgtgaacaagctcccgccgccgtcacttgcaaagccgacgccgccgctctttgcgtcagttgtgatgccgatattcactctgctaatcctctcgctagccgtcacgaacgtgtccccgtcgaaactttcttcgactcagccgaaaccgccgtcgccaaaatctcagcttcttcgacttttggtatccttggctcatccaccaccgttgatttaaccgctgttccggttatggctgatgatctcggtttatgtccgtggttacttcctaatgatttcaacgaaccggctaaaatcgaaatcggaactgaaaacatgaaaggttcttctgactttatgttttctgatttcgatcggcttattgatttcgagtttccgaattcgttcaatcatcatcaaaacaacgccggaggagatagtcttgttccggttcagacgaaaacagagcctctcccgttaactaacaatgatcattgcttcgatattgatttctgcagatcaaagctctctgctttcacttacccttctcaatcagtcagccacagtgtttcgacttcttctattgaatacggtgtagttcctgacggaaacacaaacaactctgttaaccggagcacgatcactagctcgacgactggtggtgatcatcaagcgagctctatggatagagaagctagggttttgaggtacagagagaagagaaagaacaggaaatttgagaagacgattcgttacgcttcgaggaaagcttatgcagagtcacggccaaggatcaaaggccggtttgcgaaaagaacagagacagaaaacgacgacattttccttagtcatgtttatgcttcagcagcacacgcacagtacggtgtcgtaccaacgttctgattcgaatctacggtggataaacaatcaacctgaagacttcatatcttccaccgttgatttacagtcggtgtataataagtatagtgagtcttaccgtagacaaacatcttatcctctttaccgttttaattactttttttttacgcgctctcactgccactgtaactctttttttttttcttcctatatatgtatgcttatttttatttagaaaatgttatgaaatcatataatttggtaattatagtttctattggctg

SEQ ID NO: 14598 - DNA, 1150 bp, Arabidopsis thaliana
  Clone ID: LIB23-036-E9_FLI
aataaatcaaatgaagcacctatgctttatacttgtgcaatctgtgctaaaggttacaggagttccaaggctcatgagcagcatcttcagtcgcgtagccatgttttgcgggtttcacaagggacatcaatcaacggagaggaggatatagcgattatcaggcaacttcctcgccgtgttcaacacaggggttccattgatgatgatagtgaagatgaatgggtggaggttgattctgacgaggaattggctgctgaagaagcctctgattctttgtctaagttgaatgtgaatgagtctggatctgctgaagatatggatgatgatggtgatgcagataagtatgagctggatccaacctgctgtttgatgtgtgacaaaaaacataagaccttagagagctgtatgcttcacatgcataagcatcatggtttctttattcccgatattgagtatctcaaggatcctgaagggcttctcacttaccttggtcttaaggtcaagagagacttcatgtgtctgtactgcaatgagctgtgccgtccattcagcagcttagaagctgtaagaaaacatatggaagcaaagagtcattgcaaactgcattatggtgatggtgatgatgaagaagatgctgagctagaagagttttatgactacagcagcagctatgttgatgaagctggaaagcaaattgttgtatctggtgaaacagacaatactgtagaactcgttggtggttctgagctcttgatcacggagaagtccgagaacacaacaacgtctaaaactctcgggtcccgtgaattcatgcgttactacagacagaagccacgcccaacttctcaagacagcaaccagataattgcctctttatcttcaaggtacaagagcctgggtctgaagacagtaccgtcgaaagaggagactttgaggatgaaagtgcgcaaggagatgagcaagagaggcgagacaatgcgtaccaagatcggagtgaagagtaatgtcataagaaacttgcccaataacgtcccatattagtttctgtgtatgtgccacttgttctcaagtgttggattgtatgatgatttcatgtacttttgagtctttgaccaagttgtgttgctacttggtaataagagtaagcttt

SEQ ID NO: 14599 - DNA, 1013 bp, Arabidopsis thaliana
  Clone ID: LIB23-036-H8_FLI
caacaacaaaaactcaagaacaatatctccacttgatcactaccacattgtccaatcactctacaaagcctgtacgtacacaacaacattaccatggtgaaacaagaacgcaagatccaaaccagcagcacaaaaaaggaaatgcctttgtcatcatcaccatcttcttcttcttcttcatcttcttcctcgtcttcgtcttcgtgtaagaacaagaacaagaagagtaagattaagaagtacaaaggagtgaggatgagaagttggggatcatgggtctctgagattagggcaccaaatcaaaagacaaggatttggttaggttcttactcaacagctgaagcagctgctagagcttacgatgttgcactcttatgtctcaaaggccctcaagccaatctcaacttccctacttcttcttcttctcatcatcttcttgataatctcttagatgaaaatacccttttgtcccccaaatccatccaaagagtagctgctcaagctgccaactcatttaaccattttgcccctacttcatcagccgtctcgtcaccgtccgatcatgatcatcaccatgatgatgggatgcaatctttgatgggatcttttgtggacaatcatgtgtctttgatggattcaacatcttcatggtatgatgatcataatgggatgttcttgtttgataatggagctccattcaattactctcctcaactaaactcgacgacgatgctcgatgaatacttctacgaagatgctgacattccgctttggagtttcaattaatccgacggtccataatacatactttaattagttttctaaatcattttttaaattcttttttatatatgtaacatatatttaccctcgtcgtaattattcatttccaagttgtttgttgcttggagagaattgacgacggatacgattatataatataattgtaagtttttatatgtagcaaactcggtacaattcggatttaatagggatctaggaagttcacatgg

SEQ ID NO: 14600 - DNA, 1139 bp, Arabidopsis thaliana
  Clone ID: LIB23-037-B5_FLI
gatttcaaaattttccggtgaaatcgaaaaaaaaagcgagatcttcttctctaatggcgacgaccttaagcagagatcaatatgtctacatggcgaagctcgccgagcaagccgagcgttacgaagagatggttcaattcatggaacagctcgtaagtggagctacaccggccggtgagctgaccgtagaagagaggaatcttctctcggtcgcgtataagaacgtgattggatctcttcgtgcggcatggagaatcgtgtcttcgattgagcaaaaggaagagagcaggaagaacgaagaacacgtgtcgcttgttaaggattacagatctaaagttgagactgagctttcttcgatctgttctgggattctcaggttacttgattcgcatctaattccttcagctactgccagtgagtctaaggttttttacctgaagatgaaaggagattatcatcgttatttggctgagtttaaatctggtgatgagaggaaaactgctgctgaagatactatgatcgcttacaaagctgctcaggacgttgcagttgctgatctagcacctacacatccgatcaggcttggtttggctcttaacttctcagtgttttactacgagattctcaactcttcagagaaagcttgtagcatggcgaaacaggcttttgaagaagccattgctgagctggacacattgggagaggagtcatacaaggacagtactctcatcatgcagttgctaagggacaatctaaccctttggacctccgatatgcaggagcagatggatgaggcctgaaggtctaatggaagaaaagacggttatgtaatgtacctgcaaccgtaaccgaaaatctgagttcaacctcctttgctgtaaaacttgtcgaaaagaaaagtttgtttttttatgacagattatgtgcacagctttggtgttatctgctgctctgtatcaactctgtttttgtttggtaatttatcctcatctttgcttcttttcttctcaaaattttatatttcaaacaaagtaacaatatcttagcttggtttgtgagttcctcgagactgatgaaacgcttagtgtagcgttttagatgatttcgcttatgagtggtcaagttaacggtttggtttc

SEQ ID NO: 14601 - DNA, 952 bp, Arabidopsis thaliana
  Clone ID: LIB23-037-D3_FLI
agattcctgagaatttgagcctaatccttcatcaccaagctaagtctcaagatctgattgtggttgtggttgacttcttcttcaaaggtttcacgagtacaataatgagtcaaaagggtttgatatatagctttgttgctaaaggaacagttgttctagcagagcatactccttattcaggaaactttagcaccattgctgttcaatgtctgcagaagctacccacaaatagcagcaagtatacttactcttgcgatggtcatactttcaatttccttgttgacaatggctttgtgtttctagtggttgctgatgagtccaccggaagaagtgttcctttcgtgtttctcgaacgggtcaaggaagactttaagaagcggtatgaagcgagtataaagaatgatgagcgacatcctcttgcggatgaggacgaagatgatgatttgtttggagatcggtttagcgttgcatacaatcttgacagggagttcgggcccatactaaaggagcatatgcagtattgtatgagccatccagaagagatgagcaaactttctaagttgaaggcccaaataactgaggtcaaggggatcatgatggacaacattgagaaggttctggacagaggagagaagatcgaacttctggttgacaaaaccgagaacctacagttccaggcagatagcttccagagacaaggaaggcagttaagaaggaagatgtggctacagagtctgcagatgaagctgatggtggctggtgctgttttctcttttattctcatcgtttgggttgttgcttgtggaggtttcaaatgctcatcatgatgtttcgcttcgtttgtatctgttttaacacttaaattgcatgctcatgtttgtacatggaagaacttataataacatatcatcatatcatcatcatctcccacatgctgtgatgctatatatat

SEQ ID NO: 14602 - DNA, 1096 bp, Arabidopsis thaliana
  Clone ID: LIB23-037-H11_FLI
attgaagagaaataataacaattaactcaaccaaaaatatgaggaagccagaggtagccattgcagctagtactcaccaagtaaagaagatgaagaagggactttggtctcctgaggaagactcaaagctgatgcaatacatgttaagcaatggacaaggatgttggagtgatgttgcgaaaaacgcaggacttcaaagatgtggcaaaagctgccgtcttcgttggatcaactatcttcgtcctgacctcaagcgtggcgctttctctcctcaagaagaggatctcatcattcgctttcattccatcctcggcaacaggtggtctcagattgcagcacgattgcctggtcggaccgataacgagatcaagaatttctggaactcaacaataaagaaaaggctaaagaagatgtccgatacctccaacttaatcaacaactcatcctcatcacccaacacagcaagcgattcctcttctaattccgcatcttctttggatattaaagacattataggaagcttcatgtccttacaagaacaaggcttcgtcaacccttccttgacccacatacaaaccaacaatccatttccaacgggaaacatgatcagccacccgtgcaatgacgattttaccccttatgtagatggtatctatggagtaaacgcaggggtacaaggggaactctacttcccacctttggaatgtgaagaaggtgattggtacaatgcaaatataaacaaccacttagacgagttgaacactaatggatccggaaacgcacctgagggtatgagaccagtggaagaattttgggaccttgaccagttgatgaacactgaggttccttcgttttacttcaacttcaaacaaagcatatgaatatttttacgtcatcttattcttttttctattgcggtttatactcaagattcttagccacacacacataaatgcaaatatatatacattgttagagagtattttgtatttcgaataatcttttcgtactagggcttgagccttgaggtgccatgtaatgattagtcaatgtaaaacatatatcctataataaataaataaaagaaataataagc

SEQ ID NO: 14603 - DNA, 2318 bp, Arabidopsis thaliana
  Clone ID: LIB23-041-G1_FLI
gtcagtttcctgctaagaagccgactaggcaatgggctgcttggacacatcaagaagaggaaagtttcttcactgctcttcgtcaagttggaaagaattttgagaagataacttctcgtgttcagagcaaaaacaaggaccaggtcaggcattactattatcgtttagtgaggcgtatgaacaaacttttgggcccggatctgagccttgatgccaagaacccaaaggacaccaatgctgcaatgctacgatggtggtctttgcttgaaaagtatagctgcaaagcttcaaaacttcatctcaagccccggagattcaaactatttatagaggccttggaacaccaattgctgaaagaccgcagaaagagcataagaaaacggacttgccagggagaaaatctctcttctgcttccctcggaaacatctcaagtcatagtagagaaagaggattggataaccgtccatttaaacttattctctccgacggccaaaatgttaaaaagctagggcctggaagagcatctaccaaacatggtgaaagcttaagtgtcaaccttggtgacgaaaaagaagacacagcctttgggagaggtggaaggcaacggcgaaaacaagcaggttatagaaaatgggaaaaagctgcaatagatggggtctctctggttgctgatgctgcagagcatttggaacgaacatcaattgacaaagatatggatgatcaaacagatttaggtcccacaagatatttaaccggaaagtctccactttctctatgctcagctggtgatgttcctctcagtgatgccaatatgcagttttctgccaagcttaaacttcagctgttcccgattgatgaatgtactcgaagatccttggaaatggataagcacaatccgcatcttgaacttactcttagtaatcgcaagaagatatcatctgtacttgaacatctcaatcgcaaatggggaagctcaagttgtgcgactggagagctattgctatttccttacaacgcacgaaaagaaactgtaacgtgccatcagaggtggacccatgactcttttctaagcgcagcagaagtgcattcaatggtcggaagtccttcggttttccgcttaaggtatggttggtttgtccatgatgcgtcaggttctattatttctcaagttccaacttcagatccttgcccttcactcgaggatgacatgaatgtggataggttgaacgaggtcaacatgctccttactgaatcaggacccttgtctgtgcattcaactgctgaacaaacgacatctgtagagcccagtcagggtctagtatgtgcatctggtgtccatgatcgtcccgcaagatctagagatgattatgaacctgcttcaacgagtattactccacttgagcatttgagcggcggtaatgcacaatcaccaggagaatgggctgatagtcttactaacataagtataggtgatctactttctgaagtgcccgatgacatagatagtgatggtgttgatccacctgccaccgaaggttcacattacctccttcgagatgtcccatttacctctgactcttttgatgctgcaattgctgctcatatactaagacaccagaacaagccaagtgctcaactaccgctgacttctggctcttcctctctgtgggatgatgaagaaacacgtgatgccttctctttccaaaaaaatcgtttcgcaaattccaccgagctggctagtgttgcttctcctaaaggtgttggcagagtaaatggagagccttcacagttggtggaggcttcatccggcgatgagggatcttataaccctcatgacgatggagatccaatggaagagggtccagcagaccctcatacgatggattctccagggaagaccccttgtggacttgcggatgtatactggcccgactcgttaggaccactggatttagacattagatcgtcaaagtatacagatgatttgatccttagtgagagcctcgggggattgagccgtctgatagcaaccagccttgatgcgtttcagaactgctcgctctttgggttcgacaataagaaggacaagtctaacatggtatgaaatggaaccaaagctaaagcatggggtccaaatgttgatagttgaaaaagaaagtgacttcttgccttttgaaaaaagaaacttttatcacctgatagcttcactgtacaaaaatttgatgtaaccttttactcttcctttcacacattcttttgtgttgatacatgtttctctgtgtacacttttactgttaatttacatgtttatttggct

SEQ ID NO: 14604 - DNA, 1713 bp, Arabidopsis thaliana
  Clone ID: LIB23-041-H7_FLI
tctcacattaatgggtcaaaccttttgctcttccttttgattaatttagtgtttgacaatctcctcctccttctccttcttcttcaaagttttgtcgcagtatctattgttcttacagagagaaaggaaagctttagtcttttaccagtttgatccaattctgggtttcactgaaaaaaagttgggagtttgattcttctaactgtagaagaaacagagtcaacagaagaaaactaaaaaagttgagatttttctctcacgcgctcaagaacttgagtatgtcttcttctgtagcagtgttatgggttgctacttcttctctaaatccagacccaatgaacaattgtgggttggtaagggttctagaatcttctagactgttctctccttgtcagaatcagagactaaacaaaggtaagaagaagcagataccaacttggagttcttcttttgtaaggaaccgaagtagaagaattggtgttgtgtcttcaagcttagtagcaagtccttctggagagatagctctttcatctgaagagaaggtttacaatgttgtgttgaaacaagctgctttggtgaacaaacagctaaggtcttcttcttatgaccttgatgtgaagaaaccacaagatgttgttcttcctgggagtttgagtttgttgggtgaagcttatgatcgatgcggtgaagtttgcgctgaatatgctaagacgttttatcttggaactttgcttatgacacccgaaaggcgaaaggcgatttgggcaatctacgtttggtgtagaagaactgatgaacttgtggatgggccaaatgcttcacatataactcccatggctttagatagatgggaagcaaggttagaagatcttttccgtggtcgtcctttcgatatgcttgatgctgctctcgctgatacagttgctagatacccggtcgatattcagccatttcgagacatgatcgaaggaatgagaatggacttgaagaaatcgagataccagaacttcgatgatctatacctttactgctactacgtcgctggaaccgtcggattgatgagcgttccggttatgggaatcgatcctaagtcgaaagcaacaaccgaaagtgtttacaacgctgccttggcccttggtatagccaatcagcttactaacatactcagagacgtaggcgaagatgcgagaagaggaagggtttatctgcctcaggatgaattggctcaggctggtctttcagatgaagacatattcgccggaaaagtaactgataaatggagaaacttcatgaaaatgcagcttaaacgagcaagaatgttcttcgacgaagctgagaaaggcgtcaccgagctcagtgccgctagcagatggcctgtatgggcttcattgctattgtacaggagaatactggacgagattgaagcgaatgattacaacaattttactaagagagcttatgtggggaaagtcaagaaaattgcagctttgccattggcttatgctaaatcagtactaaagacttcaagttcaagactatcgatatgagagcgagaggaaagtggaacaaaaacaacctaagagcgctttttgtgattaagaaaaaacttaggctcgaatttattatgttaactaatatatacatattaatggggaagcaaattcttataatgttacattatctttctgaatgtaaaaaagtattttttttttt

SEQ ID NO: 14605 - DNA, 1519 bp, Arabidopsis thaliana
  Clone ID: LIB23-047-E8_FLI
cgcaaaagtcacaaccgcagacaacgcaaaaagagttattacaaacgcaagaggaatctgcggtggtggcagctaaaaagccaccgttgaaacgagcgtcgacgaaagaccgacacacgaaagtagacggaagagggaggagaataaggatgccggcgttatgtgcagctagggtttttcagctaacgcgagagctaggtcataaatccgacggtgagacaatagagtggcttcttcaacaagctgaaccatctgtaatcgccgccaccggaaccggaacaatcccggcgaatttcacttctttaaacatctctctccgttcttcaggctcttccatgtctcttccttctcatttccgctccgccgcttccacttttagccctaataacatattttctccggcgatgcttcaacaacaacaacaacaacaacgtggtggtggtgttgggtttcatcatccccatctacagggacgtgcacctacgtcgtctttgtttcctggtattgataacttcacaccaacgacgtcgtttttgaactttcataatccaacaaagcaagaaggagatcaagattctgaagagttaaactcggagaagaaaagaagaatccaaacgacgtcggatttgcatcaacaacaacaacaacaccaacatgatcaaatcggaggatatacacttcaatctagcaacagtggatctacagccaccgcagccgccgcgcaacaaataccgggaaatttctggatggttgcggcggctgcggctgcaggtggtggtggtggtaataacaaccaaacaggtggtcttatgacagcttctattggtactggtggcggcggtggagagcctgtttggacgtttccttccattaacacggcagcggcagcgttatatagaagtggcgtttcgggcgttccaagcggcgcggtttctagcggtttacattttatgaatttcgcagcgccaatggcatttcttactggacaacaacagctagcaacaactagtaatcatgagattaatgaagatagtaataataatgaaggaggaagaagtgacggtggtggtgatcatcataatacacagagacatcatcatcatcaacaacaacatcatcataatattctctccggcttgaaccagtacggacggcaagtttccggcgactctcaagctagtggatcacttggaggtggtgatgaggaggatcagcaagattagacacacacaaaaacattttaacggtgggattttctgccgacggcggtagcggtgacggcgttcggcggctgtgtaaaacttttgttttcaccgttaatttttttttattttctgtagtaattttttttgctaagtaaaaaaaaaaaaaaaaaacacgtgagattttctttttaattttgatttttttacttgattttaaatttgatttttcttgtgagtgagtgattaaatagtacacgagattttttatgtcaggttttttggattttgaggagaatatgacacttttttttatc

SEQ ID NO: 14606 - DNA, 980 bp, Arabidopsis thaliana
  Clone ID: LIB23-048-A2_FLI
caaccttacctctatctccgatcaatcatcagttgtgtcggttcgggaacaactctttgacgactcaccggttctgttctcctggcttcttgatttcttctccttgtttcattggtttgaccggaatgggctctgctactcagttacgtgctcgtcgttctctgatctcttcagcagttgcgacgaattcgctgttgcatgacgtcggagccaccgtggcagtgcttggtggagcatacgcgcttgtcttaagcttcgagagtctcaccaagcgaaacgtcattcaacagagtttgagcagaaagcttgtgcatatactctcaggtctgcttttcgtacttgcgtggccaatcttcagcggatcgaccgaggctcgatactttgctgcttttgttccgttagtgaatggcttaaggcttgttattaacggactatccatttccccaaattcgatgctaatcaaatccgtcacaagagaagggagagcagaagagttgcttaaaggtcctttgttctacgttctagctcttcttttctctgcggttttcttctggagagagtctcctatcggtatgatctcgttagcaatgatgtgtggtggcgatggaatagctgatataatgggacgtaagtttgggtcaactaagataccttacaacccaagaaagagttgggcaggaagcatctccatgttcatcttcggcttcttcatctccatcgcattactttactattactcaagccttgggtaccttcacatgaactgggaaacgaccttgcagagagtagcaatggtctcaatggtcgccacggtagtcgagtcgctacccatcaccgatcaattagacgacaatatttcggttcctctggctactattttagctgcttatttaagtttcggatattagattaatccctcataaaccgaatgtgtatatacgtatttttttaatgaatccgaccttacaaatgtttccacg

SEQ ID NO: 14607 - DNA, 1723 bp, Arabidopsis thaliana
  Clone ID: LIB23-048-B1_FLI
ctctctccttttcttttcttcttcctctttctctcactaaaacccttgtttccttcactcgccgtcgcttttcccgtcatcggaatcttcaaattcgactctcgcttcactacgatccatgtccggttacatctacgccggttataccacctatacgtcgtcacttagctttcgcctcaacaaaacctccgtttcatccttccgatgattaccatcgatttaacccttcttcgctcagtaataataacgacaggagcttcgttcatggttgtggtgttgtagatcgggaggaagatgctgtcgttgttagatctccttcacgaaagagaaaggcgacaatggatatggttgttgctccatctaataatggattcacgagttctggtttcactaacatacctagcagtccctgtcaaactcctagaaaagggggcagagtcaacatcaagtcaaaggccaaaggaaacaagtcaactcctcaaacacccatctcgacaaacgctggttctcctatcacacttactccatcaggaagttgtcgttatgacagttctttaggtctccttacaaaaaagttcgtcaatctaattaaacaagccaaagatggaatgctggacctaaacaaagctgcagaaacattggaggtgcagaaacgacgtatatatgatattacaaacgttttggaggggatagatctcattgaaaagcctttcaagaatcgaatactttggaagggagttgatgcgtgtcctggcgatgaggatgctgacgtatctgtattacaggcagaaattgaaaacctcgccctcgaagagcaagcattagacaaccaaatcagacaaacagaggaaagattaagagacctgagcgaaaatgaaaagaatcagaaatggctttttgtaactgaagaggatatcaagagtttaccaggtttccagaaccagactctgatagccgtcaaagctcctcatggcacaactttggaagtgcctgatccagatgaagcggctgaccacccacaaaggagatacaggatcattcttagaagtacaatgggacctattgacgtatacctcgtcagcgaatttgaagggaaattcgaagacacaaatgggagtggtgcagcaccaccagcatgcttgcctattgcttctagctcaggatctacaggacaccatgacatcgaagccttaactgttgacaacccagaaactgctattgtgtctcatgatcatcctcatcctcaacccggcgatacctctgatcttaattatttgcaagagcaagtaggaggaatgcttaagattactccctctgatgttgaaaatgatgagtcggactactggcttctctcaaatgctgagattagcatgacggatatttggaaaactgactctggtatcgattgggattatggaatagccgacgtgagtactccaccaccaggaatgggcgaaatagcaccaacagctgttgactcaaccccgagatgatcgaataccaagcacacttctcaacttctgatcccaaatgtgttacctcacaacactccctaaaatcatatacaaggagggagcaactacagaacgtgtatgaaccaatggcaggtgcgttccatacaatgtaccattagattatgattcatttatcgcctagagtgatgttgtagaggagcaccgagaaactaatgtaagtttaacagagaatgtactttatcggctgc

SEQ ID NO: 14608 - DNA, 892 bp, Arabidopsis thaliana
  Clone ID: LIB23-048-B10_FLI
gcactatttgctacgacaaatgggtaaagaaatcctccatacagaatcaaagaagactgacaaattagtcgacaatattcagagttccatgatcgcaacaaaggaaatcgagatcactcgttcaaagagtcgccgaaagaacaacaaggaaaagagagtggtttgcgtagtggatcgaggcagccggtccagtgacctatgggtttggcgaaagtatggtcaaaaacccatcaaaagttctccttatccaaggagttactatagatgtgccagctcgaaaggttgttttgctaggaaacaagtcgaacgtagccgcactgatccaaatgtttcagtaattacttacatctctgagcataaccatccattccccactctacgcaatactcttgccggctccactcgttcctcttcctccaaatgctcagatgtaactacttctgcctcatcgacagtctcccaagacaaagaaggaccggataaatcccatttgccttcctcccctgcttctcctccttatgcggccatggtggttaaggaggaggacatggagcaatgggacaatatggagttcgatgttgacgttgaagaagatactttcatacccgaattatttccagaggataccttcgctgatatggacaagcttgaggaaaattctcagactatgtttctctctcgcagaagcagcggaggcaacatggaagcccaagggaagaactctagtgatgatagggaggtcaatttacctagtaaaattctgaatagatagttactattatgcaatgttaataataatctgtttgattttttaacatttgttcggacatccaaacctgtgggacacaatttattactttaaagataatatatcaaacagagagtgcaatgg

SEQ ID NO: 14609 - DNA, 698 bp, Arabidopsis thaliana
  Clone ID: LIB23-054-E5_FLI
gtactgatggtgttgttccggtggagaatcggacggttaggattccgacggtgaacgagaattgctttgaaatggattttaccggaggatctaaaggctttacttatggtggtggttacaattgcatcagtcacagcgtgtcatcatcgtcgatggaagtgggagtggtgccagatggtggttcggtggctgatgtatcgtatccttacggtggtcctgcaaccagtggagctgatccggggacacagcgggctgttccgctgacttcagctgagagagaagcgagggtaatgaggtacagagagaagaggaagaacaggaagtttgagaagactataaggtatgcttcaaggaaagcgtatgcggaaatgagaccgagaatcaagggacggtttgcgaagcggacggatacaaatgagagcaatgatgtggttggtcatggtggtatctttagtgggttcggacttgtacctacattttagatattgagagagggagagactctaaaatggaagatggtgggtggtttggtgtttgttttagtaataaggtttttaacgaacgtttaatttaaacgagtttgtttgttttttgttgatgagtatttttagttgttgtgggcgatgaagaggaagagaagtgagtgggtggtgtttaactgtttataagtaacttgttttgtatatatcgtgattttg

SEQ ID NO: 14610 - DNA, 1262 bp, Arabidopsis thaliana
  Clone ID: LIB23-054-E6_FLI
ctttccctaaacacactgattattttctctccgacgccgccatgtctctgctctcagatctcgttaacctcaacctcaccgatgccaccgggaaaatcatcgccgaatacatatggatcggtggatctggaatggatatcagaagcaaagccaggacactaccaggaccagtgactgatccatcaaagcttcccaagtggaactacgacggatccagcaccggtcaggctgctggagaagacagtgaagtcattctataccctcaggcaatattcaaggatcccttcaggaaaggcaacaacatcctggtgatgtgtgatgcttacacaccagctggtgatcctattccaaccaacaagaggcacaacgctgctaagatcttcagccaccccgacgttgccaaggaggagccttggtatgggattgagcaagaatacactttgatgcaaaaggatgtgaactggccaattggttggcctgttggtggctaccctggccctcagggaccttactactgtggtgtgggagctgacaaagccattggtcgtgacattgtggatgctcactacaaggcctgtctttacgccggtattggtatttctggtatcaatggagaagtcatgccaggccagtgggagttccaagtcggccctgttgagggtattagttctggtgatcaagtctgggttgctcgataccttctcgagaggatcactgagatctctggtgtaattgtcagcttcgacccgaaaccagtcccgggtgactggaatggagctggagctcactgcaactacagcactaagacaatgagaaacgatggaggattagaagtgatcaagaaagcgatagggaagcttcagctgaaacacaaagaacacattgctgcttacggtgaaggaaacgagcgtcgtctcactggaaagcacgaaaccgcagacatcaacacattctcttggggagtcgcgaaccgtggagcgtcagtgagagtgggacgtgacacagagaaggaaggtaaagggtacttcgaagacagaaggccagcttctaacatggatccttacgttgtcacctccatgatcgctgagacgaccatactcggttgatgacacatttcatgatttgatttctctccaatttggttttttttttttccttttgattgcacttttcgataataaaaaaataattcttattatgggcgtattgttgtgacattttgtgttttgtttcgaataattaaataagcgcttcttaaggtg

SEQ ID NO: 14611 - DNA, 1301 bp, Arabidopsis thaliana
  Clone ID: LIB23-055-G8_FLI
ataaactcggtaggtttgcgaaaacctcgccgccgggaaaaaaaaaaatcaatggaaggaggaggaagaggaccaaatcaaacgattctcagtgaaatagaacatatgcctgaagctccacgtcaacgtatctctcatcaccgtcgagctcgctctgaaaccttcttctccggcgaatcaatcgacgatctcctcttattcgatccttccgatatcgatttctcttctctagacttcctcaacgctccaccaccaccacaacaatcacaacaacaaccgcaagcttctcccatgtccgttgattcggaagaaacctcatcgaacggtgttgttcctcctaattctcttcctccaaaacccgaagctagattcggtcgccatgttcgtagcttctcggttgattccgatttcttcgatgatttgggtgttactgaggagaagtttatagctacaagttcaggagagaagaagaaagggaatcatcatcatagcaggagtaattctatggatggagagatgagttcggcgtcgtttaatatcgaatcgattttagcttctgtgagtggtaaagatagtgggaagaagaatatgggtatgggtggtgatagacttgctgagcttgctttgcttgatcctaaaagagctaaaaggattttagcgaatagacaatctgcggcgaggtcgaaagagaggaagattaggtatactggtgagttagagaggaaggttcagacacttcagaatgaagctactacattgtctgctcaagtcactatgttacagagaggaacatcagagctgaacactgaaaataaacacctcaaaatgcggcttcaagctttagagcaacaagctgaacttagggatgctttgaatgaagcgctgcgggatgaactgaaccgacttaaggtggtagctggagaaattcctcaggggaatggaaattcttacaaccgtgctcaattctcatctcagcaatcggcaatgaatcagtttgggaacaaaacgaaccaacagatgagtacaaacgggcagccatcgctcccaagctacatggatttcaccaagagaggctgagttcgtgtcacctatatatgtttgctgagttataaatacgttatattcatttcgggctgcaatatttgatgtatgtaaaaagtatgtatgtatccatgtataatggcttttgtgttgttagcgtctatgcagatatgttcatggcgacatcggtctatctttacaagtagtatccattgtaatatactacccaaaaatctttatagtaagcacttttcctaggc

SEQ ID NO: 14612 - DNA, 2637 bp, Arabidopsis thaliana
  Clone ID: LIB23-056-D7_FLI
cttgcaaggatggtaagttgggatgtttggataatgggaagtatgtgaggtatacacctgaacaagttgaagcacttgagaggctttatcatgactgtcctaaaccgagttctattcgccgtcagcagttgatcagagagtgtcctattctctctaacattgagcctaaacagatcaaagtgtggtttcagaaccgaagatgtagagagaaacaaagggaagaggcttcacggcttcaagctgtgaatcggaagttgacggcaatgaacaagctcttgatggaggagaatgacaggttgcagaagcaagtgtcacagctggtccatgaaaacagctacttccgtcaacatactccaaatccttcactcccagctaaagacacaagctgtgaatcggtggtgacgagtggtcagcaccaattggcatctcaaaatcctcagagagatgctagtcctgcaggacttttgtccattgcagaagaaactttagcagagtttctttcaaaggcaactggaaccgctgttgagtgggttcagatgcctggaatgaagcctggtccggattccattggaatcatcgctatttctcatggttgcactggtgtggcagcacgcgcctgtggcctagtgggtcttgagcctacaagggttgcagagattgtcaaggatcgtccttcgtggttccgcgaatgtcgagctgttgaagttatgaacgtgttgccaactgccaatggtggaaccgttgagctgctttatatgcagctctatgcaccaactacattggccccaccacgcgatttctggctgttacgttacacctctgttttagaagatggcagccttgtggtgtgcgagagatctcttaagagcactcaaaatggtcctagtatgccactggttcagaattttgtgagagcagagatgctttccagtgggtacttgatacggccttgtgatggtggtggctcaatcatacacatagtggatcatatggatttggaggcttgtagcgtgcctgaggtcttgcgcccgctctatgagtcacccaaagtacttgcacagaagacaacaatggcggcactgcgtcagctcaagcaaatagctcaggaggttactcagactaatagtagtgttaatgggtggggacggcgtcctgctgccttaagagctctcagccagaggctaagcagaggcttcaatgaagctgtaaatggtttcactgatgaaggatggtcagtgataggagatagcatggatgatgtcacaatcactgtaaactcttctccagacaagctaatgggtctaaatcttacatttgccaatggctttgctcctgtaagcaatgttgttttatgcgcaaaagcatcaatgcttttacagaatgttcctccggcgatcctgcttcggtttctgagggagcataggtcagaatgggctgacaacaacattgatgcgtatctagcagcagcagttaaagtagggccttgtagtgcccgagttggaggatttggagggcaggttatacttccacttgctcatactattgagcatgaagagtttatggaagtcatcaaattggaaggtcttggtcattcccctgaagatgcaatcgttccaagagatatcttccttcttcaactttgtagcggaatggatgaaaatgctgtaggaacctgtgcggaacttatatttgctccaatcgatgcttcgtttgcggatgatgcacctctgcttccttctggttttcgtattatccctcttgattccgcaaaggaagtatctagcccaaaccgaaccttggattttgcttcggcactggaaattggttcagctggaacaaaagcctcaactgatcaatcaggaaactccacatgtgcaagatctgtgatgacaatagcatttgagtttggtatcgagagccatatgcaagaacatgtagcatccatggctaggcagtatgttcgaggtatcatatcatcggtgcagagagtagcattggctctttctccttctcatatcagctcacaagttggtctacgcactcctttgggtactcctgaagcccaaacacttgctcgttggatttgccagagttacaggggctacatgggtgttgagctacttaaatcaaacagtgacggcaatgaatctattcttaagaatctttggcatcacactgatgctataatctgctgctcaatgaaggccttgcccgtcttcacatttgcaaaccaggcgggacttgacatgctggagactacattagttgctcttcaagacatctctttagagaagatatttgatgacaatggaagaaagactctttgctctgagttcccacagatcatgcaacagggcttcgcgtgccttcaaggcgggatatgtctctcaagcatggggagaccagtttcgtatgagagagcagttgcttggaaagtactcaatgaagaagaaaatgctcattgcatctgctttgtgttcatcaattggtcctttgtgtgagatttattgtattttgtattttcagactaagcttttgccttttggctgtattgtaaaacggtcatgttgttgttgttgttgttgttgttcttgatgttgctgtgaacacgtaaaacagtgttttgtttcaaaactc

SEQ ID NO: 14613 - DNA, 1890 bp, Arabidopsis thaliana
  Clone ID: LIB23-061-D6_FLI
ctgaaaccttatctgaattacatttccccgattcgacgttgtgcgaattgatgcagcagagaggacgatccgtcaaccgcagatcacgaagcttctctagatccagactcgccgtcgaaggccactgaattactctctcccctctcttggcagatcttcttcttcgttttttcccgacaaacgacatttccgaaatggctgcatcgtacgaagaagagcgtgatattcagaagaattactggatagagcattccgctgatctgactgttgaagctatgatgcttgactcgagagcttctgatctcgacaaggaagaacgtcctgaggtactctctttgctccctccatatgaaggcaaatcagtgttggaacttggagctggtattggtcgtttcactggtgaattagctcaaaaggctggtgaactcattgctcttgacttcattgataacgttatcaagaagaatgaaagtatcaatgggcattacaagaatgcaagtttatgtgtgctgatgttacatcccctgacctcaagatcactgatggatctcttgacttgattttctccaactggctgctcatgtatctttctgacaaagaggtggagcttttggcagaaaggatggtcggttggatcaaggttggaggatacattttcttccgtgaatcttgcttccaccaatcaggggacagtaagcggaaatccaaccccactcactaccgtgaaccccgtttctattccaaggtctttcaagagtgtcagactcgggatgctgctggaaattcatttgagctctctatgatcggatgcaagtgcattggagcttatgtcaagaacaagaagaatcagaatcagatttgttggatatggcagaaggtcagctcagaaaatgacagaggcttccaacgtttcttggacaatgtccaatacaaatccagtggaatcctacgctatgagcgtgtctttggccaagggtttgtgagcactggtggacttgagacaaccaaagaatttgtggagaaaatgaatctgaaaccaggacagaaagtcttagatgttgggtgtggcattggtggaggtgacttctacatggctgagaagtttgatgttcacgttgttggtatcgatctttctgtcaacatgatctctttcgcattggaacgtgctattggactcagctgctcggttgagtttgaggttgctgattgcaccacaaaacactacccagataattcgtttgatgtcatttacagccgtgacactattctgcacatccaagacaaaccagccttgtttaggactttcttcaaatggcttaaaccgggaggtaaagttctcatcagcgactactgtagaagccccaaaactccatctgctgagttttcagagtacatcaaacagagaggatatgatctccatgacgttcaagcttatggacagatgctaaaagacgctggcttcactgatgtgatcgcagaggaccgtactgatcagtttatgcaagtcctgaaacgtgaattagacagggtggagaaagaaaaggaaaaattcatctccgacttctccaaagaggattacgatgacattgttggaggatggaagtcaaagctggagaggtgtgcatcggatgagcagaaatggggacttttcatcgccaacaagaattaagcaaatcgaaatctactacttctatgttttcttctttctttgtttgttcaataaaaatgtcatttccgctaggtgatgatatatgcctgtagtgtgttatgtggacttgttgagtggtgttaaatcttgtttcccttatgtgatatgtaaaccgaattatgtttggtcttagtttatactctttgatttgaagaattttctaaatgcatttgtgttatgct

SEQ ID NO: 14614 - DNA, 1176 bp, Arabidopsis thaliana
  Clone ID: LIB23-065-D10_FLI
gtcaaattcaaacagataacatttttcgtcaaaagaatcagtaaaaactaaacattttgactatatcctacttgaatcaattcttcggctgattttgaagttttgtgacattcagatattctagggttttgtggtaaatggaatcgaatcacgaaggcaacgcgatacaagtgattgaccaagtaacaaccatgacccatctgtctgacccgaatccgaaaaccaaaccgggtatgatgctcatgaaacaagaagacgggtatttgcagccggtgaagactaaaccggctccgaagagaccgacttctaaagaccgtcacacgaaagtagaaggacgaggtcggaggatccgaatgccggcgggttgcgctgctcgggtctttcaattgacccgtgaacttggtcacaaatccgacggagaaacgatacggtggttattggaacgagctgaaccggcgataattgaagcaaccggaaccggaactgtaccggctattgctgtatcggttaacggaactttaaaaatcccgacgagctctccagtgttgaatgacggcggccgtgacggtgacggtgacctaataaagaaacggaggaagagaaactgtacgagcgatttcgtagacgttaatgacagctgtcatagctccgttacttctgggttagctccgataacggcgtcaaactacggcgttaatatcctgaacgttaatacacaggggtttgtgccgttttggcctatgggtatgggtactgcgtttgttactggtgggccggatcaaatgggccaaatgtgggctattcctaccgttgctacagctccgtttctgaatgttggtgctagaccggtgtctagttatgtctcaaacgcttcagacgctgaggcggagatggaaacgagcggtggcggaacgacgcaaccgctgagggatttttcgttggagatttatgataagagagagcttcagtttttgggtggctcagggaactcatctccgtcttcatgtcatgagacttaaggaattttaactcttagttctagtttctttttagtttttagtaagtttgattcctgatttaggttaagtaagatttgtaaaagaattgggagcacaatttcaattttatgtttctgtcaaacattttggtaattaatggaactatcctatcattttt

SEQ ID NO: 14615 - DNA, 973 bp, Arabidopsis thaliana
  Clone ID: LIB23-068-C8_FLI
ctcttacgaagatgatcatcctcatcaatctccatctcttgctcctcttcttccttcttgctctctacctcaagatctccatggatttgcttcgtttctaggtaagagatctccaatggaagggtgttgtgatttagaaacagggaacaatatgaatggagaagaggattattcagatgatgggtcacaaatgggagagaagaagaggagattgaacatggaacaagtgaagacactagagaagaactttgagcttggaaacaaacttgaaccagagaggaaaatgcagctagctcgtgccttaggtttgcaaccaagacagatcgcgatttggtttcaaaatcgaagagctcgttggaaaacaaagcagctagagaaagattatgatactcttaaacgacagtttgatacacttaaagctgaaaatgatcttcttcaaactcataatcagaaactccaagctgagataatgggattaaaaaacagagaacaaacagaatcaataaatctaaacaaagaaactgaaggatcttgcagtaacagaagtgataacagttcagataatctcagactagatatctcaactgcgccgccatcaaacgacagtacattaaccggtggccacccaccgccaccacagacagttggtcgacacttcttcccaccgtcgccagccaccgcaacgacaactactacaacaatgcagttctttcaaaactcatcttcaggacagagtatggttaaagaagagaatagtatcagtaacatgttctgtgcaatggatgaccattctggtttttggccatggcttgatcagcaacagtacaattgaaattggtctacctgttttttttgtttttgtttttaaaaaaatttatattttttttttttgtatttggaattttgatcagaagaacccatgcatgttttcaaaaactggaatctatatcattagctcactttgaaatctgca

SEQ ID NO: 14616 - DNA, 717 bp, Arabidopsis thaliana
  Clone ID: LIB23-068-H9_FLI
ttcgagttctgtagctccagcatgaaggaagtcctagagaggcataacttgcagtcaaagaacttggagaagcttgatcagccatctcttgagttacagctggttgagaacagtgatcacgcccgaatgagtaaagaaattgcggacaagagccaccgactaaggcaaatgagaggagaggaacttcaaggacttgacattgaagagcttcagcagctagagaaggcccttgaaactggtttgacgcgtgtgattgaaacaaagagtgacaagattatgagtgagatcagcgaacttcagaaaaagggaatgcaattgatggatgagaacaagcggttgaggcagcaaggaacgcaactaacggaagagaacgagcgacttggcatgcaaatatgtaacaatgtgcatgcacacggtggtgctgaatcggagaacgctgctgtgtacgaggaaggacagtcgtcggagtctattactaacgccggaaactctaccgggagcgcctgttgactccgagagctccgacacttcccttaggctcggcttaccgtatggtggttagagatggaacaattcaaagaagttgatggagtgaggagagtaatgtaaatctttttaactcggtagtaacaagagacaatgtctaagtagtgaattctcaaatgtttgtgtaagtttctgcctatggaagaggctttcatttttatgattttcact

SEQ ID NO: 14617 - DNA, 1190 bp, Arabidopsis thaliana
  Clone ID: LIB23-069-F11_FLI
atttgatctcaagctcataggaatttgatctccacattatatcttgatcatcaccacaagaaaaacatttcaacttcttttatcagcaatcacaaatcaaagagatgggaagagctccatgctgtgagaagatggggttgaagagaggaccatggacacctgaagaagatcaaatcttggtctcttttatcctcaaccatggacatagtaactggcgagccctccctaagcaagctggtcttttgagatgtggaaaaagctgtagacttaggtggatgaactatttaaagcctgatattaaacgtggcaatttcaccaaagaagaggaagatgctatcatcagcttacaccaaatacttggcaatagatggtcagcgattgcagcaaaactgcctggaagaaccgataacgagatcaagaacgtatggcacactcacttgaagaagagactcgaagattatcaaccagctaaacctaagaccagcaacaaaaagaagggtactaaaccaaaatctgaatccgtaataacgagctcgaacagtactagaagcgaatcggagctagcagattcatcaaacccttctggagaaagcttattttcgacatcgccttcgacaagtgaggtttcttcgatgacactcataagccacgacggctatagcaacgagattaatatggataacaaaccgggagatatcagtactatcgatcaagaatgtgtttctttcgaaacttttggtgcggatatcgatgaaagcttctggaaagagacactgtatagccaagatgaacacaactacgtatcgaatgacctagaagtggctggtttagttgagatacaacaagagtttcaaaacttgggctccgctaataatgagatgatttttgacagtgagatggacttctggttcgatgtattggctagaaccggcggggaacaagatctcttagccgggctctagttaacatgtttgaggagtaaagtgaaatggtgcaaattagttaaggctaagaaattcaaaagcttttgtttaccgagaaaaaaacacactctaactcttgatgtgatgtagttagtgtattaattagaggctgcgttttcaaaaaattgaattcatttgtttctccaaaattgagtagtttagcttgtacgagtaattaataatcaatgacaagtaatcaaagagtca

SEQ ID NO: 14618 - DNA, 677 bp, Arabidopsis thaliana
  Clone ID: LIB24-001-B1_FLI
ggaaaagcttcaaacgatgtttacttgctggagaagatctggaaaattttagcggagattgaagatcttcatatgttgatggatccggaagattttttgaaattgaagaaacagttacagatcaaatcgacgggtaaaaacgatgcgttttgtttcagatctaaaggattagtggagatgatgaagatgtcgaaagatctgagacagaaagtaccggcggtcttggcggttgaggtagatccaaccggaggaccaagattacaagaggcggcgatgaagctttacgcgaggaagacagagtgcgataagattcatttgcttcaggggatgcaagcggtggaagcggcggcgaagagtttcttctttgggtataggcagttagtggcggctatgatgggaagtgcggagatgaacgcgacggcgagtcaagagtcgtgtgactcactgagtcagatatttatggagccgacgtatttcccgagccttgacgcggcaaagacgtttctgggagagttttggagtcatttgggatgattaaattttaatttctgctggtataattatttaatataaatttaaattggtggtttggtttaatttagtttgtaagatagtgaaatttttggaacatttgacgatccatatttgaatacaaattcatttttatatgatttatg

SEQ ID NO: 14619 - DNA, 1688 bp, Arabidopsis thaliana
  Clone ID: LIB24-001-F8_FLI
ccatctgagcatctctcagaaacctcaatgaacgtggaaaaagaactagaaatgcctgccgttgaaattttgccagacaatgacaaaaactctgatgtgttggcagttggagtttctggagacagtgacaatgtggtatctgtcttgcccgcttcccaaacttcctctgatcgtgatgaaggaatgattacagttgatgctgaacctacggaagacatgaaacttgatgttccagattctaaattggttactgatactactgttgactctactaataacaaggatgcccatgttgaggctaatactgaaaggcaagataattctagtgcacttgtgctaaatgatgcaaataatgaaagtgcaccagtgaaacgtgtacctggtccttatgttgcatcttccaatataaagtctgaagcgcggggtagtggagatttgaacaatggagtacataaaatagttcggaccccacctgtctttgatgggaccatgcgcgcaaagcgctctttcctcttggatgatgcgtctgatggtaatgaatctggaacggaagaggatcaatctgcttttatgaaagaattggatagtttttttagagagcgaaacatggatttcaaacctccaaaattttacggggagggactgaactgcctcaagttgtggagagctgtaactagattgggcggatatgacaaggttactggaagcaaattatggcggcaagtgggagagtctttcaggcccccaaagacatgtacaacagtatcatggactttccgaggtttctacgaaaaggctcttcttgaatatgagcggcataaagttagtgaaggtgaacttcagataccccttccgttggaactagaaccgatgaatattgataatcaggcgtctggatcagggagagcaaggagagatgcagcatcacgtgctatgcaaggttggcattcacagcgtcttaatggtaacggtgaagttagtgaccctgcaatcaaggataagaacttagttcttcatcaaaagcgcgaaaaacagattggaaccacccctggtttgctcaaacgtaagagggctgctgaacatggtgcaaaaaatgccatccatgtatctaaatctatgttggatgtgactgttgttgatgttggaccaccagctgactgggtgaagattaacgtacagagaacgcaagattgctttgaggtgtatgcattagtcccaggattagtccgtgaagaggtccgagtccaatcagatccggctgggcggttagtaataagtggcgaacccgagaaccctatgaatccttggggagctactcctttcaaaaaggtggtaagtttaccaacgagaatcgatccgcatcacacatcggctgtggtaaccctaaacgggcagttatttgttcgtgtgcctctggagcaattggagtagaaacatttacagtttaacaaagcctttgaagatctgaaagagagaagattgttagaagtagttgttgagagtattttgtttgtatattatgagagattaagcacaacatgagaagagcctttaggaatccttaattaggccatctagtttttattgtctctcctctctttgattagattcttcttctaagtgtcatcactattgatttgttgtagcaccaaacttctttaaacctttctattaagaacacacaaatc

SEQ ID NO: 14620 - DNA, 1420 bp, Arabidopsis thaliana
  Clone ID: LIB24-003-D5_FLI
ccctttctccaacacctaccaaaagcctctctctctctctagttcttgatttttcaagatttcaagaaaacatggctgaccaaagtggtgggttggttatgatgagagagtacagaaaaggcaactggacgttgaatgagacgatggttctcattgaggccaagaggatggatgatgagaggaggatgcggcggtccatcggccttccaccgccggagcagcaacaagatatccggagtaataaaccggcggagctacggtggaagtggatagaagattactgttggagaaaaggttgtatgagaagtcagaatcagtgcaatgacaaatgggacaatctcatgagagactacaaaaaagttagagagtacgagagacgaagggtagaatcgtctattaccgccggtgagtcgtcttcatcttcagctccagctggagaaacggcgtcgtactggaagatggagaagagtgagaggaaagagagaagcttaccaagtaatatgttacctcaaacataccaagctttgtttgaagttgttgagagtaaaacgcttccttcttctaccgccgtaaccgctgtaaccgctgcagttgcggctgctgctgctgctattagtagtggaaacggttcaggcggtggacaaatccaaaaagtgatacaacaaggtttaggatttgttgttcctaaagtacatcaaatcattcagcagcaacctgttttgttaccacttcagccaccgccgccaccaccaccgtctcagccgttaccacgaccactactactgccaccgcctccaccgccttcttttcatgctcagccaatactgcccacagatagtagcacagattctgatacaagtgagtattcagacacatctccggcgaagagaaggagaacaatgccgacaaccacaaccgccggtcccagcggcggcggtgtagatgtggaggaggttggacgtagtaagagagatgaagagacgacagtagcggctgcgttatcaaggagtgtgtcagtgatcgcaaacgcgattagggagagtgaggagagacaagatcggagacataaagaagtgatgaacgtacaagagaggagactcaagatcgaagaatctaatgttgagatgaatagagaaggcatgaatggattagtggaagccattaataagctagctagctccattttcgctctggcttcttcttctcgccataataattagcatcaaggaggtccagtaccatagtaatttaaatgattattatgtagttaatttgattagggaagtgattaaattgttgagcgtgatgatcggagtacataaattgatattgaagtcttaattaatcttgttttcatcactctcaatgttttcttaagtaaattgttgattccatgcaatataaattgaaatgtgatcat

SEQ ID NO: 14621 - DNA, 578 bp, Arabidopsis thaliana
  Clone ID: LIB24-005-D2_FLI
ctttctctcatcttcaaattaaaatcaaacagtttcttaataacattttacttcatggctcgtaccaagcagacggctaggaaatcaaccggaggaaaggctccaaggaagcagctggcgacaaaagcggcgaggaaatctgctccggccaccggaggagtgaagaagccacacagattcagacccggaactgttgctttaagagaaatcaggaagtaccagaagagcactgagcttcttatccgtaaactccctttccagaggcttgtcagagagatcgctcaggacttcaaaaccgatcttcgtttccagagcagtgccgtcgccgctcttcaggaagctgctgaagcttacctcgtcggactcttcgaagacaccaatctctgcgccattcacgccaagagggtcacgatcatgcccaaggacatccagctcgcgagaagaatcagaggagaacgagcttagatctaagtattctggttactcttgtgttttgattagaaccataagattgtaaaatttcaagttaaatccaagggttataatattaattccaagcaattatcttttgttctatc

SEQ ID NO: 14622 - DNA, 1175 bp, Arabidopsis thaliana
  Clone ID: LIB24-005-G12_FLI
cagctttttacttcaaagaagctctcaataatctccttcacaacgtctcccaaaccctaaacccttattccctcatcttcaagatcgctgcttacaaatccttctcagagatctctcccgttcttcagttcgccaactttacctccaaccaagccctcttagagtccttccatggcttccaccgtctccacatcatcgacttcgatatcggctacggtggccaatgggcttccctcatgcaagagcttgttctccgcgacaacgccgctcctctctccctcaagatcaccgttttcgcttctccggcgaaccacgaccagctcgaacttggcttcactcaagacaacctcaagcacttcgcctctgagatcaacatctcccttgacatccaagttttgagcttagacctcctcggctccatctcgtggcctaactcgtcggagaaagaagctgtcgccgttaacatctccgccgcgtccttctcgcacctccctttggtcctccgtttcgtgaagcatctatctccgacgatcatcgtctgctccgacagaggatgcgagaggacggatctgcccttctctcaacagctcgcccactcgctgcactcacacaccgctctcttcgaatccctcgacgccgtcaacgccaacctcgacgcaatgcagaagatcgagaggtttcttatacagccggagatagagaagctggtgttggatcgtagccgtccgatagaaaggccgatgatgacgtggcaagcgatgtttctacagatgggtttctcaccggtgacgcacagtaacttcacggagtctcaagccgagtgtttagtccaacggacgccagtgagaggctttcacgtcgagaagaaacataactcacttctcctatgttggcaaaggacagaactcgtcggagtttcagcatggagatgtcgctcctcctgatttccaccggagtttcaattattaaaaaaatattttccttaattcaatttatcttaaatgacaaatttttagtttctgattttattttgctcagtgcgatggatttttaaatttaagtttcacacaaatatataaatttttgtgagaagttaattaattgtctgattatcaaacacttattgtataacacattcaatatatattaattgtggggattatttttgatcgact

SEQ ID NO: 14623 - DNA, 1221 bp, Arabidopsis thaliana
  Clone ID: LIB24-006-A2_FLI
aaattctctctttgattcctatcttcttctctttattttcactttgtgctttctctgtctctcctattatgagtctaaaagtctactagctgttcaatagttttgtctttctgtgtttcttcttcttcaaaaccgaaagaaattcaaaaagagtctttcgctgcttgttagtggggtgaggaacaaatgggaagaacaccttgttgtgacaagattggtttgaagaaaggtccttggacgcctgaagaagatgaggttcttgttgcgcatatcaagaaaaatggacatggaagctggagaacacttcctaaacttgctggtttacttcgctgtgggaagagttgcaggctgagatggacaaactatctgagaccagacataaagagaggtcctttcactgctgatgaagagaaacttgttatccagcttcatgccattctcggcaacaggtgggctgctattgcagcacagcttccaggaagaacagacaacgagatcaagaacttatggaacactcatttgaagaaacgtcttttatctatgggtcttgatcccagaactcatgagccattaccttcatatgggttagctaaacaagctccatcttcaccaacaactcgccacatggctcaatgggaaagtgctagggttgaagctgaggcaaggctttctagagaatcaatgctctttagcccttctttttactctggtgtagtaaaaactgaatgtgatcacttcttacgcatttggaattccgagattggtgaagctttcaggaatctcgctccattagatgaatcaactattactagtcaaagcccttgctcgagggcaacatcgacctcatctgcacttctgaagagctcaacaaattcttggggagggaaagaggttactgtggcgattcatggctcagattattctccatattcaaatgatcttgaagatgattcaacagactctgctcttcaacttctgcttgatttccctataagcgatgatgatatgagcttcttggaagagaacattgacagctactcacaggctcctcctattggtcttgtttccatggtttccaaattctagtcttatgagagcctaatatctaagaaaaagattcaaactttgcttccttttggtttttagtgatgataagtagggatatagtatctatgtaaatcagcattagttagttgaagtacttaatcaaccctttctttt

SEQ ID NO: 14624 - DNA, 1977 bp, Arabidopsis thaliana
  Clone ID: LIB24-006-A9_FLI
tctgaagatgatgaagatacatggtcaggaggagatcctactgtgttgagaggtactgatttgtctgccacagattcttatcctttaaagaaacagaagctggggagcgaagttgctggacgaaaaaagactttgtttaggagtcaaagtgctcaaagtcgttcatttagagtccctcagagtgaaaaagaggatgagtcacttgagggagttaatataaaccgattaaagaagagcgttgcttcatttcaagaagataagtatccacctggaaagaagttttgctcagatgcatctcctcgtggaactagcatgagaaagttttccccaccttttgtaccaaatgcctggagacgactatctatgcctgtggagctaaagaaagctcggttggatttctctgaggaaaaagatgatgaagaaacagggaaatgggaatctgaaatgactcatgaacgtgagctgcgagatgatgattatgtttctggtgatgatggggaaaataatgaggtcttactgagatcaaatccttcatctagtggttacgatgattataatgatgatgacgaagaaagtagtgaagaggaaggagataataacaaaagagctcatgtgttggaccaaaccgattatacaggtgctgagttctaccagtcagagtcagacagtccaacatctattgaaatcttacccagcgagcgagcaatgtattactccgaagctgggaatatgatttacgggcaaacctcttgcaaggaggatgaaaggtttgattctgaagtaggacaaggaagcttatttgtagaggttgataccattcctattccaggacctccaggatcatttttaccaagtcctagagatatgggttttgatgaaaatcttgggaactcgtcggttattacaagccaggttcaatcttccatggatcagcttgacagaaactcatctgaatcacctgtttccgctgtttcaaactttgcagctggtagattgaattttcctgctgagttatcttctttccgagaaaatttctccccggatattgccatgtcctactcaacaaccccgatgagcttttgtgttccatctcatcatgggacaatcactgaggctgagccaattaccattgacaagacaatatcaccttccagatttagaaacaatgatcaagagtcttgttgttgccaaagaaaagagagaatctccgagggcattactttgaatcatcaaggatctcacttgctgcagcgaagagcagcttcttcgtcaaacaccatgaacttaactaattcacccacacgtttggatccaaatcatccatttgagcagtcaccatacaagacccaacaagctttggatcttcagatgagtaagttctccagcaggaagagtctcaacgccgttgtgcctccaagtccttctaacccggttttaaggttaatgggaaaagacttgatggtcatgaaccaaggagaagcagatgaagaagcatcccggtcaagcttaacaccaaatcctcagtttgttgatcctccttgtggtggaactggcttatactttaacacaggtctctacttaagaaacagtttcgattcaacacatcaaccacaagttcaagcacaacaacaatcacaagctgcagcattcagaaacaattttgatcatgtaagatacttttctccgagctagtcatcaccgcaaagtaaagtttcaaccttgatgcagtgtaagaagcaaccaagaagtgggttctcttcgaaaaccgatcatcgaacatgggtgcattggtgtttttaaggtagattccaaatgttctacaacattttctatgcttcatctctttctgcagagactgtgtagtagtttactgtttaaaaaaaaaaaagcaaacacttgaaaataacactctgtagaaggataagtaacttcagacttttaatgccaactaaagttataaacttatagtttatcttt

SEQ ID NO: 14625 - DNA, 2122 bp, Arabidopsis thaliana
  Clone ID: LIB24-006-C1_FLI
acaaagtctcatttctcgttaatttccattttcgttatctctctctctcgccgatcaaaccctaggtgtatcaattcgttcagattcccggcggttggtctcactgtcatgtaggtttgattcatcttctcttctggatcttgagtgacgaagagagaagagatctgagtttttctgagagagagatttttctccctcgttgacccgatcagttttttttcgtcgctggggattttcaaattttttttgagggatcggttttgatttgttacgtagatggcggattcttcacccgattcgtgtttcaaaggaggcaaatttagtgctccagggtttcgatttcatccaactgatgaagagcttgtgatgtattatttgaagaggaagatttgtaggaagaggcttagagttaatgttatcggtgttgttgatgtttacaaaatggatcctgaggaattgcctggtcaatcaatgttgaagacgggagatagacagtggttctatttcactccaaggagtaggaagtatccaaacgcagctaggtctaatagaggaactgaaaatgggtattggaaggctacagggaaggatcgagtcattgagtataattctagatcggtgggacttaaaaagactcttgttttctatagaggccgggctcctagtggtgagcggactgattgggtgatgcatgagtatacgatggatgaagatgaactagggagatgtaagaaccctcaggagtactatgctctttataagttgttcaagaaaagtggggctggtcctaagaatggtgaacagtatggtgctccgtttcaagaagaggaatgggttgatgatgataatgaagatgtgaatgctattgctgtagctgtgccagagcaacctgtggttcgttatgaggatgctcgtcgtgtggatgagaggagactttttaatcctgttattcttcagttagaggatatcgatgagcttctcaatggaatccctaatgcacctggtgttcctcaaagatgtattcctcaggtgaatagtgaagaagagctgcagagtacgttggtgaataattctgctagagagttcttgccaaacggtcagcaatacaacaggccctcaagttttgactcattagagaccgctgaggtcacctcagctcctctggtgtttgagaaggaagatttcattgaaatggatgatcttcttctgatccctgaattcggagcttcttcaactgagaaagccgcacagttctcgaaccatggtgaattcgacgattttaatgagtttgaccaattgttccatgacgtttccatgtctttggatatggaacctattgatcagggaacttctgcaaatctgtcttctctgagtgattctgctaactacacatcagaccaaaaacagcaactcctttatcaacagttccaggaccagactcccgagaaccagctgaacaacatcatggatcctagtacaactctcaatcaaatcactagcgatatttggttcgaggatgatcaggccattctatttgatcaacaacaatccttttctggagcatttgcttcaccctcatcaggtgtgatgcctgattccaccaatcctactatgagtgtgaatgcccaaggccatgaaatccaaaatggtggtggaacaacaagccagttctcatcggctttgtgggcattaatggactcaataccttcaacgccagcctctgcgtgtgagggtccccttaaccgaacctttgtacgtatgtctagcttcagccgtatgaggttcaatggaaaggctaatggaacgccagtgagtactaccatagcaaagaagggtattagaaacagaggttttcttctattatcaatcgtgggtgctttgtgtgccatcttctgggtgttggtagccacagttcgagtctcaggtagaagtcttctcttgaaagactagtggtggttctcttgaactcttaactactggtaagttagaagaagaaaccatgatccacattagtgttcatgggattattgacctatctataatatatgaaactttgaatatgtacagagtttgaaagagtaaagtacaataattcgtgataaaggagtttcttttccttctc

SEQ ID NO: 14626 - DNA, 1769 bp, Arabidopsis thaliana
  Clone ID: LIB24-008-H8_FLI
gaaaaattaaatatccatccaactgtgtgaattagatattttctcttatctcttctctttgttcgatcaaaaattcaattttcccgagatttttgtttctctcgatcgattcaacacctaaagattgaagcttttgctcgtgggttatgtaaagtttccacctttcgtcttctttctgatctgtgagcaaaaatgggacaacagcaatcaaaaggggaattgctgtatcagcaagttagttatggtaactctgaaggaattcgagctcttcatcgagatggtggagaccttgagtggatggatagagaaggaaaaactccgttgatcttggcttgtatgaactccgagctatttgatgttgctaagactttgattgagttgggttctaatgttaatgcttatcgtcctggtcgtcatgctgggactcctctgcaccatgctgcaaaaagaggtcttgagaacactgttaagttacttctttctcacggtgcgaatccacttgttcttaatgatgattgtcagacaccacttgaggtcgctagagtcaaagggtttagcaatgttgtacgtgcaattgagaaacacatctgcttgttctcgggttggatgcgtgaattttacggccctacctttctcgacttatttgctccgcagcttctttcaagaagagtatgggtagtcattgtacctactggttcaagaaaccctacaaagcctttcaagttggagctggttgtgtatgctagtctgcaagatgcacagccacgcacagtgatgcctttgtggaaagcaaacttggaagaaccaaaagcgaagcagtccgatacttcagtgatgatcgttgataactccacaaaaacacgtcttaaattcgcaccttcgactgaaggtgacagccaacagctaaagtggttttgtgatgcatgtaaagggattccacagccgatgcatccaccggtcttcctccaagcaccaccatctgctccaccaccaccatcagaagatggactagccatgggaatgaacgcctcacttcacactactatgagtgacccatcaaatctcaatcaccattccatcggtcaagcaagttcctcatccggtccaagctcatcaactgcacctccctcaggaaaagcaagtgcctttggattcaatagccatggaattggcattgtgctagaatcttcaccatcagctcctccattgacagatgatgatatagctacagtagacgatggtccaattcattacccatcaatcgattcaacaccagtcgatctcccatctgctgcttctcttccagcttcaacagaaggtgaaaggaaagaagacgggaacactggaacgtgtgcgatatgtctcgatgctccatctgaagcagtctgtgtcccgtgtggacatgtcgcgggatgtatgtcttgcttgaaggagatcaaatccaagaattggggatgtcccgtctgtcgagccaagatcgatcaggttattaagctgtaccgtgtctgaaaacaggtatcaacaacaacatgggattatctatatccttcattgaactattgaaactatatctctctatttacacagctaaaatcaataccatgttttctttttatcaaaagctaaaacaatatgtttgtaatttggaacttgataaaaaacagttccagtattttgtatatatgtttttggacaaaaggaagaatgtatcaatgtaaagtgtggtaatatattctgtatacaatatgcttatttatatttgaattgat

SEQ ID NO: 14627 - DNA, 1738 bp, Arabidopsis thaliana
  Clone ID: LIB24-010-E5_FLI
attttcttcgatcagtgctagaaccagagcctacctagctcgcaccttaaggaggtgattcagtttacaagcaaaatggtgaagatttgctgcattggagctggatatgttggtggtccaaccatggctgtcattgctctaaagtgtccatctgttgaagtagctgttgttgatatctctgtgccaaggatcaatgcctggaacagtgatcagttaccgatctatgagcctggtcttgatgatgtcgttaagcagtgccgtggaaagaatctcttcttcagcaccgatgttgagaaacatgtgagagaggctgacattgtttttgtgtctgtcaacacccctactaagacccgtggtcttggagctggcaaagctgcggatttgacttactgggagagcgctgctcgtatgattgccgatgtttcggtttccgacaagattgttgttgagaaatcaactgttcctgtcaaaaccgcagaggcaattgagaagattcttacacacaacagcaaaggaatcaaattccagattctgtcaaaccctgagttccttgctgaaggaaccgctattgaagaccttttcatgcctgaccgtgtcctcatcggtggtcgtgaaacaactgaaggctttgcagccgtcaaagccttgaaagacatttatgcccaatgggtccctgaagagagaatcctcaccaccaatctatggtctgccgagctttccaagcttgcagctaatgccttcctagcccagagaatctcatcagtcaatgcaatgtccgctctctgtgaggcaactggcgccaatgtctcagaggtctcttatgctgtgggcaaagactctcgtattggtcccaagttcttgaactctagtgttgggttcggaggatcttgtttccagaaagatattctcaacttagtctacatctgcgaatgcaacggcttacccgaagttgctgagtactggaaacaagtcatcaagatcaacgactaccagaaaacccgatttgttaaccgcattgtctcttcaatgtttaacacagtctccaacaaaaagattgcggttctcggcttcgctttcaagaaagacactggagacactagagagactccagccattgatgtctgcaaaggtctgttaggtgacaaggctcgtctcagcatctacgacccacaagtcactgaagagcagatccaaagagacttaaccatgaacaaattcgactgggaccacccacttcatctccagcccatgagccccaccactgtgaagcaagtctcagtcgcttgggacgcatacactgcaaccaaagacgcccacggtatctgcattttaaccgagtgggacgagttcaagaaacttgatttccagcggatctttgagaatatgcagaaaccggcttttgtttttgacggtagaaacgtggtcgacgctgataaactcagggagattgggtttattgtttactccattggtaagccattggaccagtggctcaaggacatgcctgctcttgcctaaacaacaaccaaacctcttccttagcttttttctccattttttccgaattctcatgagtttttccatatatctttaactacagtatgtttgatcaataattgtttcttttgttcttcctattatgaattcctacagagattttaggtttggttcttgttggtaattatgtaccttgggttatcaaatattgtaagcttttcgaatattactttcataatat

SEQ ID NO: 14628 - DNA, 2056 bp, Arabidopsis thaliana
  Clone ID: LIB24-011-F8_FLI
aaatttactccataaagttgcctggggacccgaaacttggcgaaggcaaacctgagaatcaaaaccacgccattgtgtttactcgcggaaatgctatccaaactattgatatgaatcaggataattattttgaagaagccttaaagatgagaaatcttttggaggaatttgaccgggaccatggaattcgaccacctactattctggagttagggaacatgtctttactggaagtgtctcctccttggcatctttcatgtccaatcaagaaaccagctttgtaactctaggtcaacgagtattggcaaaacccttaaagatccgcatgcattatggtcatccagatgtctttgacagagtatttcatattacacgtggtggtatcagcaaggcctctcgggtcatcaatattagtgaagatatatttgctggtttcaacacaactctacgtcaagggaatgttactcatcatgagtatattcaggtgggcaaagggcgagatgttgggctcaatcaaatagctctgtttgaagggaaggttgctggtgggaatggtgaacaggttcttagtcgagatgtatacagacttggccagctccttgatttcttccgtatgatgtcattcttctttacaaccgttggcttctatctatgtacaatgttgacggtgcttactgtgtatattttcttatatgggagggcatatctggcactttctggagttggagctactattcgagaaagagctattcttctggacgatactgcacttagcgccgccttgaatgctcagtttctgtttcagattggtgtcttcactgctgtgccaatggttttgggatttattttggaacagggttttctccaggccatcgtcagtttcataacaatgcaatttcagctatgtactgtcttcttcacattttcccttggtacaagaacccattattttggacggacaattctccatggtggtgcaaggtaccaagccactggaagaggcttcgtcgtgaagcatatcaaattttctgaaaactaccgtctttattccagaagtcattttgtcaaagcaatggaagttattcttttattggttgtgtaccttgcgtatggcaatgatgaagctggtgcggtttcctacatcctgctgacagttagcagctggtttttggctgtttcttggctgtttgctccgtacctattcaaccctgccggatttgagtggcagaaagtcgtggaggacttcaaagaatggacaaattggctcttttacagaggtggaattggtgtgaaaggagctgaaagctgggaagcatggtgggaagaagaactgtctcacattcggaccttgagcgggaggataatggagactattttaagtctacgattctttatcttccagtatggtattgtctacaaactgaagctacaaggatcagatacatcatttgcggtgtacggttggtcatgggttgcatttgcaatgattatagttcttttcaaggtctttaccttcagccagaagatttctgtcaatttccagcttttactgaggtttatacaaggtctatccttattgatggctctagctggcataatcgtagcagttgtgctcacacccttgtcagtgacagacatatttgcatgcgtattggcttttataccgacaggatggggaattctttctattgcgtgtgcttggaagccagtcctaaagcgaatggggatgtggaaatcgattcgttccctagcaaggctatatgatgcgttaatgggaatgctcatatttcttcccgttgctctctgctcctggttcccttttgtgtcgaccttccagacacgtatgatgtttaaccaagccttcagccgcggtctcgagatctctcttattcttgcaggagacaatcccaattctggtctttaaacttttggaagctgttatgtttatgtttttcatacatttatttgtgtttagttttccgagtgtagcagtagtaaatgatgggagcctctctgtagctttaggcattttaagacttctgtaacatttgtcccc

SEQ ID NO: 14629 - DNA, 2585 bp, Arabidopsis thaliana
  Clone ID: LIB24-011-H7_FLI
gaaaacgatacctaagctcaattatcttctctgcaacaaactccaaaggatccgagagagagagctctggaacgatattaacatatatcatgaagaaaaagattgaagtattgatatgggaataactaaaacttctcctaatactacaattctcttgaagacttttcacaataattctatgtcccaagattatcatcatcatcatcatcataatcaacaccaaggaggtatcttcaacttctctaatggattcgaccgatcagattctcccaatttaacaactcagcagaagcaagagcatcaaagggtagagatggacgaggaatcttcagtcgccggaggtaggattccggtctacgaatcagccggtatgttatccgaaatgtttaatttccccggaagcagcggtggaggaagagatctcgacctcggccaatctttccggtcaaataggcagttgcttgaggagcaacatcagaatattccggctatgaatgctacggattcagccaccgccaccgcagccgccatgcagttattcttgatgaatccaccgccaccgcaacaaccaccgtctccgtcatccacaacttccccaaggagccaccacaattcttcaactcttcacatgttacttccaagtccatccaccaacacaactcaccatcagaactacactaatcatatgtctatgcatcagcttccacatcagcatcaccagcagatatcgacgtggcagtcttctcccgatcatcatcatcatcatcacaacagccaaacggagattgggaccgtccacgtggaaaacagcggaggacacggaggacaaggcttgtccttatctctctcatcgtctttagaggctgcagcaaaagcggaagagtatagaaacatttactacggagccaattcttctaacgcatcacctcatcatcaatacaatcaattcaagactcttcttgctaattcttctcaacatcaccatcaagtattaaaccaattccgatcatctccggctgcttcttcctcttccatggcagcggtcaatatcttaagaaactcgaggtacacaacggccgcgcaagagttgttggaagagttttgtagtgttggaagaggatttttgaagaagaacaaacttgggaacagctcaaaccctaatacttgcggtggtgatggtggtggcagctctccttcgtcggccggagcaaacaaggagcatcctcctttatcggcgtctgatcggattgagcatcaaagaaggaaagtgaaactactcaccatgcttgaagaggtggaccgacggtacaaccattactgcgagcaaatgcagatggttgtgaactctttcgacatagtaatgggccacggtgcggcattaccgtacaccgcattggctcaaaaagctatgtcaagacattttagatgccttaaagatgcagttgcggctcagcttaagcagagttgcgaacttcttggggacaaagatgcagcgggaatctcttcttccgggttaacaaaaggtgaaactccgcgtttgcgtttgctagagcaaagtttgcgtcagcaacgtgcgtttcatcaaatgggtatgatggaacaagaagcttggcggccacaacgcggtttgcctgaacgctccgtcaatatacttagagcttggctcttcgaacatttccttcacccgtatccaagtgatgcagataaacacctattggctcgacagactggtttatccagaaatcaggtcagtctacatatatacatatagccaacgatataatgaaatttaaaatctccatgaatcaaatacatatgcctctacttcaccaagttgtgttagctgagtatactcttaatcagacaatcaaatgaccacagtctggattacgaattcttaaccgcgtgttttaaagatttgttttaaacccatcattctatgtttataaataaactccacaatagtacacagttatatatataactacaatattaatttatcacccaaacccatttcataattttcataaacatatacatgcttgttataaacatcaaataataaatactagtagttactcaaaacgaatttgactaagccaaaattatttgacaccatgtacgagtacactaactagtagcctgagatgactctattgcatggtttttgtttcttatctttgtttggtttgtgatatgacagaggaacaccatgtgttttgccttccactcaccattagcttttcttgggattcgtctttaaattattatagcatatttatatatacaaaaacataggagagagagaaagagatcgacattaaagacgcaaaagggtccatttttcctcaagtacatcaaagtttgcagctttcaattgtcccaaagaaaccctcaatttcttgtatccctacattaaataaccaaatgacaaataaacaaaaagagccctcaattttatttcgatattataatgattcaactagtgaaaattttgtctcttttattcaggtatcaaattggttcataaatgctagggttcgtttatggaaaccaatggtggaagaaatgtaccaacaagaatc

SEQ ID NO: 14630 - DNA, 3017 bp, Arabidopsis thaliana
  Clone ID: LIB24-013-E4_FLI
tgtttttttaaatttcttctttgtttcatgtcggactcaacagctatccatcgcctcactgtctctcaccggaatctagggttgtccaggaagaactcttctgtgtttgtttgatttgagctaatcagaaaggtgaaattgagaaaatggagggtgaagttgctactaacggagtgattctcaagcataatggtgtaaaggatatttctttagaaacttgttggccagagaagaagaaaccggttgaggcaacgagtcttagcagtggttcatcagacatagaagaagagattagtgtggaatgtcctaagcgagtggctaatcaaagacggaaacggtctaaagctgatgagattaaaacgaaatcttcaagaaagaggaaatgtgatgatgagaacaagtgtgaagagaatgagaagaagcagaggagctctgttaaaaagagagcaactacatggaaagaagaagaagttgttgttgatgatgaaaagaaatgcgaacaacaactccaactagttccttccagcaaggcaacatctcgaagcaggagcaagaaatcagtcagtgtggatacttggttggttaacaacgagattgatgttagcgctttgagttcgcgttctgagtctgaactttcggattcttatctgaaaaccgagtactttaatgactgcagaagcatgacaaggagtttaaaggcaaatttgggagagcttgcaatttgccatcaatgctctaaaggggaaagaagatatcttttcatttgcaccttttgtgaagtgaggttgtattgttttccatgcataaagaaatggtatccccatttgtccacggatgatatccttgaaaaatgtcccttttgccgaggaacttgcaactgctgcacatgtttgcactctagtggtttaatcgagacatctaagagaaagctcgataaatacgaaagattttatcatcttcgcttcttgattgtggcgatgcttcctttcctgaaaaagttatgcaaagcacaagatcaagaaatcgaaaccgaggctaaggttcaagattcaatggcttctcaagttgatatatccgagagtctatgctcaaatgaagagcgtgtcttctgtaaccactgtgcaacatcaattgttgacttgcatcgaagctgtccaaagtgttcatatgaattgtgtctgaactgttgccaagagatccgtggaggttggctttctgaccgcccggaatgtcagctacaattcgagtacagagggacccggtatatacatggcgaagctgcagaaccgagctcttcttctgtttccgaggatgaaactaaaactccatccatcaagtggaatgctgatgaaaatggaagcatacggtgtgcgccaaaagagctaggaggttgcggggactctgtgctggagcttaagcgaatcttaccagtgacttggatgtcagatttggagcaaaaggcagaaacattcttagcctcttatagtatcaaaccgccaatgtcatattgtagatgttcttctgatatgagtagtatgaagaggaaggcagcttcgagggacggatctagtgacaattacctttattctcctgattctttggatgtcctgaagcaagaagaacttctgcatttccaagagcattggtccaaaggtgaaccagtgattgttcgaaatgctcttaacaacacagctggtttaagctgggagccaatggtgatgtggcgggctttatgtgagaatgttgattcagcaattagctctaatatgtctgatgtcaaagctatcgattgtttagctaattgtgaggtgaagataaatactctatgtttctttgaaggatatagcaaaggaagaacatatgaaaacttctggcctgagatgctgaagctgaaggattggcctccttcagacaagtttgaaaaccttttacctcgtcactgcgatgagttcatttccgcattaccatttcaagaatacagcgatcctagatcaggaattctcaacattgctacaaaacttcctgaaggacttcttaaaccagatcttggtccaaaaacttatgttgcatatggacttcagatgagctcggtagaggagattcagtcactaagcttcactgtgatatgtcagatgctgttaatattctgatgcatactgctgaagtaacactaagtgaggagcaaaggtctgcaattgcagatttgaaacagaaacataagcaacagaatgagaaagagcttcaggagcaaaatggtttagaggaagaagaggttgtgagtgatgagattgtggtttatgatgaaacaagtggtgcactttgggacatctttaaaagagaagatgttcctaagcttgaagagtatctaaggaagcattgcatagaattcagacatacttattgctctcgtgttacaaaggtgtatcatccaatacatgatcagtcatatttcttaaccgtggagcataaaagaaaactcaaggcagaatttgggattgagccatggacatttgtgcaaaagctaggagaagcagtgtttattccagcaggttgtcctcatcaagttcggaatctcaagtcgtgcacaaaggtagctgttgattttgtttcccctgaaaacatcgatgagtgtctccgtttgactgatgagtttcgacaactccctaagaaccataaagccagagaagacaaacttgagataaaaaagatggtgatctatgcagttgaacaagctctgaaagaagtggagacattattgctagatcgcagctaaaagctctatagctttgttgttgtaggattaacagcagattttgtagaattgttaaagccatggctattgtagttggcttttgctgtgatatatgtatgtaaaagagacaagtgtctcttgaaaagaatgatttccttttttttcaaatgggattttgatgtaacttttccttttccggtctgttttggcatatgaatgaatatttgatgtaagcttcttttgtatagttttgtatctttacatc

SEQ ID NO: 14631 - DNA, 1849 bp, Arabidopsis thaliana
  Clone ID: LIB24-013-H3_FLI
gatttttttttttcatttcttcctccagagagagagagagaagccacaacaagaagaagaagaagaagaagaagaagaagaagttctggaatagtcatcatcttctctgtttctaggctttgtttatttgtctctaaagtttctggattcaacttctgaagaagatagtagtagtccacaagaaggatcttctttaccagaaagttgatttggtcagagccaaggaagatgggttacatgtgtgacttctgtggtgaacaaagatctatggtgtactgtcgatccgatgcagcttgtttgtgtctctcctgtgaccggagtgttcattccgctaatgcattgtccaaacgacattctcggacacttgtctgcgagagatgcaatgctcagcctgctactgtcaggtgtgttgaagaaagggtttcactctgtcaaaactgtgactggtctggccacaacaacagcaacaacaacaattcttcgtcttcttctacttcgccgcagcagcataagaggcaaaccataagttgctattcgggttgcccttccagctcagaactcgcttccatttggtctttctgtttggacttagctggacaatctatttgtgaacaagaactgggtatgatgaatatagacgatgatggtcctaccgacaagaaaacttgtaatgaggataagaaagatgtcttggttggatcctcttcaattcctgaaaccagttctgtaccacaaggaaaatcatcttctgctaaggatgttggaatgtgtgaagatgacttctacgggaaccttggtatggatgaagttgacatggcacttgagaactatgaagaactctttggtaccgcctttaacccctctgaagagctattcgggcatggtggaatcgatagccttttccataagcaccaaacagctccagagggagggaattcggtgcagccagcaggcagtaatgattcgttcatgagttcgaaaactgagccaataatttgcttcgcatcgaagccagcacattcgaacatatccttctctggagtcactggagaaagtagtgctggagatttccaagaatgtggtgcatcatcttccatacagctctcgggggagccaccatggtatcctccaacattacaggataacaatgcctgctcacattcagtaacccgtaataacgcagttatgcgttacaaggagaagaagaaggctcgcaagtttgataagagagtgaggtatgcttcccgcaaagcaagagctgatgtgagacggcgtgtaaaggggcgatttgtcaaagctggtgaagcttatgattacgaccctctcaccccaaccagaagttattgaagactccttttgaaaggtacatagatatatatacatggcgaagaatcgaacaagaaaggttttgacttatgggcagtttcaagtgagcaacttggaaaattgtgggttagtaacaaaacaagactactgtagcatgaacagatttcaagactgactcttgtaagcaatcattcattcttgggattcaatcgttttttttggcctcagaagcttcattcttgaccagagggattattctctgactttccttgtccaaactccggtttcttcttcttcttcttcaggcgtctcacactgatcagggttccatgaattttgttcttctcttggtagttaaaaaggcagggaaggagatttagagtaatttaaacaatatgtgattgttgtatatgcctttgtatttgtttgtatactcataaatgtttttctgttttgtactcggcattcttgtaaattaaagacattatccacattcttctatagacaaagaaagttatgtggt

SEQ ID NO: 14632 - DNA, 941 bp, Arabidopsis thaliana
  Clone ID: LIB24-014-G10_FLI
caagatgtctggtttcctcttttgtttcgtccaaatctctactttttagggatcttgtccttctcttttctgctgattaaaaccctcgaatttgctccaattcgacgcgaaaaaggcattgagatggtgaatggagaatcatcaactagtacgtcttactctgatagtaacaatgacacaaatgatcaaggaggagactttgaatgtaacatttgtttcgaactagctcaagatccgattgtcactctctgtggccatctcttttgctggccttgcttataccgttggcttcaccaccattcacattctcaagaatgtccggtttgtaaagccgtggttcaagacgataagcttgttcctctttacggtagaggcaagaaccagactgacccgagatcaaaacgttatccgggtttacggattcctaaccgaccaacaggtcaaagacctgagactgctgctcctcctcctcagcctgaagctgcgagtaattttttcaactacggtattggtttgatgggtggaattatgccgatgatggcgactacgaggtttgggaatttcagtatggggtttggtggtttgttaccttctttgtttaactttcagtttcatggatttctgatgctacgctttatggttcaacaccgggttatccttacggtggttatcataacggtttccgtggagttcctcctcgtggacaagagcgtcctatggctcgtggaggaaaccaaagtgatgcatttctgaagaatatcctcttttttgttggaatctgtgtggtgatatttctcatctggtgaaaacgaatcacatttggtgtatttccaggtatgatcaaacttacttacttggtgcaagttgtgtatgtaaatatggtaatagctgagtgtacttgtctgctatttcgacgttgttattgtatttttgttttgaag

SEQ ID NO: 14633 - DNA, 539 bp, Arabidopsis thaliana
  Clone ID: LIB24-015-H9_FLI
cggtgatccctctagctaagtaccgtaaggcgatatgcgggtctcagctctcagttggtatgagatttggaatgatgtttgaaactgaagattccgggaaacgaaggtacatgggaactattgttggaatcagcgatttggatccgttgagatggcctggttctaagtggcgtaaccttcaggtagaatgggatgagcctggatgtaatgatccatgggaagagtttgtgggatgcgtaaggtgcataaggatattgtcgccaactgaggtccagcagatgagtgaagaagggatgaagcttttgaacagcgcaggcattaacgatcttaagacttctgtttcataaatgtaacaatataaaaatgatctcatgctgatttgtaagaaaaaaaagagagtaagaaatgttcttttctccaactggtagaggagaaaccatcttgttgtaagcatttgatgtgttgttccgatttgagacctgaaactatattcatattatgtagtagagtgatgaatgaatcagtagttgagacagtct

SEQ ID NO: 14634 - DNA, 466 bp, Arabidopsis thaliana
  Clone ID: LIB24-024-D1_FLI
acagacgatgagggagatatgatgcttgtcggtgatgacccatggcctgagttctgcaacatggtgaagagaatattcatatggtcgaaagaggaagtgaagaaaatgacgcctgggaaccaactccggatgctgttaagggaagttgaaacaacactaacaacaacttccaaaacagataatcattccaactaatttttattctattctctatcagtcttcgtctccttcttatttgctttgtctttcggaattatcttgtttgtgtctgtgttttgttgcgcatggcttaaacaagaaactacatcccctgaggcaaaaaaaatggctcgtttttttggagcctcttatggagaaagggggtttatggggagagggttttctacttttaaaataggcttttggaagtttctttttcttctaggaacttgtgtgtaagagaaacaaatatgtaacgaacagaaag

SEQ ID NO: 14635 - DNA, 836 bp, Arabidopsis thaliana
  Clone ID: LIB24-029-B9_FLI
ccgaatctaaagaaaaagtaagtaagaagaccaacggtggcacagagcctacaacccgagtttcacagttagatagtagcactcagaagaaacaaccatggagcaaggaagagattgatatgctgagaaaaggaatgataaaatatccaaaggggacatcgcggagatgggaagttatttcagagtacattggtacaggaagatctgtagaggaaattctgaaagcaactaaaacagttctcctgcaaaaaccagattcagctaaagcattcgattctttcctcgagaagaggaaaccctctgcttcaatcacatcccctctctccacaagagaggagctcggagaatctctacccacaatgacgaccacaacaaatgcaaagccctctaaagagactgttgtggggaaaagctcgagcagtcaaagctcagacaacaatggtgaagtaggtggaagttcagacgcagatagttggtcgactgtgcaagaaagagctttggttcaagctttaaagacattcccgaaagagacaagccaaagatgggagagagtagctgcagctgtccctggtaaaacgatgaaccaatgcaagaagaagtttgcagagcttaaggaaatcattagaaacaagaaaaccggagtatgaggtaaaatcatttcggagtcccatgagaattttgggttttaatcctcttggggcaccgttactttgcgagaagcaagacctaaaacttttttattatttgtaatgattcatttccctttgatgtctctatatattgagagtgctggagccactattatggagtatgttgttttttacataatcttatgt

SEQ ID NO: 14636 - DNA, 972 bp, Arabidopsis thaliana
  Clone ID: LIB24-033-G5_FLI
gaaggtttgggtttgagtagaaactcagatgaacgttacttggagctaggtcaattagagaatgaaaacaatagttttgctaagcatctagaatctgcaaatacgatgatctcatttatatggtgggttattggattttattgggtatcttctggtggtcaagagttagcacaaggatccccacagctttattggttgtgtatagtctttcttggtttcgatgtgttctttgttgttttctgcgttgcattggcttgtgttatcggcattgctgtttgctgctgcttgccttgcatcattgcagttctatacgccgtagcagaacaggaaggagcttcgaaagaagacattgaccaacttactaaattcaaattccgaaaggttggtgatactatgaaacacactgttgatgaagaacaaggacaaggagattctggaggagtgatgactgaatgtggtacagattcacccgttgaacatgctcttcctcatgaggatgcagaatgctgcatttgtctttccgcttatgaagacgagacagagctaagagaacttccttgtggccaccatttccattgcggttgtgtggataaatggctttacataaatgctacttgtcccctctgcaaatacaacatcctcaagagtagcaactacgaagaaggcgaggaagtctagaagactagaacagtaagaagaggaaacttgcaaatatgcgaatatctgtatcatttagcagctgaggaacccatgagaaaaagggttcgagatttgatcaatttgttgtttacattgcttgttatatgtttacacattttagttgcttttttctttggagtctgtatgttctgttgttgtcgactcttgttaacatgttttggtacttacttgctcaacaagttaacaacatcttgtatctcctcatcttctctttttcaatcctgaattgagaatgcttctgcagtgaactat

SEQ ID NO: 14637 - DNA, 539 bp, Arabidopsis thaliana
  Clone ID: LIB24-034-E9_FLI
cctagagagaatgtattcccggaaagaccaggccaacctgaatgccaattctacatgaagacaggagattgcaaatttggaacagtctgcaaatttcatcatcctagagacaggcaaacccctcctcctgattgtgtcttaagctcggttggccttcctttacgcccgggagaaccactgtgcgtgttctattctcggtatgggatctgcaagtttggtccaagctgtaaatttgatcacccgatgcgagtcttcacttacaacaacaatactgcatctccttctccttcatcatctctgcatcaagagactgcaatcaccacagagctcaggaatctcctagtctcttcttctgtggaagcaaaacccacatcactccctgaaacaacctctgctaaagacaccattgttgatgcacagcactgaaaaccctgtgttttgtctatcttgaaacaatatgtaacatttgttttgctttatcttgtaagcatttatgtacagagatgatatctgatctaatctgattcgccttttgttgt

SEQ ID NO: 14638 - DNA, 2209 bp, Arabidopsis thaliana
  Clone ID: LIB24-043-F3_FLI
gtcccggagctagaaactgaaatcgtatttcaccaagagcatgacgacgggaagaattgcatcgtcttcttcgacggagaacaaggttctgagtcagctggtgccatacctgatgctcatgaggagtctcaaactgctgacttgaatggggagcaaacgcagttagaacctgaaaacggttcaacttctgaggataacgaaagatctcgtgaaattgaagaagtactagatggtgatgtctctaaagacttggatgctgttgatccactcgctggtgaggtgatagaggaggaggtggacttcgaagatgttgaatatcacgatgtggagaatatgatggataagcaagagacacatgatttgtactgtccaaactgcgattcttgcatcaccaaaaaggttatcctcaaaagaaggaaacggaagatccgtcgtcatgagctgggagattcaaagcggcctcatttgactgagcctctttttcattcggaagacaatttgccatctctagatggcggtgaaaactctgcaaatgagtcatttgtcttcaagtgcttgtcatgctttaccatatttattcccaaaggggtgagttcaaagccgattcctccccgtcaaggagttgaggggttaaagattcagccaaaccctcaagtggaagctacaggcgattccaattggttcagttcaatatttggcctcaacaaaaaggaatcagctattcagcaaggtggggcatcatctagtgtcttggaagctaatccgccaccacgtgagtccattgtcccagtagttaatccatcgcgtggtaacctaagtcctatgcgaaaggatacgacaggctcagccgttgttcagcctgatgcagccacttcgattcaagttgcaaaatcaaacgatacaagcgaaattgtaaacaatggagctattgttggagacgggcaaaagtttctggctcctatggtggaggagcaaacacagcaaaagattgacaatgatgattctagtacagcagacgggaatcacacgtcagacaaaggacgtctctccccaattcaaccatctcatggcatgagtatactaaacacagtgactaacggacccgacggattgaaagtagaaactacaattcatgaagaaggtgcccctcttctgtttgaaggaaaagacactcctgacacaagcacggcagattttggtctgaccaaagtaacaggtgtgatggacacaggtgacagaggagttattaccggtccagcaaatcctgaaattgatatttcagcagggaatttgctggaagaagggtctctaagggaaccgttaatgagacgagttgttgttcaaggacgtaaactggaaatcttgaaaagcattgtctacggaggtctactagaagccatcacaagccttggtgttatttcatctgccgctggttctggtgcttcaatgttgaatattctggtcttggggcttgcaaacttgcttggcgggcttattcttattattcataatctccaagaacttagagaggaggaacccataagaacaacaacagaagataaccagactaacggtagagaagaagaagaaggtcggtataagcgactccttggacgaagagaaaatttcacacttcacgcaacagtcgcaatcttatccttcataatcaccggaatactccctcctgtagtctactatttctcattcagtgaaaaacacaacaaagactacaaagttgcttcagttttcggggcatctctattctgcatcgtcttgctcgccatagccaaagctcatgtgaggtacccgagaggcagctacctgaagagcattctgtactacgggtcaattgctgtatcggtgtcggggatttcttatgtggttggtaactttctggaacagttgcttgagaagcatggatggtctgatggatcggaaacacctgtgggacagatgatgctttcatcacttatgggaagaaaagccggctttggatactcatcatcgtactgaaactgaatcttgcctggagaatgatccaaactgaaacttgctgcttttctcttttactctgcttttgtgagctctcgttccaaatctttgttgtcggcaaatctttgttgtgacttgtgagtgtagaagaaagtcgtttccacttgtagaataaactaaaataagcataacataataatgatggaagatctgtgcc

SEQ ID NO: 14639 - DNA, 338 bp, Arabidopsis thaliana
  Clone ID: LIB24-044-A9_FLI
ctaacaaacggcgtgagtgggtggcttatcttcaagctggagctggtgtagtagctgatagtgacccgcaagacgaacactgtgagtgccagaacaaagccgctggtcttgctcgagccatcgacttggctgaatctgcatttgtgaaaaaatgattgtgcccaagaacagaggctggctttctttgaactccgagttcatgtgtataaaacagttacaagcagaacaaagttttttctttttcttgattttgtgagaattgcaattagactccattaatgaagctctgaaaaatgttacaatagaaaccatggtcaataatattcagctattctccc

SEQ ID NO: 14640 - DNA, 1215 bp, Arabidopsis thaliana
  Clone ID: LIB24-045-F2_FLI
gctcacagatcattctagggctcctgacagaaaaaccaaataccttttcctctttccatttttgtagaatttcaaatctttctttcctcaatctttcacaatgatcttttcctgtgaagttcttgattttaaatcaccctttcttcactactagcttatctcttcttcaattttctctaccgacattcaattactctccctattcgaaaaaatcaagtcaaagcaagaaaaatggttagaggaaagatagagatgaagaaaatagaaaacgcaacgagtagacaagtgactttctcaaaaagaagaaatggtttgttgaagaaagcttatgagctctcagtactctgcgatgctcaactctctctcatcatcttctcccagagaggaaggctttatgaattctctagctctgatatgcagaagacgatcgaacgctaccgcaagtacacaaaagatcatgaaaccagcaatcacgactcacaaattcacttgcaggaagctattgggacaaggaattgcttcttgttctctagaagagcttcaagaaatcgatagtcaactccaaagaagtctgggaaaggtccgagaaagaaaggtacatatacttcatcactatctaattggtatatgatgatgatctaatgtaactatacaacacatattgacttgaataatctccatctcagtcatcaagttatagtcctcatttagatatgaacttgaacacagatctttgcaaccatttagcgtcatatctcaaccaatatactaacattgatcaagagtcaagtcacatgtgtgtttgtatattagtgttgttatcatggaaatgaaaaaaaaagttggacaaaatgttttataggctcaattgttcaaggagcagttggagaaactaaaagcaaaggtttgatacattatgttataatataagatatgtatatcatacatgcaattttttaactagcttttttatatgaaattggtgaaagagtgtcggttgtgtttcaggagaaacaattgttagaagagaacgtcaagttacatcaaaagaatgttattaatccatggagaggatcatcgactgatcagcagcaagagaaatacaaagttatagatttgaatttggaagttgaaactgacttattcatcggtttgccaaatagaaactgctagtaacattatataatatgtttatttatttatcatgaaatattc

SEQ ID NO: 14641 - DNA, 1101 bp, Arabidopsis thaliana
  Clone ID: LIB24-045-H6_FLI
ataaagcattatttggagaaaaagaatggtatttttttagtcctagggatagaaaatatccaaacgggtcaagacctaaccgggttgccggatcgggttattggaaagctacgggtacggataaaataatctcgacggaaggacaaagagttggtattaaaaaagctttggtgttttacatcggaaaagctcctaaaggtactaaaaccaattggatcatgcatgagtatcgtctcattgaaccttctcgtagaaacggaagcactaaggtaacaaataaaatctaaacattaataaatactatatcttatattttcttcttgtagtgttttgaatgacctataattaatattcttgttaattttctttagttggatgattgggttctatgtcgaatatacaagaagcaatcaagtgcacaaaaacaagtttacgataatggaatcgcgaatgctagagaattcagcaacaacggtacttcgtccacgacgtcgtcttcttctcactttgaagacgttcttgattcgtttcatcaagagatcgacaacagaaatttccagttttctaacccaaaccgcatctcgtcgctcagaccggacttaaccgaacagaaaaccgggttccacggtcttgcggatacttctaacttcgattgggctagttttgccggtaatgttgagcataataactcggtaccggaactcggaatgagtcatgttgttcctaatctcgagtacaactgtggctacctgaagacggaggaggaagtcgagagcagtcacgggtttaataactcgggcgagttagctcaaaagggttatggtgttgactcgtttgggtattcggggcaagttggtgggtttgggtttatgtgatgatgaaatgctgacgcaataaaaataagtcgttaatttttgtcccgtggcaaatcttatatgtatttgaatttcaattcttttgggttaagagggagactcatagatttagatgtagatttgtaatctttcatgcatagaaaatttgacgaatagatttcgtaactttattttgttgctgtttggttatctttgtattggtataaatttagtggattgaaattgc

SEQ ID NO: 14642 - DNA, 1362 bp, Arabidopsis thaliana
  Clone ID: LIB24-047-A12_FLI
ttttgctctcaatagattccattgattcaaaacaaaattttcattaagatttcacaacctccacacacttccaaacacaattaaagagaggaaaaagaatcaataaccctataaataaaaaatcagacaaacagaagtttcctcttcttcttccttaagctagtaccttttgttcttgaaattagggttaatttcttttttccaaataccatcaattctccagaccataaaaactcaaaaagatcagatctttcctctgaaaaagagatacccaacttatgtttttgtgtgtctgtatatagataaacattacatacccatatttgtgtatagacataaaaagtggaaattaaggtaacaaaaagaaatgggaagaggaagagtagagctgaagaggatagagaacaaaatcaacagacaagtaacgtttgcaaagcgtaggaacggtttgttgaagaaagcttatgaattgtctgttctctgtgatgctgaagttgctctcatcatcttctccaaccgtggaaagctctatgagttttgcagctcctcaaacatgctcaagacacttgatcggtaccagaaatgcagctatggatccattgaagtcaacaacaaacctgccaaagaacttgagaacagctacagagaatatctgaagcttaagggtagatatgagaaccttcaacgtcaacagagaaatcttcttggggaggatttaggacctttgaattcaaaggagttagagcagcttgagcgtcaactggacggctctctcaagcaagttcggtccatcaagacacagtacatgcttgaccagctctcggatcttcaaaataaagagcaaatgttgcttgaaaccaatagagctttggcaatgaagctggatgatatgattggtgtgagaagtcatcatatgggaggaggaggaggatgggaaggtggtgaacagaatgttacctacgcgcatcatcaagctcagtctcagggactataccagcctcttgaatgcaatccaactctgcaaatggggtatgataatccggtatgctcagagcaaataactgcgacaacccaagctcaggcgcagcagggaaacggttacatcccggggtggatgctctgagagtcatgtgctgtgttaaagctcaccaacaaaagatcttttatatatataaaagtatagacacaagactttggatttgtagacataagtggctatatataatggtcctgaggatcttcaagacatttgtatcttttgggaatccttgcttatattaagaattcaaatgtgtggaacttgttttaacactgaaccatgacactggtttattatcatgtaatgagaaacatttgggttac

SEQ ID NO: 14643 - DNA, 2590 bp, Arabidopsis thaliana
  Clone ID: LIB24-048-G10_FLI
cgactgcctataggtgtgctgttgttctccgtgatttgattatgccgtacctcctccgccgtatgaaggccgatgtaaacgcacatcttacaaaaaagactgaacacgttctcttttgcagtctcactgtggagcagcgatctacctacagggcattccttgcaagctccgaagtagaacagatttttgatggcaacaggaattcgctttatgggattgatgtgatgcgtaagatatgcaaccaccctgatctacttgagagagaacattctcaccagaacccagattatggaaacccagaacgcagtgggaagatgaaggttgttgcagaagtgctcaaggtctggaaacagcaaggacaccgtgtacttctgttttcacagactcagcaaatgcttgacatcctcgagagcttcttggttgcaaatgagtatagttaccggaggatggatggtcttactccagtgaaacagagaatggctttaattgatgagtttaataattcagaagacatgtttgttttcgttctgacgacgaaggttggtggtttgggaacaaatttgactggtgcgaacagggtcattatctttgacccggattggaacccctcaaatgatatgcaggcaagggaacgtgcatggcgtattgggcagaagaaggatgttaccgtttacagattgatcactcgtggcacaattgaggagaaggtatatcatagacagatttataaacattttctcaccaataagatcttgaagaatccacaacagagaagattcttcaaagctcgggatatgaaagatcttttcatcctgaaagatgatggcgatagcaacgcctccacggaaacctctaacatcttcagtcagctggcggaagagataaacatcgtaggagttcaatcagataaaaaacctgaatccgatacacaacttgctcttcacaaaactgcagagggatcctcagagcaaacagatgtggaaatgactgataaaactggtgaagccatggatgaagagacaaatatcttaaagagtctctttgatgcgcatggaatacatagtgctgtgaatcacgacgccataatgaatgcaaacgacgaggaagagaagatgagacttgaacaccaagcatctcaagtggcacaaagagctgcggaagcattgcgccaatcacgaatgctgcgtagccgcgaaagcatctcagtgcctacatggacgggaagatctggttgtgcaggtgcaccatcatctgtacggaggagatttggatcaactgtcaattcccggttaacccagactggagacaaaccatcagcgattaagaatggaatcagtgcgggtctatcttcaggcaaagcaccatcttccgcagagcttctcaacagaatccgcggaagcagagaacaagccattggcgttgggcttgagcagccacagtcttcattcccttcttcttcgggttcaagcagcagagtaggttcgttgcagcccgaggtcctgatccgaaagatatgcagctttgtacagcaaaaaggtggaagtgcagacacgaccagcatcgtcaaccatttcagggacatagtttcttttaatgacaagcagttgtttaagaatctcttgaaagagattgccacgcttgagaaggatcaaaatagatcgttttgggtcctcaaatcagagtataaagactaaaaaggagatgttttggctgcctctactgttcaagtctgaagacggagaaggcaacattggctccacacatatttgccaagtattctctttttctttataagctcacgcacttcttaacctttttttttaccagcaaagtcacttacacttcaaagtctacttttttgttttgtttaacatgatgttaaataaaaaagtaggaaaatcttagtaaagagagcacaactatgaatcttttattgaccaactcgaaaggcagacaccagttaagtaacagtaaaacaaactctcaagtgtaaagactaaagataggttttcttgtgtttgaatgttggtgcaggcaggtcgagagaggttgggatcgacctaccgagtaacttatgaagaacttgaatcaaacggctgatgtagattactcttatttggaagccgtattgagacgaagtggttgaaggtagagttttcatcagctacaatctctcaattcttttactcctggtggacggtgaaccaaattaacactcagactcagtcattgtgggttttcagcgaccagagtgtcagtctcagcttgcttggaaaacacttggtttcgctccgcaagaccagctaattagcaattttcatgagtcatgactccacaaagcatgatcaaaatagcaattgtggtgtgattcacaattgctaacatccctaggtgtgaatattgattcagcctgctcctgagattttaactcttgtaatgattgctcaaacacaagcaacagaggaagttatgagagctagaaagtaactcttgtaatcttgttttaaaacttctaaaaaatgtatatttgtcaatatattaatgtttggacccaaaaaaaaagtcaatattgttgtttttgttaactttg

SEQ ID NO: 14644 - DNA, 1066 bp, Arabidopsis thaliana
  Clone ID: LIB24-052-B5_FLI
ctactagtgtatatggttctccaggaagcacacctcttcatttagcagctagaagtggatctatagattgtgtcagaaagttgcttgcttggggtgctgatcgtcttcaacgagacgcttctgggagaataccttatgtggttgcgatgaagcataagcatggagcatgtggagccttacttaatccgtcctctgcagagccacttgtttggccatcaccattaaagttcatcagtgagcttaatgacgaggcgaaacttctcttagagcaggctttaatggaggctaacagggagagagagaaaaccatcctcaaaggaacagcttattccttaccatcaccctctttctctgacacggatgataacatgtccgaggtgagtgatacggaactgtgctgcatttgctttgagcaagtatgtacaattgaagttaaagactgtggtcaccaaatgtgtgcacaatgcacacttgcactgtgctgtcacaacaaaccaaacccaacgacctcaaccgtgactccaccggtctgtccgttctgtagaagcaccattgcatgtttagtcgtcgcccagaacaacaacaacaacaacgaaaagagcaaaagcctagatgatgttgttgttgttgatcgtgaggcaggtgatgttagctcctccaaattcagaaaacatagaagatcaataaaccttggcgaagaaagcagcagcttcatgggactatcaactattggatcattcggtaggataaccggccgtggctcgggaaggatcgcagccgaaaacgagctgatggacaaaccaatattgtgagggatcgattccgttttaagggacattttggggcatgggggagcaataaaaaagatgaggggatgaaattgtgagaatgtataaaatatagatgaatttatgttagatcttttgttgaagggaggaagattgaaataaggaaaaagatgtggggaggtgtgtaatgcaaggatttgttgtttctttgattaagtttggccaaaattgtttgttgttgttattatttggttacttgatatgaaagggaaacccat

SEQ ID NO: 14645 - DNA, 899 bp, Arabidopsis thaliana
  Clone ID: LIB24-056-G6_FLI
caactacagcctcactcaaccacgccacttctgcaagacctgccggagatactggacacgtggcggagctctccgcaacgtcccagtcggcggtggctgccggagaaacaggcgtaccaaaagcaacagcaacaacaacaataacagcactgctactagcaataacaccagtttctcctccgggaatgcatccaccatcagcacgattctctcctcccactatggaggaaaccaagagagtatcttaagccagattttgtctccggcgaggctaatgaatcctacttacaatcatctcggagatctcacaagtaatacaaaaacagacaacaacatgagcttgttgaactatggaggattgagtcaagacttgaggtcaatccacatgggagcttctggtggctcgcttatgagctgtgttgatgaatggagatcggcgtcttatcatcagcagtcaagtatgggcggtgggaacttggaggattcttctaatcctaatccatccgcaaatgggttttactcttttgagtcgccgaggataacttcagcgtcaatctcttctgctttagcatcgcagttttcttcggttaaagttgaagataatccttacaaatgggttaatgtcaatggtaattgctcttcctggaatgatctttctgctttcggctcttctcgttgagttcaaccacacaacaaaaaggaaacttgagggtatactttggtggggaaaaaactagttaccaggttaattttgtcttatttttcgtttttgattagttaatgttgtttactactttcctcgttctcaatctactatgcttctagttctaggtagcctaagttattggatgtttttgagactatccctttgttatttttgtcgacaatgttctttcgtt

SEQ ID NO: 14646 - DNA, 1329 bp, Arabidopsis thaliana
  Clone ID: LIB24-059-D4_FLI
gtgatgatcggcgaaaataaaaaccggccacatccaacgatccatatccctcaatgggatcaaatcaacgatccaacggccacaatctcttcaccattctcttccgtcaaccttaacagcgttaacgactacccacactctccgtcaccgtatctcgactccttcgcttctctcttccgttacctcccgtcaaacgagttaacaaacgattcagactcatcaagtggcgacgagtcatcaccactcaccgactcattctcctccgacgagtttcgcatctacgagttcaaaatccggcgatgcgctcgaggtcgatctcatgattggacggagtgtccgttcgcacatcccggagaaaaagctcgacgacgtgatccgagaaagtttcattactccggcaccgcttgtcctgagtttcgtaaaggaagttgtagaagaggtgattcgtgtgagttctctcatggagttttcgagtgttggctccatccttctcgttaccgtactcagccgtgtaaagacggaactagctgccggagaagaatctgtttcttcgctcatacgacggagcagttacgtgtattaccttgttcgttagatccagatcttggattcttctcaggattagctacttctccgacttcgattcttgtttctccttcgttttcaccaccgtcggaatctccgccgctttctccgagtaccggtgaacttattgcgtcgatgaggaaaatgcaattgaacggaggtggttgttcgtggagttctccgatgagatctgcagttaggttacctttttcgtcgtctctgcgtccgattcaggcggcaacgtggccgaggataagagagtttgagatcgaagaagctccggcgatggaatttgtggaatctgggaaagagctgagagcggagatgtatgcaagactcagtagagagaactcactcggttgagtcgacttggatcgagtctttgatgacgtggcgactcgatctgattttgtgaatattttagagatttttaaggtgttgtggataaatgacgtggcgggtcgatcttagtgacggtacaatcggacgatgaagaaaaaagcgttaagagtaacaaaaaaaggaagaatttgtaaagagatgataatgagagaatttgagagctattcttctggcttttttctctgcagttttttttattgttttcgttattttcttgtttttattttggttttcggctttattttgtttgttgtttattaatgttatatcattttgtaattagttctcaaatgtatttggataacatcttagtttgagactttagaaaagaacatttcattt

SEQ ID NO: 14647 - DNA, 1866 bp, Arabidopsis thaliana
  Clone ID: LIB24-061-A10_FLI
agctcatcgagaaaagagagaacctaaactttaaattcaattctgtattgttctcaaactcgaacccgaaactttaaatccttccttatttgttttctggagttcttgtttagaactgttttggatttgttttttttgaggagatgctttagttaactaggtttgcttcgagctgatcgctgtgtggcataaaccctaatttcgtggaaactgtgctcttttagaaccggtccagtgagtaagggaatccaattggtgaagatgccgcaagttaagatcattgctaaaaatttcatggacatggtggcgtcacttccagccatcaagcttgacaaactctacaacaatgtctttatctgcgaagccattctcaggtctttgccgcctcttgccaagaagtatgtattgcagatgttgtacattgatgttcctgtacctgctacgatgatggaggagtgggtgctcgcagatggcacctctaaacatagagttgctattgatcgactgattcaattaaggattttttcagaaattagtgataggaaaaggggaaccagctacagcctaaatcctacatttcagaacaatcttcagaaacatattatttccggtggagttttgcctagagagcctatgaactccgacaatgccattaaacttccaagcctacaagaactcgaaacctatgcacttaagcaatgggagtgtttcttgctacaacttataaattcgggtcaaggtgaaaaactaactggcatcagttcatccatgatgaaaatttttcagcgaggtttattgagtcagagagacaaagatggcccgagattaactgagagtggctttcagtttttgctgatggatacaaatgcccagctttggtacattattcgagaatacatattgaatgccgaggagcgagatgtagatccagcagacttgatttcgtttttgttggagcttagttttcatgttactggtcaggcatataacttaaataccttgacagaggttcaaaacaataccctcaaggaccttgcagacttgggattagtcaagcttcaacagggaaggaaagacagttggtttattcctactaaactggctacaaatttatcagtcagtctggcagattcatcagcgcgaaaagagggatttgtcgtgatggaaacaaacttcagaatgtatgcgtactccacatctaagttacagtgtgaaattttacgactatttgcgaggatagagtaccaacttccaaaccttattgcttgtgccattacaaaggaaagtttgtacaatgcatttgacaatggcatcacatcagatcagattataactttcctccagcagaattctcatccacgatgtgctgatcgagtcccatctattccagaaaatgtcactgatcaggtttatactctctatgcccatcaagtgtcgattatacaaaaatgtgtataggattggtttatagaattgaaagtgtatactatctctacgtcctgattcatcaggcttatgttgaataaaaatgcattgttctggcagattcggctttgggagacagatctgcagagaattgagatgacccaggctcacttctatgatgaatttccttcaaaagatgtgtttgaggcagcttgtgactttgctcgggaatggagaggccttctttgggaagactctaagagaatgcgacttgttgtgaaatccgaagttcacaatcagatgcgtgagtttcttcatacccaaagcaggtaacaagaagaaactcacattttcttctcgtattaaaacaaaacatcatgcttcgattctacaaactatgtctttcgtgaggtttcagcagaaagagaaaaaagagtagcc

SEQ ID NO: 14648 - DNA, 1609 bp, Arabidopsis thaliana
  Clone ID: LIB24-061-A11_FLI
ggtgcgtgaaggaattatagatgttgatggtggagaggaagattatgaagtgcttaagaggtctaatactcctcacatgttttgcaaaacccttactgcttctgatacaagcacccatggtggtttctctgttcctcgccgagctgctgaggattgcttccctcctctggactatagccagccccggccttctcaggagcttcttgctagggatcttcatggcctggagtggcgatttcgccacatttatcgagggcaacctaggaggcatttgctcactaccgggtggagtgcgtttgtgaacaagaagaagcttgtctctggtgatgctgtgcttttccttagaggagatgatggcaaactgcgactgggagttagaagagcttctcaaatcgaaggcaccgctgctctctcggctcaatataatcagaatatgaaccacaacaatttctctgaagtagctcatgccatatcgacccatagcgatcacagcatttcctacaaccccaaggcaagctggtcaaacttcataatccctgcaccaaagttcttgaaggttgttgactatcccttttgcattgggatgagatttaaagcgagggttgaatctgaagatgcatctgagagaagatcccctgggattataagtggtatcagcgacttggatccaatcaggtggcctggttcaaaatggagatgccttttggtaaggtgggacgacattgtggcaaatgggcatcaacagcgtgtctcgccatgggagatcgaaccatctggttccatctccaattcaggcagcttcgtaacaactggtcccaagagaagcaggattggcttttcctcaggaaagcctgatatccctgtctctgaggggattcgcgccacagactttgaggaatcattgagattccagagggtcttgcaaggtcaagaaatttttccgggttttatcaacacttgttcggatggtggagccggtgccaggagaggccgcttcaaaggaacagaatttggtgactcttatggtttccataaggtcttgcaaggtcaagaaacagttcccgcctactcaataaccgatcatcggcagcagcacgggttgagccagaggaacatttggtgtgggccgttccagaactttagtacacgtatcctccccccatctgtatcatcatcaccctcttccgtcttgcttaccaactcgaacagtcctaacggacgtctggaagaccatcacggaggttcaggcagatgcaggctgtttggtttcccattaaccgacgaaaccacagcagttgcatctgcgacggctgtcccctgcgttgaagggaattccatgaaaggtgcgtcagctgttcaaagcaatcatcatcattcgcaaggaagggacatctatgcaatgagagacatgttgctagacattgctctctagaagggtttctttggtttctgtgttttatttgcttgtggcttaagtaaaggttcttattttagttgatgatgacttgctgctaacttttggaatgtcacaagttgtgacttatgagagacttgtaaacttggttcaagaatgttctgtgttaggttcaatttaaaaagtgtttgcatc

SEQ ID NO: 14649 - DNA, 1333 bp, Arabidopsis thaliana
  Clone ID: LIB24-061-B8_FLI
gctgttatagaagcagccactcttgctattagcggaagaccgtttgaggttgtgtactatccgagagctagcacttcagagttttgtgtcaaggcattagatgctcgagctgccatgcggattccgtggtgctcaggtatgaggtttaagatggcttttgagacagaggattcgtctcggataagttggtttatggggactgtttcagctgttaatgtctctgatcctatccgttggcctaactctccttggcggcttctacaggtggcgtgggatgagccagatttactccaaaacgtgaagcgagttaacccgtggttggtggaattggtatcaaacgtacatccgatcccgcttacttcgttttcgccaccgaggaaaaagatgcggctacctcagcatccagattacaacaatctgatcaattcgattccagtaccttcattcccaagcaatccccttattagatcaagcccgttaagctctgttctggacaatgttcccgtgggtttacagggagccaggcataatgctcatcagtactacgggttatcatcttcggatcttcaccattactacttgaatagaccacctcctcctcctcctccatcctctctccaactttctccttctctcggtctccgaaacatcgataccaaaaacgaaaaaggattttgctttttgacaatgggaacaacaccatgcaatgataccaaatctaaaaagtcccatattgtattgttcggcaagcttatactacccgaggaacagctatcagaaaaaggctcaacggataccgcaaacatagagaaaacgcagatttcatcaggcgggtcgaaccaaaacggcgttgcgggaagggagttttcttcgtcagatgaaggatcaccttgctctaagaaagttcatgatgcatcaggtttggaaacagggcattgtaaagtgtttatggagtcagacgatgtaggtcgaaccttagacctatcggttcttggttcatacgaagaattgagtcggaaactctctgacatgtttggaatcaaaaagtctgagatgttaagctctgttctctatagggatgcatcaggagccatcaaatacgcaggaaacgaacctttcagtgagttcttgaagacagctcgaagattgacaattctgacggaacaaggaagtgagagcgttgtagtataacttggcagagtgttttgttggagcttggaagtcaaaactcaacgattgaatcttttaagttttttttttcttttatttgtttattttagttccacttttttggattatgtaagtttcaaaatgcaattcacaatctatttgc

SEQ ID NO: 14650 - DNA, 1339 bp, Arabidopsis thaliana
  Clone ID: LIB24-063-F10_FLI
ttcacaaaaacttttcttcagattcacaatctcatcacaacccttcaaaaagagaaaagatctaaagaataaacaagagccctaatatcaaatcacaaccaaaaaaaccaaagaaagctaattaaagttttctctctagctattcctcttcttttcttgttcttgaaaactagggtttacttcaccaaaagataagatctttccccagaaaaagcaatacccaagtcatgtttctgtgtgtctgtatatagataaaacattacataccctaataaggttacacaaatagctataaaagagggaaaataagatagggattttttggggtgaggaaagatgggaagaggaagagtagagctcaagaggatagagaacaaaatcaacagacaagtgacgtttgctaaacgtagaaatggtttgctgaaaaaagcttatgagctttctgttctctgcgatgctgaagtctctctcatcgtcttctccaaccgtggcaagctctacgagttctgcagcacctccaacatgctcaagacactggaaaggtatcagaagtgtagctatggctccattgaagtcaacaacaaacctgctaaagagcttgagaacagctacagagagtacttgaagctgaaaggtagatatgaaaatctgcaacgtcagcagagaaatcttcttggagaggatcttggacctctgaattcaaaggagctagagcagcttgagcgtcaactagacggctctctgaagcaagttcgctgcatcaagacacagtatatgcttgaccagctctctgatcttcaaggtaaggagcatatcttgcttgatgccaacagagctttgtcaatgaagctggaagatatgatcggcgtgagacatcaccatataggaggaggatgggaaggtggtgatcaacagaatattgcctatggacatcctcaggctcattctcagggactataccaatctcttgaatgtgatcccactttgcaaattggatatagccatccagtgtgctcagagcaaatggctgtgacggtgcaaggtcagtcccaacaaggaaacggctacatccctggctggatgctgtgagcgatacttcttccccccaataaagatcttaagcaagtactggtggggtcttcgtggtgtgatcttagatcttatgcatatgaataataatgttattgcacaagacttttgcttttgtagacacaagtggctatagctgtaatagccttcaacatctctcttctgtttcaggatttgtttgtgcctattgtaattgcttatatatgtatggtttgtataatgtgtgaaatgttaacatcgaccatgtctc

SEQ ID NO: 14651 - DNA, 865 bp, Arabidopsis thaliana
  Clone ID: LIB24-066-D5_FLI
gcaggatttgcagatacggtaataatgaaaccgttaagagcaagcatgattggggcgtgtctgcaacaagttctcgagctgagaaaaacaagacaacaacatccagaaggatcatcacccgcaactctcaagagcttgcttacagggaagaagattcttgtggttgatgataatatagttaacaggagagtagctgcaggagctctcaagaaatttggagcagaagtggtttgtgcagagagtggtcaagttgctttgggtttgcttcagattccacacactttcgatgcttgcttcatggatattcaaatgccacagatggacggatttgaagcaactcgtcagataagaatgatggagaaggaaactaaagagaagacaaatctcgaatggcatttaccgattctagcgatgactgcggatgtgatacacgcgacctacgaggaatgtctgaaaagtgggatggatggttacgtctccaaaccttttgaagaagagaatctctataaatccgttgccaaatcattcaaacctaatcctatctcaccttcgtcgtaatccaatcttccggcgagttttttttctctctccgcagccggaagagtggaccgattctgctgattgatatgcattttggtttctgtacatacagtaggttcacaatctagagattttgaaggtttttttttctttcaccgaagtaatgtagcttgccatgactagtgtatgttgttaaacgacaacgtctaagacgacggttcagtgttgatcttagcgtaagtattaatcccacgggatcgtttgtactgtatcagatttggttagtcgtttaaacattgtaatgttctaataataacttttccat

SEQ ID NO: 14652 - DNA, 546 bp, Arabidopsis thaliana
  Clone ID: LIB24-070-F6_FLI
ccgagtagcgaaaaaaagaaatctaattctctcgagaaaatgtctggtcgtggaaagggaggaaaaggcttgggtaaaggaggagccaagcgtcacaggaaggttctgagagacaacatccaaggaatcaccaagcctgccattcgaagattggctcgtagaggtggagtcaagcgtattagtggtctcatctacgaggagacacgtggcgtcctcaagatctttctcgagaacgtaattcgtgatgctgtcacttacaccgagcacgctaggaggaagactgtgaccgccatggatgttgtctacgctctcaagaggcaaggaaggactctctacggattcggcggttaatcagggtttttcagatttgtgtttggagatctgtttctggaaattagatttgagaatttcaatgtaggtattttagtaaatgtagcaagatttgatttcctttttttgctatttcgcttttgtaatgtgttttcatttgctaaattctcaacaatggaaacacgcaatttggtgaaagttcgtttgattactcat

SEQ ID NO: 14653 - DNA, 1101 bp, Arabidopsis thaliana
  Clone ID: LIB24-071-C10_FLI
caaagcttcttatgcacgctcaacccccggatccagattggcatcaaagctgaatggagaggacaccatggtagacttgttctcttcatgggaaacaagaatacttctccacttacatcagttcaagctctgatactaccccctgcccacttaagactggatctgtctccagtacctgatacaattcctcctcgagcacaggtacaatctccacttgaagtgatgaacatccgccctagcagggatgttgcggttttggatttctcttacaagtttggtgcaaacgtggtcagtgccaaattacggatcccagcaaccttaaataagtttcttcaacctctacaattgacatctgaagagttcttcccgcaatggagagcaatctcaggtccacccttgaaacttcaggaagtggttagaggtgtaagacctctagctcttccggaaatggcaaatctgttcaacagttttcatgtgacgatatgccctgggcttgatccaaaccctaataatctagtggcaagtacaaccttctactctgaaagtacaggagccattctctgtttggcaagaatagaaacagacccagcggacagaacccaattgcgaatgacagtaggcacgggagatcctacccttacatttgagttgaaagaatttatcaaggaacaactaattactgtcccaatgggatctcgagctttagttccagcagcaggtccagcaccacctgtagctcaaccgccaagcccagcggctttagctgatgatccaggagctatgctcgctggcttactttaaattcattggggtaagagatttacttacttgcacatgtcgaaaagtttgtttttttcggttattgtagaatgtaatggagaaaatatggaatgatgggagagtaaatgtagagccaaggggggtggagaggggaagggtttaataggaaagctagttatgattatatccaaagcgggcgagttgagttaattatgaaattttgcattcattctgaacatttgtattgtgaggtcatcaggggttgtatcagcgtgttcttgtgcctgtatattttcaatatgtttctcgatgaattatttt

SEQ ID NO: 14654 - DNA, 1937 bp, Arabidopsis thaliana
  Clone ID: LIB24-072-G1_FLI
gtttcaggatttcttctcaagaagtatctagtgatgttaccgttcatgtaggagaagcttcgttttcactgcacaagtttccactcatgtcaaaatgtgggtttatcaagaaacttgtgtcggaatcaagcaaagattcagattccactgttatcaagataccagatattccaggaggctctgaagcatttgagctagcggctaagttctgctacggcattaactttgatatgagcacagagaacattgccatgttgcgatgtgcagcggagtatctagagatgacagaggaacactctgtggaaaatctcgttgtaagagccgaagcttacttgaatgaagtagctctcaagagcttatcgagttcgatcacagtcttgcacaaatcagagaagttgttgcccattgctgaaagagtcaaacttgtaagccgttgcatcgatgcaattgcttatatgacttgtcaagagagccatttttgcagtccttcttcaagtaatagcggtaacaatgaggttgtggttcagcagcagagcaagcagcctgttgttgattggtgggctgaagacttaacggttcttaggattgattcgtttcaacgtgtcctgatcgcgatgatggctagagggtttaagcagtatggacttggtccagtgcttatgctctatgctcagaaatctcttcgagggttggaaattttcgggaaaggaatgaagaagattgagccaaaacaagaacacgagaaaagagtgattcttgaaacaatcgtaagccttcttcctcgagagaaaaatgcaatgtcggttagctttctctctatgcttctacgcgcagcaatattcctcgaaacaacggttgcttgtagacttgacttggaaaacagaatgggattacaattaggacaagccgtgctcgatgatctcttgattccttcttattcattcactggagatcactccatgtttgatactgacactgttcaacgcattctcatgaattatctcgagtttgaagtcgaaggagttcgcttaagcaataatggtgttgatcttgctggtgatatggaacgtgttggtaaacttttggagaattatatggctgaaattgcttctgatagaaatgtgagcttgcagaaattcatcggtttagctgaacttatccccgaacagtctagggttactgaagatggtatgtatcgagccgtcgacatctaccttaaggcgcatcccaatatgagtgatgtagagaggaagaaagtgtgcagcttaatggactgccaaaaactatcacgagaagcctgcgctcatgcagctcagaatgatcgtcttcctgttcagaccattgttcaagtcctttactacgagcaacaacgtctacgaggagaagtcactaacgattcagattctccagccccaccaccaccacaaccagcagctgttcttcctcccaaacttagctcctacaccgacgaactctccaagcttaaacgcgaaaatcaggacttgaagctcgaacttctcaaaatgaaaatgaagctaaaagagtttgagaaagagagtgagaagaaaacatcatcatcaaccatcagcacgaatccaagttcaccaatctcaactgcttccacgggtaagcctccattgccaagaaagtcattcataaactctgtttccaagaaactcggtaagctaaacccttttagcatcacaccatacaacggtagaggcagaaccaaaccaccaaaagatcggagacactctatttcttgaataccatatctatatacacatatataaagttgaatttttgttggaacttttaagttctgattcaaggggttttcttcctgcttatcaacatttgatattttggtgtgtttatgatgtataaactttatctgtggaacttatcacttatgagtatagatcatagattcagag

SEQ ID NO: 14655 - DNA, 893 bp, Arabidopsis thaliana
  Clone ID: LIB24-074-A2_FLI
ctctgtttatggaatcactccgttatctccctcagcgcctgcttatcaatccggtccatcttctaccggtgtttcaaataaggaacaaacttttcctcagcgacctgaacaacctgagtgtcaatactttatgagaaccggagattgtaaattcggaacctcttgcagattccatcatcctatggaagcagcatcgccagagggcgcagtgccatgcactcactttgcgcaacacggtatttgcaagtttgggcctgcctgcaaatttgaccactccttgggctcttcttcactaagctacagcccatccccttcttcactcacggacatgcccgtcgcaccttacccctcctcgctcggcacattagctccatcatcctcatctgaccaatgcactgagcttatctcttccagctctattgaacctataacaacaacaactggtggctcagaaactgtggctgctggagtctcttctatgaccagtgatgtgagccatcccgagcctgctgagaccaataaaggtgattcagctagcaatgaggctaagacttcaagttaaagagacaaatcttaaaggagagaagagaatctctctctattcttcttagattattatctctcttattctctctatatctctcttcttcttttcatcaaactttcatgaactcaggaacataaaaaggatattttttgggtggagagacaacaacagaaagcaaagcagagagatagacgaaaggagttctctctactcttctatgtcatgtctctcctcttaggtctctcttaccatgttcatattattccttcatacggccatctctctgtcttttgttcttctttttctttttggaaacgatgattaataaatggccttatatattcac

SEQ ID NO: 14656 - DNA, 1094 bp, Arabidopsis thaliana
  Clone ID: LIB24-074-G7_FLI
tcggcgaccaaaattggaaaatgtactcagcgattcgctcgcttccactcgatggtggacacgttggtggtgactaccatggacctcttgacggaaccaatcttcccggtgacgcttgtttggttttaacgactgaccctaaacctcgtctccggtggacaactgagcttcatgagagattcgttgacgccgttactcagctcggtggtcctgacaaagcgactcccaaaactattatgagaacaatgggagtgaagggtctcactctctaccacctcaaatcacatcttcagaaattccgcctagggaggcaagctggcaaagaatcaactgagaactctaaagatgcttcttgtgtaggggagagtcaggacacaggttcatcttcgacatcatcaatgagaatggcgcagcaggagcagaacgagggttaccaagtcaccgaagctctacgtgctcagatggaagtccaaagaagactacacgatcaattggagtatgggcaggtgcaacggaggctccagctgaggatagaggcacaaggaaaatacctgcaatcgattcttgaaaaagcttgcaaggcctttgacgagcaagctgctacttttgctggacttgaggctgctagggaagagctatcagagctagccatcaaagtctccaatagctctcaaggaacatcagtcccgtacttcgatgcaacaaagatgatgatgatgccatcgttgtcagagcttgcagtagcaatagacaacaaaaacaacatcacaaccaactgttcagtagaaagctctctgacttccatcacacatgggagctctatatctgctgcatcaatgaagaagcgtcaacgtggagacaatttgggcgtagggtatgaatcaggctggattatgcctagtagcaccattggataaagtttaggagagggaaaaagttcattatgggaaaggtagagataagatttaactcttctttacttgctttgaggggcctgtattattattcgatacaaacttgtcatcacattttcatcttagcctactcatgtatatatatttcaatgttgaagctgaagctttagtgtttccttt

SEQ ID NO: 14657 - DNA, 2017 bp, Arabidopsis thaliana
  Clone ID: LIB24-075-A12_FLI
gctacagaggtgtttgaagtggcgccatcattgcatgtggtagttgtctttacggacattaaagcctaatggctttgcggtttcttccattttcgacattatttcactcgcagatcgttgagaagtaaaccgcgtttctttcttcacaagttgcgcttgcttctcgaacaagttttcaagactgaactcgcttgagctagagataagttcgaaagcgttcatggatacaggtttctccttcttctcagttacaagacattccttggagttactaaaagcagcatcaacatcatctatggttatgtcctcgtcatcttggtcaaatgatggcggcttgtaccctttcttgaaccattcatctcggacgcgtggggaaaaacctctaagctcaaaagatgttgttgagaacgatggcggcgacttccccgcggccaccaccgtcaacatccctaacatctcagcagccaccatcacccccctcacagcttcccctccgtacaatgccgggatcgtacggctggccgttggttggaccattatcggaccgtttagattccaaggacccgataagtttttccggacaagagctgagaagtataagagcactgtgttccgtacaaatattcctccgacgtttcctttcttcggcaacgttaaccctaacatcgtcgccgttcttgacgtcaagtcttttagccatctttttgacatggatctagttgataaaagagatgttctcatcggagacttccggcctagccttgggttctacggcggcgttcgtgttggagtttatctcgacactactgagccaaagcacgccaagataaaaggtttcgctatggaaacactaaaacgaagctcaaaagtatggctacaagagcttcgttcaaacctaaacattttctggggaacaatcgaatccgaaatctccaaaaacggtgccgcttcatatatcttccctctccaacgttgcatcttcagtttcctctgcgcctctctcgccggcgttgacgcttccgtatcgccggacatcgctgagaacggttggaaaacaatcaatacttggcttgcgttgcaagttattcccactgctaaacttggcgtagttcctcagcctcttgaagagattttacttcatacttggccttatccttctctcttaatcgccggaaattacaaaaagctttacaatttcatcgacgagaacgccggagattgtctccggttaggtcaagaagaattcgggttgacccgagatgaggctattcaaaatcttctctttgttttaggttttaatgcctacgggggcttttccgtcttcttaccttctttgatcgggagaataaccggcgacaattccggtttacaggagaggattagaaccgaagtcaggagagtttgcggatccgggtcggatcttaatttcaagacggttaacgaaatggagctggttaaatccgtggtttacgaaacgctgcgttttagtcctccggttccgctgcaattcgcacgtgcgaggaaagattttcagataagttcacacgatgctgtttttgaggtcaagaaaggtgagcttctttgtggttatcagccgcttgtgatgagagacgctaatgtttttgacgaaccggaggaatttaaaccggaccggtatgtaggtgagaccgggtctgaattgctgaattatctctactggtctaacggtccacaaaccggtaccccgagcgcgtcgaacaaacagtgtgcagctaaggacattgtcactctcacggcttccttgctcgttgccgatttatttctccggtatgatacgattactggtgactccggttcaattaaagctgttgttaaagctaaataagttaaagattgattagtgtttaatgttatgtaatcaatcttcaacggtttcatttgttcggagtgtataaattatatgtaaactaaaataatccgaattgaaactcaaattgttatgttagatggtgttgctatgttagagagattttaactg

SEQ ID NO: 14658 - DNA, 1995 bp, Arabidopsis thaliana
  Clone ID: LIB24-075-C11_FLI
ggtgaacaaaaaaagaagaataagaataaaagaaaatgtttgatggtggagtacctgagcagatccaccgtttcatagcttctccaccgccaccgcctccgcttccgccgcatcaaccggcggcggaaagatcactaccttttcctgtctcattctcttcctttaacaccaatcatcaacctcagcatatgttgagcttggatagccgtaagatcattcaccatcatcatcatcatcatcaccatgacatcaaagatggtggtgctactactggtgagtggataggtcagacggatcatgatgatagcgataatcatcatcaacatcatcatcatcatccatggtgtagtgatgaagttcttgctcttcttaggttcagatctacagtggagaattggttccctgaattcacttgggagcatacttcaagaaagttggcagaagttggttttaagaggagtccacaagaatgcaaagagaaatttgaagaagaagagagaagatatttcaatagcaacaacaacaacaacaacaacactaatgatcatcaacacatcggcaattataacaacaagggaaataattataggatatttagtgaggttgaagagttttatcatcatggtcatgacaatgaacatgtttcatcagaagttggggataaccaaaacaagaggaccaatttagtagaaggaaaaggaaacgtgggagaaacggtacaagacttaatggcggaggacaaattaagagatcaggatcagggtcaagtagaagaagcatcaatggagaatcaaagaaactctattgaggttggaaaagttggaaacgtagaagatgatgccaagtcatcatcatcatcaagcttgatgatgatcatgaaggagaagaagaggaagaagaggaagaaagagaaagagaggtttggtgtgttaaaagggttttgtgagggtctagtgaggaacatgatagctcaacaagaggagatgcataagaaactcctggaagatatggtgaagaaggaagaagagaagatagcgagagaggaagcttggaagaagcaagagattgagagagttaacaaagaggtagagattagagcacaagaacaagccatggctagtgatagaaacaccaacatcatcaagttcatatccaagtttacagaccatgatcttgatgttgtccaaaacccaacaagcccttctcaagactcatcttctttagctctacgaaaaacccaaggcagaagaaagtttcaaacttcatcatcactattacctcaaaccctaactccacataaccttttaaccattgacaaatcacttgaacctttttctactaaaaccctaaaacccaaaaaccaaaacccaaaacctccaaaaagcgatgataaaagtgatcttggcaagagatggccaaaggatgaagtgttggctctgatcaacattagaagaagtatcagtaacatgaatgatgatgatcataaagatgagaactcattatcaacatcttcaaaagctgttccattatgggaaagaatatccaagaaaatgttggagattgggtacaagagaagtgccaaaagatgcaaagagaaatgggaaaacatcaacaagtattttaggaagacaaaagatgttaacaagaagagaccacttgactcaaggacttgtccttattttcaccaactcacagctttatacagccaaccaccaacagggaccaccgccaccaccgccaccacggccacgtcagccagagatctagacacccgacccgaggaaaaccgggttggatcccaagatcctgatatttctgtacccatgcatgtagatggagatggtgctggcgataaaagcaatgttcagttttcaggtttcgatcttgagttctaataaatcccttctatatatatattatcagttatattctctttttctgctttttgctaaaacctcatttttggttattatgataaagttattatatatgaat

SEQ ID NO: 14659 - DNA, 1005 bp, Arabidopsis thaliana
  Clone ID: LIB24-075-G4_FLI
gaaatatccaagctttttactcgtaggcctgctttgcagagagccaatgttgctcagttagagtttaagttaagccttcttaagccactgggaatcacgtcttcagaccttgtgaagattcttaactgtcgtcctaggttctttagttgccgtcttgtccttgatgaaaggatcaactacttcatggagattttggggtcaaaagaggtgttgcgcagagtcattatccggaatccgtcactcatgttgtatgacctcgatgacaagatcaaacccgcgatagaatactacaaagggttgggctttagccaacaggatcttgtcgcaatgttgatatcgcgacccacgttgattccaagaacaaactttaacaatgagaagtttgaatacattgagaaaactggagtcaccagagaatccaagatgtttaaatatgttgcagtcatcatcggggtctcgaggatggagacaatcgaagagaaagttagaaacttggaaaagtttgggttctcggaagaagagatttggcacctgtatggaaaatgcccaatccttctctctctctctgttgagaaagttcagagaaacatgactttcgtcatagcctcgatgaaacttccagctcattccgtggttaagcacccttgtttgcttctcctcaacctcgagtctcgtctaaaacctcgtgcggatctcgttaagagagtcttggaaatgcgtctaaagccattgataaaagaagtgagcattttcagagcggtaaggatgagcgagaaacggttcttgaaggtttatgtaatgtgtcatccacaagatattgcaaccgagctgatggagttttacgagaaatccaaaaacatgaaacgtttagctgagaaatccaagaaatacatccgtaaaggattccccttttgaatctctttttcatcttttgtttctttggatatgttcattaaagatgtaacattgtgtagaattttccagctttatcaatggatacttttg

SEQ ID NO: 14660 - DNA, 1269 bp, Arabidopsis thaliana
  Clone ID: LIB24-076-B10_FLI
gaaaaaaatatgggtatccaagaaactgacccgttaacgcaattgagtttaccaccgggtttccgattttacccgaccgatgaagagcttatggttcaatatctctgtagaaaagcagctggttacgatttctctcttcagctcatcgccgaaatagatctttacaaattcgatccatgggttttaccaaataaagcattatttggagaaaaagaatggtatttttttagtcctagggatagaaaatatccaaacgggtcaagacctaaccgggttgccggatcgggttattggaaagctacgggtacggataaaataatctcgacggaaggacaaagagttggtattaaaaaagctttggtgttttacatcggaaaagctcctaaaggtactaaaaccaattggatcatgcatgagtatcgtctcattgaaccttctcgtagaaacggaagcactaagttggatgattgggttctatgtcgaatatacaagaagcaatcaagtgcacaaaaacaagtttacgataatggaatcgcgaatgctagagaattcagcaacaacggtacttcgtccacgacgtcgtcttcttctcactttgaagacgttcttgattcgtttcatcaagagatcgacaacagaaatttccagttttctaacccaaaccgcatctcgtcgctcagaccggacttaaccgaacagaaaaccgggttccacggtcttgcggatacttctaacttcgattgggctagttttgccggtaatgttgagcataataactcggtaccggaactcggaatgagtcatgttgttcctaatctcgagtacaactgtggctacctgaagacggaggaggaagtcgagagcagtcacgggtttaataactcgggcgagttagctcaaaagggttatggtgttgactcgtttgggtattcggggcaagttggtgggtttgggtttatgtgatgatgaaatgctgacgcaataaaaataagtcgttaatttttgtcccgtggcaaatcttatatgtatttgaatttcaattcttttgggttaagagggagactcatagatttagatgtagatttgtaatctttcatgcatagaaaatttgacgaatagatttcgtaactttattttgttgctgtttggttatctttgtattggtataaatttagtggattgaaattgcatattgatatattgtttagttgtggctagctatacatgtaagtttaattgtttgagctatccaaaagaatatatttaact

SEQ ID NO: 14661 - DNA, 1069 bp, Arabidopsis thaliana
  Clone ID: LIB24-078-H8_FLI
aatgttgatgttattgggaagcctgatttcgcgtatcagagaggatcgtctccgatggcttctacgcttcatggtgcttcgattcttcttagattgtcaggaacttgggattggtttgttagtattagtgttgatgattatcctctcgttactcaagatgagcttcttcatattatgtcacatttgcctaaggacttgaattttgtgaaccacactagctacattggttggaaagagtccaggaagttgaagccagttattgttgatccagggctctatcttgtggagaaaaccgatatgtttttcgcttcgcagaaacgagagttgcctaaggctttcaagttattctcaggtccatctttctccatcttaagccggaatttcatggagcactgtgtcttaggcactgacaacttccctcggactctactcatgtacttgtccaacacacctgattctctttccaactacttcccaactatcctctgcaacacggataccttcaaaaagaccatcatgaacaacaacttactctacctagcttctaacgacacttctaaagaaagataccatcagcttgatcacaaagagttcacagaaatggttgactccggagcagcttttgcaagaggattcaggtacgacgacactgtccttgatcgcatcgatcatgaacttctgggacgcaaacctggtgaagttgtgcctggtggttggtgtttaggagattctagtaaaaaccgtagctcgtgttccgtctggggtgactcgggtatccttcggcccggttctggttccgataggctcgagagacgaattgttgagttactatcaaacgattggttcagattgcaccaatgcgtacctgaatgatcggatgatcctcaccgcactttcaatagagtaaatagttgtccaagacacgaagaagataacggtactttatgcttctgtatctttagagagagttccacttctacattgtaacctgtgactttgagagtgtttgttccattgttgttgtagaaaaaccatctcaaagctgagaaatgaaacgactcggttcatt

SEQ ID NO: 14662 - DNA, 1496 bp, Arabidopsis thaliana
  Clone ID: LIB24-080-D11_FLI
gcaaccatcaatgatggcccaggctgtttgatgctaaaatgtcccgacccttcttgtcctgctgctattggtcgagatatgatcgataagttggcttctaaggaagacaaggagaagtattatagatattttcttagatcttatgtcgaagtcaacagagagatgaagtggtgtcctgccccaggatgtgaacatgcaattgattttgctggtgggaccgaaagttatgatgtttcgtgcttgtgttcgcatagcttttgctggaattgcactgaagaggctcaccgtcctgtggattgtgacacagttggaaaatggatactaaagaacagcgctgaatctgaaaatatgaattggatacttgccaattcaaagccttgtccaaagtgtaagcggccaattgaaaagaatcatggctgtatgcacatgacatgcacaccaccttgtaaatttgagttttgttggctttgccttaacgcatggacagaacacggggaaagaactggtggattttatgcctgcaaccggtatgaggcggctaagcaagaagggttgtatgatgaggctgaaaggaggcgagagatggcaaaaaattcgctagagagatacactcattactatgaacgctgggcaagcaatcaagtgtcgaggcaaaaagctatgggggatctgcagaaaatgcaatcagagaagcttgggaagcttagtgacattcagtgcacaccagaatctcagctcaagtttatcgcagaggcttggctccagatcattgaatgcagacgggtactgaaatggacatatgcatatggatactatctacaagatcatgctaagaaaccattttttgagtatttgcaaggggaggctgagtcaggtttggagaggctccacaaatgcgtagagaaggatatagaggtgtttgaacttgctgagggcccttcagaggaattcaatcatttccggacaaaattaactggtttaaccagcatacaaaaaccttctttgaaaatctggtgaaagctctggagaatggtcttgctgatgtggattcacaagctgctagcagcaaaccagctaactctaaaccttctagcaagacaaaaggcggtgggaaaggtaaaggaagctccaaaaatggcgggtccagcagaaacccagatggcaattgagatctctcaggtttcagttacatcactcagtctctctcacaaaggtctagattactcaggaagaagaaagactttttaagagttcagcaaattggagaaaggtttggggtttagaatacttttgactacactcctgtgagtttgaaggctgttaaggcacaagactgcacacacaagttaactatctctctctgtcttaagggttcatgatagtctttgcttaccctaaatattgtatagtattaaagaatctgcacattgttactttggcttttgattgccttttgaaccatctgaagtttcttatctgaattgagttcaagctgc

SEQ ID NO: 14663 - DNA, 1061 bp, Arabidopsis thaliana
  Clone ID: LIB24-083-C4_FLI
cgagaagaagctgtctgcgctgcagagtcaggagtataagggaggtgatgaatccaagctagacaagactaaaacttccataaccagactgcaatcactcatcattgtttcttcagaagctgttttaaccacgtctaatgccattctccgcctccgggacactgaccttgtccctcagcttgttgaactctgccacggattaatgtacatgtggaagtcaatgcacgagtatcacgaaatccagaacaacatcgtgcaacaagtccgtggcctgatcaaccaaacagagagaggtgagtcaacatcagaggtacaccggcaggtgacgcgggacctagagtcagctgtgtccttgtggcattcgagcttctgtcgcatcattaaattccagagggagttcatatgctctctccacgcatggttcaagctgagcctggttcccctgagcaacggagacccaaagaaacagcggccagactcatttgccttgtgcgaggagtggaagcagagcctggaacgggtgcctgacacagtggcgtcagaagccataaagagctttgtaaacgtggtacatgtgatatcaataaagcaggcggaagaggtgaagatgaagaaacgcacggagagtgcaggaaaggagctggagaagaaagcatcctcactgaggagcatagagaggaagtactaccaggcatactcgacggttgggataggccctggaccggaggtgttggactcacgggacccgctatctgagaagaaatgtgagctggcggcatgtcagaggcaggtggaggatgaggtaatgaggcacgtgaaggctgtggaggtgacacgagctatgactctcaacaatctacaaaccggcctgcccaatgtattccaggccttgaccagcttctcatctctcttcactgaatctctccagactgtctgttctcgttcctactccatcaactgattatgtccaagtttctcatttatttttaagctctcattacgttggtatcatgtaaatttgaggattgattaaattgagtcttgtggttttgtgaggactc

SEQ ID NO: 14664 - DNA, 859 bp, Arabidopsis thaliana
  Clone ID: LIB24-083-D4_FLI
cttcgaaactcaatttgtgaaatttgggggtttaaggatgaagggtttagtgtctactggttggaaaggtcccgtcaagttcaggatgcccactgctgaaaacttggtacctattcgattggacattcaattcgaaggtcagcgttacaaagatgctttcacttggaacccttcagacccggataatgaagtcgttatctttgccaaaagaactgttaaagacttgaaacttccctatgcatttgtcactcagattgcccaatctattcagtctcagctctcagactttcgggcttatgaaggacaagacatgtacactggtgaaaaaatcataccaattaagcttgatctccgagttaaccatactctcatcaaggatcagttcttatgggacctaaacaattttgagagtgatcctgaggaatttgcaagaaccttgtgcaaggatttaggtgttgaagaccctgaagttggacctgctgttgcctttgcaataagggaacaactttacgagattgcaattcaaagtgtggcttcagctagggagagtagattaagcaagaaaggccgcagaggatctgatcatggttcagcgagcaaggcaagtggcctgtcaatggacttaatgaagttattcagttttaagtccagtgtagttcggaaaaggaaagacttggatgtttatgaaccagttgtggatctgctaacaagtgaggaagttgatgcgcttgaagccagggaagagagacatgcaaggtgaagagtttcgtttacatgtataaatatttcttagggcaacactcaaaatatgttgtatcatgcttaacttgagttaatgatattaagacaatcttttatg

SEQ ID NO: 14665 - DNA, 466 bp, Arabidopsis thaliana
  Clone ID: LIB24-084-F7_FLI
cagcgatgcttatggaaccgatactttgttctttgcgttctactatcagcagaactcataccagcaatatcttgctgcaaaagagctgaagaaacagtcatggagataccacaggaagttcaacacttggtttcagagacataaagagccaaagattgcaaccgatgaatatgaacaaggagcctacgtttacttcgatttccaaaccccgaaagacgagaatcaagaaggaggatggtgccaaaggatcaaaaacgagttcacatttgaatacagttatcttgaagatgaactcgtcgtatagaatagagagagatgcatgtttgtatatactctcgagcaagtgtgttattatttcctgcgactatttgtactcttcttttcaataaactaattacttttagtttcaacaagttgaaattcttcgttaacgactcttaaagacaataaaagccagagtatcatc

SEQ ID NO: 14666 - DNA, 2236 bp, Arabidopsis thaliana
  Clone ID: LIB24-085-D12_FLI
tcagatgtagagaaaggcttacctccaaaaaaggagacaatactcaaagttggcatgtctcaaatgcaaaaacagtactacaaggctttactgcagaaggatcttgaagtggttaatggtggtggagaacgcaaacgtctgttgaacatagcaatgcaattgcggaaatgctgcaatcacccttatctcttccagggtgcggagcctggtcccccatatactacaggagatcaccttgtaacaaacgcaggtaagatggttctcttagataaattgctacctaagttgaaggatcgagattcaagggttctgatatttctcagatgacaaggcttttggatattctcgaggattacctaatgtatcgtggttaccagtactgccgtattgatggaaatactggtggtgacgaacgagatgcttccatagaagcctataacaagccaggaagtgagaaattcgttttcttgttatccactagagctggaggacttggtatcaatcttgctactgcagatgttgtgatcctctatgatagtgactggaaccctcaagttgacttgcaagctcaggatcgtgcacataggattggtcaaaaaaaagaagttcaagtgttccggttctgcaccgagaatgctattgaggctaaagtcattgagagagcttacaagaagttggcacttgatgctctggttattcagcaagggagattggcagaacagaaaactgttaataaggatgagttgcttcaaatggtgagatatggtgctgaaatggtgtttagttctaaagatagcacaattacggatgaggatattgacagaatcattgccaaaggagaagaggcaacggctgaacttgatgccaagatgaagaaatttactgaagatgcaatacagtttaaaatggatgacagtgctgacttttatgattttgacgatgacaacaaggatgagagcaaggtggattttaaaaagattgtgagtgaaaattggaatgatccaccaaaaagagagagaaagcgcaactactctgaagttgaatacttcaagcaaacgttgcgacaaggtgctccagctaaacctaaagagcctagaattccacgcatgccccaattgcatgattttcagttctttaacattcagaggctgactgagctgtatgaaaaagaagtgcgataccttatgcaagcacatcagaaaactcaaatgaaagacacaattgaggttgatgaacctgaagaagttggagatcccttaactgctgaagaagtggaagaaaaggagctattgctggaagagggtttctcaacatggagcagaagagacttcaatgccttcattagggcttgtgagaagtatggccggaacgacataaagagtattgcctctgagatggaagggaaaactgaggaagaggttgaacgatatgctcaagttttccaagtgcgatataaagagctgaatgattacgacagaatcatcaagaatattgagagaggggaagcaagaatctctaggaaagatgaaatcatgaaagctattgggaagaaactggatcgctacagaaacccgtggctggaactgaagattcaatatggtcagaacaaagggaagctgtacaatgaagagtgcgaccgtttcatgatatgcatggtccataaacttgggtatggaaactgggatgagctaaaggcagcgtttcggacatcccccttgtttaggtttgactggtttgtaaaatcccgcacaactcaggaacttgcaaggagatgtgacacactaatcaggttgattgagaaagagaatcaagaatttgatgagagagagaggcaagcccgaaaagagaagaagctttcaaagagtgcaacgccatcaaaacgaccttcgggtaggcaagcaaatgagagcccttcatctcttctgaagaaacgaaagcagctgtcaatggatgattatggaaagcgtaggaaataagaaggcttgtgttgaatccatcactaagtaatcagaaagatttatgatcacttctaggtttgattccgaatcggagaattagttagaagaagctccttagagacaaggatctaatattttgtacccgcaagcatcactgcattgtctccgacttctcttatttcttcaacgtgtattttactctattttgtttgtagaaatattcaccacattcctagtagtgcgtttttagtaaatctcaaatcaacttttgtggtcgg

SEQ ID NO: 14667 - DNA, 1081 bp, Arabidopsis thaliana
  Clone ID: LIB24-089-D7_FLI
caaattacaaaagagaaaagatggaaaaagttttctccgacgaagaaatctccggtaaccatcactggtcggttaatggaatgacgtcgttgaatcgcagtgcttccgaatgggcattcaatcgtttcatacaagaatcctccgccgctgcagacgacggagaatctacgacggcgtgtggtgtttccgtctcctctcctcctaatgttcctgtagattcagaggaatacagagcatttctcaagagtaaacttaatcttgcttgtgctgctgtcgccatgaaaaggggaactttcatcaaacctcaggatacttctggtagatctgacaatggtggagccaatgaatcagaacaagcctctcttgcttcttccaaagctacaccaatgatgagcagtgctataacaagtggatctgagctctctggtgatgaagaagaagctgatggtgaaactaatatgaaccctactaatgttaaacgcgttaaaaggatgctctctaatagagaatcagctagacggtccagaagaagaaagcaagcacacttgagtgagctagagacacaagtttcacagcttcgtgtagagaattcaaaactcatgaagggtctcactgatgtaactcaaacattcaatgatgcatctgtagaaaacagagttttaaaagccaatattgagacactacgagcaaaggtgaaaatggctgaagagacagtgaagagactcactggctttaacccaatgttccacaatatgcctcagattgtttcaactgtctctcttccttcagagacatcaaattctccagacactacaagcagccaagtgactacaccagagatcattagctcggggaacaaaggcaaggccttgatagggtgcaagatgaacagaacagcttcgatgcgtagagttgagagcttggaacatctgcagaaacgtattcgaagcgttggggatcagtagctgttaaagaagaatcttgatttgtaacattaatcttaagacatatgttaagacaaaatgttgtatgtttttgtaaagaattgttttttcagattatttaaatttttttttgtctt

SEQ ID NO: 14668 - DNA, 1337 bp, Arabidopsis thaliana
  Clone ID: LIB24-090-A8_FLI
acgagacagatttgattccatttttattactgttactatcatccaaacccttggtatttgtagccatgagtcttgtttcagatctcatcaaccttaacctctcagactccactgacaaaatcattgctgaatacatatgggttggtggttctggaatggacatgagaagcaaagccaggactctacctggaccagtgactgacccttcgcagctaccaaagtggaactatgatggttcaagcacaggccaagctcctggtgaagacagtgaagtcatcttataccctcaagccatattcaaggatcctttccgtagaggaaacaacattcttgtcatgtgcgatgcgtacactcccgcgggtgaaccaatcccgactaacaaaagacacgctgcggctaaggtctttagcaaccctgatgttgcagctgaagtgccatggtatggtattgagcaagaatacactttactccagaaagatgtgaagtggcctgttggttggcctattggtggttatcccggccctcagggaccgtactattgcggtattggagcagacaaatcttttggcagagatgttgttgattctcactacaaggcctgcttatacgctgggatcaacattagtggcatcaatggagaagtcatgccgggtcagtgggagttccaggtcggtccagctgttggtatctcggctgctgatgaaatttgggtcgctcgttacattttggagaggatcacagagattgctggtgtagtggtatcttttgacccgaaaccgattcccggtgactggaacggtgctggtgctcactgcaactacagtaccaagtcaatgagggaagaaggcggttacgagatcatcaagaaagcaatcgataaattgggactgagacacaaagaacacattgctgcttacggtgaaggcaatgagcgtcgtctcacaggacaccacgagactgctgacatcaacactttcctttggggtgttgcgaaccgtggagcatcgatccgagtaggacgtgatacggagaaagaagggaaaggatactttgaggacaggaggccagcttcgaacatggatccttacattgtcacttccatgattgcagagactacaatcctctggaatccttgatgatcatcagatcaagaaaaaatcttgaatgtcactcaaatttgtgtttcttgcaagattcaaagtttgtgttctctatcaagcaatgtcttaggataagtcaaagatttgctctgcttattctgctttttatttacttcacatcctattgaaaacatttctgtgtattatttatgaataaacattatcttaaaagggctg

SEQ ID NO: 14669 - DNA, 1428 bp, Arabidopsis thaliana
  Clone ID: LIB24-090-H9_FLI
ctcttgtttatcacaaaggtcgagctcctcgtggcgaaagaaccaattgggttatgcatgagtatcggttggttgatcaagaccttgataaaactggtgttcaccaagatgcgtttgtgctttgtaggatttttcagaagagtggctccggacctaaaaatggagagcagtacggtgctccgtttgttgaggaggagtgggaggaggaggatgatatgacatttgtacctgaccaagaagatcttggaagtgaagatcatgtttatgtccatatggatgacattgatcagaagtctgaaaactttgtggtctatgatgccattcctattccgttaaactttattcacggggagtcgagcaataatgttgaaacaaactactcagactccataaactatatacaacaaacaggaaactatatggactctggtggctactttgagcaaccagcagaatcttatgagaaagatcagaagcctatcatccgtgaccgtgatggtagccttcaaaatgaaggaattggatgtggggtccaggacaagcactcggaaactttgcaatcttctgacaacatctttgggactgatacatcatgctacaatgattttccagttgagagcaactatttgattggtgaggcgtttctggatccgaacagtaatcttctggagaatgatggtctgtacctggaaacaaatgatctcagtagtactcagcaagatggtttcgactttgaagattatcttaccttctttgatgaaacttttgatccttcgcaactgatgggaaatgaagatgtttttttcgatcaagaagagctctttcaagaggttgagactaaggaactagagaaagaggagacttcaagaagcaaacatgtggtggaagaaaaggaaaaggatgaagcatcttgttcaaaacaagttgatgcagatgcaacagagtttgagccagattacaagtacccgttactaaagaaggcaagccacatgttgggtgctattcctgctccgcttgcaaatgcttctgagttccctacaaaggatgcagctatccggttacacgcagcacaatcatcaggttcagttcatgtaaccgcaggtatgatcacgatatcagacagcaacatgggctggtcatacggcaaaaacgagaaccttgacttgatcctttctttggggttggtccaagggaataccgcccccgaaaaatcagggaatagttcagcatgggcaatgttaatattcatgtgtttctgggttcttctactctcagttagtttcaaagtgagcattttggtctcttccaggtgataggtaaccctttcttgttcaaacaagacttttgtgtttgtacattgatatagatgaacttgcagtgttcaatgttttattctctaataatattgaataaaccccatattctatc

SEQ ID NO: 14670 - DNA, 730 bp, Arabidopsis thaliana
  Clone ID: LIB24-091-F5_FLI
ctgagcaacacaaaactggcgaaccaacgtgactctaacgaagaaaccggcaatggccagtatcactacaatgccgaagaaataacaagaatcataaacgagccagaatattatcccccgggttacaacttgtctaccaccgcaatttcaaacatggtgtctatgctgactaatgttgtctctggtgagaccgaaccctcggcatctgcgacatggacgatgggtcataagagagaaagagaagagttttctttgcctcctcaaccattgattaccggttcagctgtgactaaagaatgtgaaagctcaatgtccttggagaggccaaaaaaatatagaggagtaaggcaacgaccatggggaaaatgggcggcggagattcgagacccacacaaggcgacacgtgtatggcttgggacattcgagacagccgaggccgccgcaagagcctatgatgcggcagcacttcgctttagaggaagcaaagcaaagcttaatttccccgaaaatgttggaactcagacgattcaacgaaattctcatttcttgcaaaactctatgcaaccttctctgacatacatcgatcaatgtccaactctattatcttactctcgatgtatggagcaacaacaaccattagtaggcatgttgcagccaacagaagaggaaaatcactttttcgaaaaaccatggaccgaatatgatcaatacaattactcctcttttggtt

SEQ ID NO: 14671 - DNA, 1450 bp, Arabidopsis thaliana
  Clone ID: LIB24-092-E2_FLI
tctttggtcgggatcactggaaagaaatgtataatctcactttctctccatcattgtcctcttctttgctctcttttacacaacaaactcctgcagccatagtgtcctcttctcctccggatttagtacttcaacaaaaactccggtttgtcgtggaaacctcaccggaccgatgggcttatgtcattttttggcaaaagatgtttgatgatcaatcggaccggtcttacttggtttgggttgatggtcatttctgtggaaacaagaacaacaattcccaagaaaattatacaacaaacagcatcgagtgtgagctgatgatggacggtggagatgatctggagttgttctatgccgcatcgttttacggtgaagatagatcgccgagaaaggaagtatccgatgaatctttggtttggttaaccggtcccgacgagctccggtttagcaactacgagagggctaaagaagccggttttcacggggtacacacattggtctccatacccatcaacaatggcattatcgaacttggttcgtctgaatcaattatacaaaaccggaactttataaaccgagtcaagtccatattcgggtcgggtaaaacaacaaaacacactaaccaaaccggttcttaccctaaaccggcggtatcagatcattcgaaaagcggaaatcagcaattcgggtcggaaagaaaacggaggaggaaacttgagacgacaagggtagctgcggcgacgaaagagaaacatcatccggcggttttgtcccacgtggaagcggagaagcaacggagagagaagctaaaccaccggttttacgctctacgtgccatcgtaccaaaagtgtcacgaatggacaaagcgtcacttttatccgacgcagtttcgtacatagaaagtcttaaatccaaaatcgatgatctcgaaactgagatcaagaaaatgaagatgacggagacagataaattagacaacagcagcagcaatacgtctccgtcttccgttgagtaccaagttaaccagaaaccttcaaaatcaaacagaggctctgacttggaagtgcaagtgaagatcgtcggagaagaagccataattagggttcagacagagaatgtgaaccatcctacgtcggcattgatgagtgcgttaatggaaatggattgtcgtgtacaacacgcgaacgcgtcgcgcttgagtcaggttatggttcaagatgttgttgttttggttccagaaggattaagatcggaagataggcttaggaccacacttgtccgaaccctaagcctataacaatttctttgttttgtgacgtcaacataggatgtgataataatttttgtttttttttgcgaccttttgttttatttgataagtactagaaaaatcaaattccttctagcgattaatgttgttttatcaaaagtttgatctcgttgatacgt

SEQ ID NO: 14672 - DNA, 937 bp, Arabidopsis thaliana
  Clone ID: LIB24-092-H5_FLI
gcgtcaccttctcatcaacaaattcaaattctcctcggtaagcatgagaattgaatctggggagaatttgaatttgttgatgagaaggtgacgcatatcgtatcccgaccaagcaaaacatgaggatggcattgtattggctcgtacagggatgcacagcaggcgactcacttgtcttccactactctggtcatggttcgcgtcaaagaaactacaacggtgatgaagttgatggctatgatgaaacactctgtcctctggattttgaaactcaggggatgattgtagacgatgagatcaacgcaaccattgtacgccctcttccacatggtgtcaagctccattcaattatcgatgcttgccatagtggtaccgttctggatttacccttcctatgcagaatgaacagagctgggcagtatgtgtgggaggatcatcggcctaggtcaggtttgtggaaaggaactgctggtggagaagccatttcaattagtggatgtgatgatgatcagacttcggccgacacatcagcgctgtcgaagatcacgtctacgggtgctatgactttctgttttattcaagcaattgaacgcagcgcacaaggcacaacctatggaagccttctgaattctatgcgcaccacaataaggaatacagggaatgatggtggtggtagtggtggagttgtgacgactgtgctgagcatgcttctgacagggggaagtgcgattgggggattaagacaggagcctcaactgactgcttgccaaacattcgatgtctatgcaaagcctttcactctctagtaaaggacaagtcactttttatgtatagcgagtgtgatttgagaatccgtccatataaccaccttttgtttcttatttttatttttctttcaaaagaataaaggaaaacattgatttggtgattcgataac

SEQ ID NO: 14673 - DNA, 1490 bp, Arabidopsis thaliana
  Clone ID: LIB24-093-A12_FLI
caatcttcagcggatgatgataaggttgacgtggtttcgggttctagaagatatggatctgagaactggatgtcctcagccaggcatgaacctacttacacagatttgctctccggctttgggactaacatagatccatcccatggtcagcggatacctttttatgaccattcatcatcaccttctatgcctgcaaagagaatcttgagtgattcagaaggcaagttcgattatcttgctaaccagtggcagatgatacactctggtctctccctgaagttacatgaatctcctaaggtacctgcagcaactgatgcgtctctccaagggcgatgcaatgttaaatacagcgaatatcctgttcttaatggtctatcgactgagaatgctggtggtaactggccaatacgtccacgtgctttgaattattatgaggaagtggtcaatgctcaagcgcaagctcaggctagggagcaagtaacaaaacaacccttcacgatacaagaggagacagcaaagtcaagagaagggaactgcaggctctttggcattcctctgaccaacaacatgaatgggacagactcaaccatgtctcagagaaacaacttgaatgatgctgcggggcttacacagatagcatcaccaaaggttcaggacctttcagatcagtcaaaagggtcaaaatcaacaaacgatcatcgtgaacagggaagaccattccagactaataatcctcatccgaaggatgctcaaacgaaaaccaactcaagtaggagttgcacaaaggttcacaagcagggaattgcacttggccgttcagtggatctttcaaagttccaaaactatgaggagttagtcgctgagctggacaggctgtttgagttcaatggagagttgatggctcctaagaaagattggttgatagtttacacagatgaagagaatgatatgatgcttgttggtgacgatccttggcaggagttttgttgcatggttcgcaaaatcttcatatacacgaaagaggaagtgaggaagatgaacccggggactttaagctgtaggagcgaggaagaagcagttgttggggaaggatcagatgcaaaggacgccaagtctgcatcaaatccttcattgtccagcgctgggaactcttaaacaaacaaaataaccaacaacccttttgctgcaagccgagcaggatgggggtcgattggtggagactggagagcaaaatgggatgatgggtttaagataagatattaaaaatgcaatttttgaagtattttgttggccacttagataattagcatcttccatcacccttattatctatctaataataattaatagatattataaagtaaaacataaaaaggttacaggtattatatagtagaatatgaaaagctcttttataagtagaatatgatggtgtggagttgtagtcggaggctggtatcggttctttttatggatgtatttttttcctt

SEQ ID NO: 14674 - DNA, 793 bp, Arabidopsis thaliana
  Clone ID: LIB24-093-G2_FLI
gtttttgtttacagagcatattacagatgcacgcatcgattcacacaagactgtttagcagtgaagcaagttcagaaatcagacacagatccttcccttttcgaagtgaagtatctcggaaaccacacttgtaacaacatcacatccccgaagacgacgacgaacttctctgtttcattgacgaacacgaacatctttgaaggaaacagagtacatgttacagagcaatcggaagacatgaaaccgaccaagtccgaagaagtgatgataagccttgaagatctggagaacaagaagaacattttcagaacgttttctttctctaaccatgagattgagaacggtgtgtggaaaagtaaccttttcttgggaaatttcgtggaagatctttctcctgcaacatcagggtctgcaattaccagcgaggttttatctgcacctgctgctgttgagaattccgaaactgcagattcgtatttctcgtctttggacaatattatcgatttcggacaggattggttgtggtcgtagctttgaataattgatttggtgaatgtaatgtctctctcttaatggcagtaattatagatggtcagtttaatttaagggttattagttattacttattagtatagtaaaaattatttttgccgatggataaaaattggcttataggactaaagttacatgattttggcctttttcattgtttttcagcagggtttatgaattatgatttccctatgaagttggattgtactttatgacaattaataaagaaaggattttatat

SEQ ID NO: 14675 - DNA, 812 bp, Arabidopsis thaliana
  Clone ID: LIB24-095-D7_FLI
cgtggatcaagattctttcttatcttcatcactccacacattttcttgtcttcaaactcacacaaagaaagaaaagtctccaaagctcaaaaagcaatgactcgaccgtcaagattacttgagacggcggcgccaccaccacaaccgtcggaggagatgatcgcagcggaatccgacatggtggtgatcttgtcggctcttctttgcgctcttatctgcgttgctggtctcgccgccgtcgtacgatgcgcttggctccggcggtttacagccggaggagattcgccgtcaccgaacaaaggcttgaaaaagaaagctcttcagtctcttccaagatccactttcaccgccgcggaatcaacctccggcgccgccgctgaagagggagactcgacggaatgtgctatttgcctcactgacttcgccgacggtgaagaaataagagtgcttcctctttgtggtcattctttccacgtggagtgtattgacaaatggctagtttctaggtcttcttgtccttcttgtcgcaggattcttacgccggtgagatgtgaccggtgtggtcatgcttctacggcggagatgaaagatcaagctcatcgtcatcaacatcaccaacactcttctactaccattcctacgtttcttccttaattaacactaatttttgttttattatggcaataattaattgcataaaagttatgtaaagtgagtttaattaggattagagagatcttttaaagtttttctctcttttctccttgttgtaatccagtgtatttaatcaaatctcagatggagttcaaatt

SEQ ID NO: 14676 - DNA, 781 bp, Arabidopsis thaliana
  Clone ID: LIB24-096-B8_FLI
ccagcgtccgcttgcttgtcatcaaatcgattcctcgagtgaggaaacatttctcttttcgtggatcttacgagaccgagaagagagtaagatatgtccggcgcatcgtctgaggatagcagtattttcgctcgctgtgaagacgtagactgtaacaagaaaatacctgtagagcttgtaaggatgcacatttgttatgctatgttccataggactctggcagctcgaggttttgggacacaaactcaggctaagaagaaacctacaaacaagaagaagtcaacaacatctcttaccgattttgctgtcttcatgaatcatttccgtaaatcttttagaacagattataatggtgcattggtgaaagaaggttcaaagatcggttgggaaatgtggaagtctatgactgaggatgagaagaaagattatctcgataaagctgctgatgaggaagatgaggatgaggataccgtggaggaacaagctgatgattctgatgatgctgaggacaatgaagttaaggaaacagatgatgacaattgaccacaacaaagtagctcaagtaaaaaagtaaagattttgggtgacgactactaaatatgttagttatgcttgttcagttgttcttggggggtctttaatcttattgaaatggatttaaggtagtatacaaaaacagactgatacgaatatgggcttaaaagcccatacgagttgacattagtacgtaggtttggcccatttatgttataactactataagaagaaaacaagtttagtt

SEQ ID NO: 14677 - DNA, 1000 bp, Arabidopsis thaliana
  Clone ID: LIB24-100-A11_FLI
ccgatttcaaaattttccggtgaaatcgaaaaaaaaagcgagatcttcttctctaatggcgacgaccttaagcagagatcaatatgtctacatggcgaagctcgccgagcaagccgagcgttacgaagagatggttcaattcatggaacagctcgtaagtggagctacaccggccggtgagctgaccgtagaagagaggaatcttctctcggtcgcgtataagaacgtgattggatctcttcgtgcggcatggagaatcgtgtcttcgattgagcaaaaggaagagagcaggaagaacgaagaacacgtgtcgcttgttaaggattacagatctaaagttgagactgagctttcttcgatctgttctgggattctcaggttacttgattcgcatctaattccttcagctactgccagtgagtctaaggttttttacctgaagatgaaaggagattatcatcgttatttggctgagtttaaatctggtgatgagaggaaaactgctgctgaagatactatgatcgcttacaaagctgctcaggacgttgcagttgctgatctagcacctacacatccgatcaggcttggtttggctcttaacttctcagtgttttactacgagattctcaactcttcagagaaagcttgtagcatggcgaaacaggcttttgaagaagccattgctgagctggacacattgggagaggagtcatacaaggacagtactctcatcatgcagttgctaagggacaatctaaccctttggacctccgatatgcaggagcagatggatgaggcctgaaggtctaatggaagaaaagacggttatgtaatgtacctgcaaccgtaaccgaaaatctgagttcaacctcctttgctgtaaaacttgtcgaaaagaaaagtttgtttttttatgacagattatgtgcacagctttggtgttatctgctgctctgtatcaactctgtttttgtttggtaatttatcctcatctttgctt

SEQ ID NO: 14678 - DNA, 1280 bp, Arabidopsis thaliana
  Clone ID: LIB24-102-B1_FLI
cttttatatatgtggaaaactgcatttattaagaacagtttagaaagtgtcaacccctaaaggaatgtttttagtttagaggaaagagagagaagaagaagcagcagcagaagttgttaatttgaagactatttgaggaaagacacctatatctaaatactcaaagttacaaaaatattacttcagaaaacagttccattagagagactcataaagcttctcatctaattatgagtggattgatgagttttggtgaattagaagaccaatttggtcagatttcagacactactatggaagagaagataccatttctgcaaatgcttcaatgcatagaacacccttttacaacaacagaaccaaatcagtttctccaatcacttctccagatccaaaccctagaatcaaagagctgtctcacccttgaaacaaacatcaaaagagatccgggtcaaacagatgacccggaaaaggatccaagaacagaaaacggagcagtaacggtcaaagaaaaaagaaaacggaaacgtacaagagctccaaagaacaaagacgaagttgaaaaccaaaggatgactcacattgccgtcgaacgtaatcgaagacgacaaatgaacgaacacttaaactctctccgatctctcatgcctccttcgtttcttcaacggggtgaccaagcttcgattgtaggaggggcaatagatttcatcaaggaactagagcaactcttgcaatctctagaagctgagaaacgaaaggatggaactgatgaaactcctaaaacggcgtcgtgttcttcatcttcgtctcttgcatgcactaactcttctatttctagcgtgtctacgacgtcggaaaatggatttacggcgagattcggcggtggagatacgacagaagtggaggctacggtgatacagaaccatgtgagcttaaaagttcggtgtaagagaggaaaacgacagatcttaaaagctattgtctcgattgaagaactaaagcttgcgattctacatctcactatctcttcttcctttgactttgtcatctactctttcaatctcaagatggaagatggttgtaaattaggatcagcagatgagatagcgacagccgttcatcagatcttcgagcaaatcaacggtgaagtcatgtggtcaaatcttagtcgaacttagttgacttttgactcctagtaacgtgtgtaaactttaggttacaaagaaaagggacgtgatataaataagaaaaaccaaagaggtgaaattttgggagttttc

SEQ ID NO: 14679 - DNA, 1445 bp, Arabidopsis thaliana
  Clone ID: LIB24-107-D7_FLI
agattctgttccacttccagtctcaatcatcgcagagattgatctttacaagtttgatccttgggagcttccaagtatttatatttcctaatttatgctttaatgatatgattaaaatgtacgatttaattttactatgaccactgtaatctagccactatttaaatttggtatatatagtaactatcttgtggataataatattttgaatggtttaggcaaggcgagttttggagagcacgagtggtacttctttagtcctcgggatcggaagtatccaaatggggttaggccaaaccgggcagcaacttccggttattggaaagcaacgggaaccgataaaccgatatttacgtgcaatagtcacaaggttggtgtcaagaaagcgcttgttttttacggtggaaagcctcctaaagggataaaaacagattggatcatgcatgaatatcgcctcactgatggtaaccttagcactgcggctaagccgcctgacttaaccacgacaaggaaaaactcactacgggtatgtgaaaaatgatattaaccaaactcactaagccaccattatacactactattttaatctacaatattgtttcacgtgggaaaatcataccaaaatcttttcttttttgggaaaactcaagatactcttctggttggattaatgcgactgacattattattatatagtttggtgtgttgatttgtaccacaaatcaaaattttgcagctagacgattgggttctatgtaggatctataagaagaatagttcacaaagaccaacaatggagagagtattacttagagaggatctaatggaaggcatgctctcaaaatcatctgctaattcttcttctacatcagtactagacaacaacgacaacaataataacaataacgaagaacactttttcgacggtatggtcgtttcttcagacaaacgttccttgtgtggtcaataccgaatgggccacgaggcctcaggatcatcttcattcggatctttcttatcgagcaagaggtttcatcatacaggtgatctcaacaatgataactacaatgtctcttttgtttcgatgcttagtgagattcctcagagttcggggtttcatgcaaatggtgttatggatacgacgtcgtctctagctgatcatggggttttaagacaggcgtttcagcttcctaacatgaactggcactcataatctatatagatatatatgtgtgtatcatatatgtatctatgcaggcctaatatagtttacacataaatcatctgggaatatatatatacaagtacgcggtcttacaaatgtatacgtatctgtttaattacgtcaagaaaaagtgtatacgtttctttttactcaatggctgcaaagatgtgtactaataacagaagctgattaataaaaaatataaaagtatattttttcc

SEQ ID NO: 14680 - DNA, 644 bp, Arabidopsis thaliana
  Clone ID: LIB24-108-D12_FLI
gtcttaacacaaaacaaagcaaacaccaaaaaaaacagagatgggtttggttacagatgaagtgagagctagggcagagaaatacacaggagatgagatatgccgtgagaagacaaaggagtttctcaaggaagtttctatgcctaatggtttattgccattgaaggacattgaagaagttggttacgacagagagacaggtattgtctggctgaagcagaagaagagcatcacccacaagtttgaagccattggtaaacttgtctcttacgccaccgaggtcattgcacaggtggaggtcggaaagatcaagaagcttaccggtgttaaggccaaggagcttcttatttgggtcactctcaatgagcttgtcttggagcagccgacaagttcagggaagatcaatttcaggacaccaactggtctgtccaggactttcccagtgtctgctttcgttgttcctgaagttgagaagcctgcaacggagaagaacaatggaaccactgaggtcaaagaagctgttgcagtcacagatgcttagtctctctaatcttattaatcttatccttccaatcatgaattactttctgctatttgctgcttaatttccttttatcaataagatgatacaatttcagatttgg

SEQ ID NO: 14681 - DNA, 704 bp, Arabidopsis thaliana
  Clone ID: LIB24-109-B3_FLI
cagaggaggagaagtagaattaatgaaaaaatgaaagctttacaaagtctcatccctaattcaaataagacggataaggcttcaatgcttgatgaagccattgagtatctgaaacagcttcagctccaagttcagatgttgactatgagaaatggaataaacttgcatcctttgtgtttacctggaactacattacacccattgcaactctctcagattcgaccccctgaagcaaccaatgatcctctgcttaatcataccaatcagtttgcttcgacttctaatgcaccggaaatgatcaatactgtggcttcttcatacgctttggaaccttctattcgcagtcactttggacctttccctctccttacttcacccgtggagatgagtcgggaaggtgggttaactcatccaaggttgaacattggtcattccaacgcaaacataaccggggaacaagctctgtttgatggacaacctgacctaaaagatcgaattacttgaacagtgtcccaacttcgggatctctatgtgttcttgtttcttagaacgcaagccataaagctgtctgacaatggagatgcatttaactgtctttattttttctaaggttctatttaaaatcaattgttggtgacacgaattctagagtctaatcttttggatctaatagctatatataaaaaggactgaaattttattac

SEQ ID NO: 14682 - DNA, 995 bp, Arabidopsis thaliana
  Clone ID: LIB24-111-H3_FLI
atcaaatctctctctttctctctctaatggcggcgacattaggcagagaccagtatgtgtacatggcgaagctcgccgagcaggcggagcgttacgaagagatggttcaattcatggaacagctcgttacaggcgctactccagcggaagagctcaccgttgaagagaggaatctcctctctgttgcttacaaaaacgtgatcggatctctacgcgccgcctggaggatcgtgtcttcgattgagcagaaggaagagagtaggaagaacgacgagcacgtgtcgcttgtcaaggattacagatctaaagttgagtctgagctttcttctgtttgctctggaatccttaagctccttgactcgcatctgatcccatctgctggagcgagtgagtctaaggtcttttacttgaagatgaaaggtgattatcatcggtacatggctgagtttaagtctggtgatgagaggaaaactgctgctgaagataccatgctcgcttacaaagcagctcaggatatcgcagctgcggatatggcacctactcatccgataaggcttggtctggccctgaatttctcagtgttctactatgagattctcaattcttcagacaaagcttgtaacatggccaaacaggcttttgaggaggccatagctgagcttgacactctgggagaggaatcctacaaagacagcactctcataatgcagttgctgagggacaatttaaccctttggacctccgatatgcaggagcagatggacgaggcctgaggatctagatgaagggggggagggttgttacgcgatgtttctgccaccaaatcgatctcaaaatccccataacttttgctcaaaaactgtgaaaaaagattgaagtgtttatgatgattatgattgtgcacagcttgatgatttatctactctactaaacctctgtgctcttaatatttattgtctcgactctgctcaagccttaaaaacatctttctcctt

SEQ ID NO: 14683 - DNA, 602 bp, Arabidopsis thaliana
  Clone ID: LIB24-112-B9_FLI
ctgctatcatctgatccccaacccgaacttacgtctacatgtacctctcatagttgcggctggaagccttactctcattccaatgactttgctgccaacgcgttcctccttctcatcatcctcttctgttctttcatatgcgtcctctctctccacgctgctatccgttgttgcctccgtccagtcctccaacatgtccctaagcccgacccggaccttgaggccacccatccagacgctcccccgacacttgtctactccccgggcctaaacctagcaggcaatgaagcagagtgcatcatttgtttgtctgaattccaagacggtgacaccttacgcgtgttggagagatgcaaacatggattccacgtttattgcatccagaagtggctctcctcatcccattcttcttgtcccacttgccggacaaacatcttctcctccccacctcaacttcactcacaaagcttaccactaacgagtacaccttagtcagatggtagctagttcctggtcttgcccactttttttttatctttattttctttacaacttcacaccactatcatgttttacaagttagtttattttttacctttctc

SEQ ID NO: 14684 - DNA, 1722 bp, Arabidopsis thaliana
  Clone ID: LIB24-113-C11_FLI
catactggtcattgattggttaatcagagctctctcttttcttttcctatctctagagactagagaaatggctctctatctctcttcttcacgactcatcacctttctctctttcatcttgcttctctccaatggcttctcgtcctcttcctctcgccctagcatccaccatcgtcaccacctggacaaccacaattacaaagacgctctctccaagtccattctcttcttcgaaggtcaaagatccggaaagcttcctccaaaccagagaatgacttggagaagcaactctggtctctctgatggctctgctctcaacgtggatttggtgggaggatactacgatgcaggggacaatatgaagtttggattcccaatggcattcacaaccacaatgctctcatggagtttaattgagtttggtggtctcatgaaatctgagttaccaaacgcaaaagacgctattcgttgggctactgactttctcctcaaagccacttcacatcctgataccatttatgttcaggttggtgatcctaacatggaccatgcttgttgggagagaccagaagacatggacacaccaagaagtgtgtttaaagtcgacaagaacaatcctggttctgatatcgccggtgaaatcgccgccgctcttgccgctgcttcaattgttttcagaaaatgtgatccttcttactccaatcacctcctccaacgagccattacggtttttacatttgcggacaaatacagaggaccctacagtgcaggtctggccccagaagtttgtccattctactgttcttactctggatatcaggatgaattgttatggggagctgcttggttacaaaaagcaacaaataacccaacatatctcaattacatcaaagctaatggacaaatccttggagctgatgagtttgataacatgtttagttgggataataagcacgttggtgctagaatccttctctccaaggagtttctgattcagaaagtgaagtcacttgaagaatacaaagagcatgctgatagtttcatttgctctgttctacctggagcatcctcttcccaatatacaccaggtgggctattgttcaagatgggtgagagcaacatgcaatacgtgacgtctacatcgttcttgctcttgacctacgccaaatacttaacctctgctcgcaccgtcgcttattgcggtggctccgtcgtcacccctgcccgcctccgctccatcgcaaagaaacaggtggattatctacttggaggcaacccgttgaagatgtcatacatggttggttatggtctgaaatatccacgtcggattcaccaccgtggctcatctctcccctccgttgcagtccacccgaccaggatccagtgccacgacggcttctccttgtttacctctcaatctcctaatcctaacgacctagtcggtgcagtagtcggtggtccggaccagaacgatcaattccctgacgaacggtccgactacggacggtcagagccagcaacttacattaacgctccacttgttggagctttggcttatcttgctcgatcctaaggccaactttaactaagcttaaaccgcatttaattgttggtttacaatgttaattagtagtaatgattttataaatgaatggccaagattgtccgatccggctgaatgaatgttttagatgatgtggtatttgattttaattttctaat

SEQ ID NO: 14685 - DNA, 951 bp, Arabidopsis thaliana
  Clone ID: LIB24-113-E9_FLI
aaagatttagagaaaaaagtgagttattaagagattccaatcaaaatgagcggagacaacggcggtggtgagaggcgcaaaggctccgtcaagtggtttgatacccagaagggtttcggcttcatcactcctgacgacggtggcgacgatctcttcgttcaccagtcctccatcagatctgagggtttccgtagcctcgctgccgaagaagccgtagagttcgaggttgagatcgacaacaacaaccgtcccaaggccatcgatgtttctggacccgacggcgctcccgtccaaggaaacagcggtggtggttcatctggcggacgcggcggtttcggtggaggaagaggaggtggacgcggatctggaggtggatacggcggtggcggtggtggatacggaggaagaggaggtggtggtcgaggaggcagcgactgctacaagtgtggtgagcccggtcacatggcgagagactgttctgaaggcggtggaggttacggaggaggcggcggtggctacggaggtggaggcggatacggcggaggaggtggtggttacggaggtggtggccgtggaggtggtggcggcgggggaagctgctacagctgtggcgagtcgggacatttcgccagggattgcaccagcggtggacgttaaaaccaacgccggttacgcggtggagaagagtgagttggttatctcacaagtgatcggttctttctcccgccgccttctatctctctattatccactttttgcttattatgatggatctctatctttgttagttggttttttcttgatggtttcggattaggactcttcttttggttttgctacttatggttggttttatttctggtacttgtgatatgggtgaaatgctctacttgttgctctgtttcaagtgttcataatatgcgaacaaatattctgggttttgtttcagtc

SEQ ID NO: 14686 - DNA, 663 bp, Arabidopsis thaliana
  Clone ID: LIB24-114-H8_FLI
ggggaaccccttccaggaacagagctgaaagaggtgtggcatttggctgatgtccccaaaaacgacaactttcagtacactcactttgctcacaagataaacagcttcgacacagcgcctgctaagctcttggcttcagactcacgtatccgtcctgatagatattcccttgagcagggtgacctttctaaagctggttccgagaaacacagccttgaggagagacaaagggccgaaaagaggaccagagagacaaagggacaaaagttcactccaagatggttcgatctaacggatgagatcacacctactccatggggagatattgaagtataccaatacaacgggaagtacaatgaacaccgagacacggcagagagctcaagtagtgcctccaacgaaacggacctcaaatcgatcgagtttaatccttggcaatatggtaatatctcaaccgaatgaagtaactcttatagtttaatttgttatctctatatacgaatgctgtgattcatgttcacttgaaagtgagtcccatgttgtttttaactttgtttcagactgaaaaatctgattatgtagtttgagtgataaaacataagttttgtgtttctgtctcattgtatctttgttccatttcgatcaatagtaattatgtttgtt

SEQ ID NO: 14687 - DNA, 1782 bp, Arabidopsis thaliana
  Clone ID: LIB24-116-B6_FLI
gttactcttgtctgaatcttcctcaaatctactcatgtagacctccctatctcgatctaaatttccgccaaactttttttaatcccaaagattctttaaacagaatcatcatcaatcatgaaagagatcaagaagacgatgacgaagcagatgacggcaagacgtgacgacacgccgttacacacggcggttagagaaggcaaaacggaccttcttttggagatgatcggagaacacgacggcgtggagctgaaagagttgttggccgagcaaaaccagtccggtgaaacggctttgtacgttgcggctgagtacggttacaccgacatggttaagattctgatgaaacactccgactctgtcttagccggaaccaaagccaagaacggcttcgatgcctttcacatcgccgccaaaaacggaaatctacaggttcttgatgtgttaatagaggcaaatccagaactctcatttacatttgattcatccaaaaccacggcgcttcataccgcggcttcacagggtcatggagagattgtttgtttcttgttggataaaggtgtggacttagctgctattgcgagaagcaatggtaaaaccgctttgcactctgcagctaggaacgggcacacggtgattgtgaagaagttgattgaaaagaaggctggtatggttacaagagtcgacaagaaaggtcaaaccgctcttcatatggcggttaaaggacaaaacactgagattgtggatgtgttgatggaagcagatggttcgttgatcaattccgcggataataaaggaaacactccattgcatatagcagtccgtaaaaacagagcagagattgttcagacagttttaaagtattgtgaagtcagtagagtggcggttaataaatcaggagaaacagctcttgatatcgctgagaaaaccggactacatgagatcgtaccgcttctgcaaaagatcggtatgcagaacgcaagatccatcaagccagctgaaaaagtggaaccatcaggctcttctaggaaactgaaagaaacagttagtgaaataggccatgaggtgcatactcagcttgaacaaaccgggagaacgagaagagagatccaaggaatcgctaaacgggtcaacaaaatgcacacggaaggactcaacaacgcgataaactccactaccctagtagccattctcatagcaaccgttgcttttgcagctatcttcaacgttccaggccagtacacggacgaccctaaagacgtacctccaggatattcactcggagaagcaagagcagctccaagacccgagttcttgatattcgtcgtgtttgattctttcgcgcttttcatctctttagcggtggttgtggttcagacatcagtggtggttatagagaggagagcaaagaagcaaatgatggctataatcaacaagctcatgtggatggcttgcattatgatctcagtagcgttcgtatcactgtcttttgttgtcgtgggagagaaagagaagcctttggcggttggagtaaccgccattggagctttgatcatggtttcaacactagggactatgtgttattgggtgattgctaaccggattgaaggatctaagtcatctccagcttccatgatgtcagatcctgagttagctgattccaaacataaccggaaactttatgcggtttgattagagtgaaacagaggatttagaaaatcattaaagaacagagagattttgtatccagataataaaagagataactcttgtgtttatagt

SEQ ID NO: 14688 - DNA, 1248 bp, Arabidopsis thaliana
  Clone ID: LIB24-118-C6_FLI
ttattttctctccgacgccgccatgtctctgctctcagatctcgttaacctcaacctcaccgatgccaccgggaaaatcatcgccgaatacatatggatcggtggatctggaatggatatcagaagcaaagccaggacactaccaggaccagtgactgatccatcaaagcttcccaagtggaactacgacggatccagcaccggtcaggctgctggagaagacagtgaagtcattctataccctcaggcaatattcaaggatcccttcaggaaaggcaacaacatcctggtgatgtgtgatgcttacacaccagctggtgatcctattccaaccaacaagaggcacaacgctgctaagatcttcagccaccccgacgttgccaaggaggagccttggtatgggattgagcaagaatacactttgatgcaaaaggatgtgaactggccaattggttggcctgttggtggctaccctggccctcagggaccttactactgtggtgtgggagctgacaaagccattggtcgtgacattgtggatgctcactacaaggcctgtctttacgccggtattggtatttctggtatcaatggagaagtcatgccaggccagtgggagttccaagtcggccctgttgagggtattagttctggtgatcaagtctgggttgctcgataccttctcgagaggatcactgagatctctggtgtaattgtcagcttcgacccgaaaccagtcccgggtgactggaatggagctggagctcactgcaactacagcactaagacaatgagaaacgatggaggattagaagtgatcaagaaagcgatagggaagcttcagctgaaacacaaagaacacattgctgcttacggtgaaggaaacgagcgtcgtctcactggaaagcacgaaaccgcagacatcaacacattctcttggggagtcgcgaaccgtggagcgtcagtgagagtgggacgtgacacagagaaggaaggtaaagggtacttcgaagacagaaggccagcttctaacatggatccttacgttgtcacctccatgatcgctgagacgaccatactcggttgatgacacatttcatgatttgatttctctccaatttggtttttttttttcccttttgattgcacttttcgataataaaaaaataattcttattatgggcgtattgttgtgacattttgtgttttgtttcgaataattaaataagcgcttcttaaggtgaaaat

SEQ ID NO: 14689 - DNA, 1668 bp, Arabidopsis thaliana
  Clone ID: LIB24-119-C8_FLI
ctcacattaatgggtcaaaccttttgctcttccttttgattaatttagtgtttgacaatctcctcctccttctccttcttcttcaaagttttgtcgcagtatctattgttcttacagagagaaaggaaagctttagtcttttaccagtttgatccaattctgggtttcactgaaaaaaaagttgggagtttgattcttctaactgtagaagaaacagagtcaacagaagaaaactaaaaaagttgagatttttctctcacgcgctcaagaacttgagtatgtcttcttctgtagcagtgttatgggttgctacttcttctctaaatccagacccaatgaacaattgtgggttggtaagggttctagaatcttctagactgttctctccttgtcagaatcagagactaaacaaaggtaagaagaagcagataccaacttggagttcttcttttgtaaggaaccgaagtagaagaattggtgttgtgtcttcaagcttagtagcaagtccttctggagagatagctctttcatctgaagagaaggtttacaatgttgtgttgaaacaagctgctttggtgaacaaacagctaaggtcttcttcttatgaccttgatgtgaagaaaccacaagatgttgttcttcctgggagtttgagtttgttgggtgaagcttatgatcgatgcggtgaagtttgcgctgaatatgctaagacgttttatcttggaactttgcttatgacacccgaaaggcgaaaggcgatttgggcaatctacgtttggtgtagaagaactgatgaacttgtggatgggccaaatgcttcacatataactcccatggctttagatagatgggaagcaaggttagaagatcttttccgtggtcgtcctttcgatatgcttgatgctgctctcgctgatacagttgctagatacccggtcgatattcagccatttcgagacatgatcgaaggaatgagaatggacttgaagaaatcgagataccagaacttcgatgatctatacctttactgctactacgtcgctggaaccgtcggattgatgagcgttccggttatgggaatcgatcctaagtcgaaagcaacaaccgaaagtgtttacaacgctgccttggcccttggtatagccaatcagcttactaacatactcagagacgtaggcgaagatgcgagaagaggaagggtttatctgcctcaggatgaattggctcaggctggtctttcagatgaagacatattcgccggaaaagtaactgataaatggagaaacttcatgaaaatgcagcttaaacgagcaagaatgttcttcgacgaagctgagaaaggcgtcaccgagctcagtgccgctagcagatggcctgtatgggcttcattgctattgtacaggagaatactggacgagattgaagcgaatgattacaacaattttactaagagagcttatgtggggaaagtcaagaaaattgcagctttgccattggcttatgctaaatcagtactaaagacttcaagttcaagactatcgatatgagagcgagaggaaagtggaacaaaaacaacctaagagcgctttttgtgattaagaaaaaacttaggctcgaatttattatgttaactaatatatacatattaatggggaagcaaattcttat

SEQ ID NO: 14690 - DNA, 499 bp, Arabidopsis thaliana
  Clone ID: LIB24-121-G6_FLI
ctcaattaaatcttcaaatcgaaaagtttccgaagaaaaattcaggttcctttagaaaatgtcaggtcgtggaaagggaggcaaaggtttgggcaaaggtggagccaaacgtcataggaaggttctgagagacaacatccaaggaatcactaaaccggcgattcggagattggctcgtagaggtggtgttaaacgtattagtggtttgatctacgaggagacacgtggcgttctcaagatctttttggaaaatgttatccgtgacgccgttacttacactgagcacgctcggaggaagacggtgactgctatggatgttgtttatgctcttaagagacaaggaagaactctctatggattcggtggttgaggattttagtgttttagagtgttgtctaggatttgctttagtgatttcattttggaatttcagatcgatttgtattcgcgtttgcgttgtaatgttgttccggataaatattcacggttgcgttttgat

SEQ ID NO: 14691 - DNA, 619 bp, Arabidopsis thaliana
  Clone ID: LIB24-125-F5_FLI
aaaaaactcactccctagaaaagtttgaaaatggcgaaggcagataagaaaccagcggagaagaaaccggcagagaaaactccggcagccgaaccagcagcagcggcagagaagaaaccaaaagccggaaagaaactcccgaaggaaccagccggcgccggagacaagaagaagaagagatcaaagaagaacgttgagacatacaagatctacatcttcaaggtgttgaagcaagttcatccagatatcggaatctccagcaaagccatgggaatcatgaacagtttcatcaatgatatctttgagaaacttgctggtgagtcttcgaagcttgcgaggtacaacaagaagccgacgattacttctagggagattcagactgcggtgagacttgtgttgcctggagagttggcgaaacatgctgtttctgaagggactaaggcggttacgaagtttacgagttcttagatttggaatgtggttttgtaatggaggagaagtagtagtagtagttggaatgtgaaatagggtttatgcttttgggtatctttgagggttatgtaatatgggaattagggttttaatttatggcacggctatgaaatctacttaattttcc

SEQ ID NO: 14692 - DNA, 1113 bp, Arabidopsis thaliana
  Clone ID: LIB24-126-E2_FLI
ccgaaaggaagtagccgcgtttcttgattctcccattgtcgaagacgaagaaggcgaagaaagagaagaggaagaagaaggaggtatcgtttcaaatgccaactttacgtttgagtttgatccatacatgatgagcaaagccgaatcagtgaacaaagctctagaagaagcaattccagtcggagagccactcaagattcatgaagccatgcgatacgcgattcttgcggctggaaaacgtgttaggccaatactctgccttgcttcttgcgagctagtaggtggccaagaaaatgcggcaatgcccgccgcttgtgcggttgagatgatccacacgatgtctctaatcaaagacgatttgccttgtatggacaacgacgatttgcgtcgtggaaagcccacgacgcacaaagtctacggcgaaggagttgccattctctctggtggggctctcttgtctcttgcctttgagcacatgaccaccgctgaaatatcctcggagagaatggtttgggcggtgagagaattggctaggtctattgggacaagaggtttagtcgcgggacaagcgatggatataagcagtgaaggtttggacttaaacgaggtcggattagagcatttggagtttatccatgttcataaaaccgcggttttgttggaaactgccgcggttcttggcgccataattggtggtggatctgatgaagagattgaaagtgtgagaaagtttgcaaggtgcattggattgttgtttcaggtggtggatgatattttggacgagacgaagtcgtcggaggaattgggaaaaaccgccgggaaagatcagctcgccggaaagctaacgtatccaaagttgatagggttggagaaatcgaaagaatttgttaagagattgacgaaagatgcacggcaacatcttcaagggtttagttctgaaaaggttgctcctttagtagctcttactacttttattgctaatagaaataagtgattatatatttgttttgtttgtgtgtgttgggtttatgtatacatgctaaagtagtgtggtcccttatttttaagtgtaaccacattttaagatgtttattaatgaatatttaaaaatgt

SEQ ID NO: 14693 - DNA, 1468 bp, Arabidopsis thaliana
  Clone ID: LIB24-131-F9_FLI
ctcactttcatcagccgttttgaatctccggcgacttgacagagaagaacaaggaagaagactaagagagaaagtaagagataatccaggagattcattctccgttttgaatcttcctcaatctcatcttcttccgctctttctttccaagctcataaaaaatggctgaggctgatgatattcaaccaatcgtgtgtgacaatggtaccggtatggtgaaggctggatttgcaggagatgatgctcccagggctgtttttcccagtgttgttggtaggccaagacatcatggtgtcatggttgggatgaaccagaaggatgcatatgttggtgatgaagcacaatccaagagaggtattcttaccttgaagtatcctattgagcatggtgttgttagcaactgggatgatatggaaaagatctggcatcacactttctacaatgagcttcgtattgctcctgaagagcaccctgttcttcttaccgaggctcctcttaacccaaaggccaacagagagaagatgactcaaatcatgtttgagacctttaactctcccgctatgtatgtcgccatccaagctgttctctccttgtacgccagtggtcgtacaaccggtattgtgctggattctggtgatggtgtgtctcacactgtgccaatctacgagggtttctctcttcctcatgccatcctccgtcttgaccttgctggacgtgaccttactgattacctcatgaagatccttacagagagaggttacatgttcaccacaacagcagagcgggaaattgtaagagacatcaaggagaagctctcctttgttgctgttgactacgagcaggagatggaaacctcaaagaccagctcttccatcgagaagaactatgaattacccgatgggcaagtcatcacgattggtgctgagagattcagatgcccagaagtcttgttccagccctcgtttgtgggaatggaagctgctggaatccacgagacaacctataactcaatcatgaagtgtgatgtggatatcaggaaggatctgtacggtaacattgtgctcagtggtggaaccactatgttctcaggtatcgctgaccgtatgagcaaagaaatcacagcacttgcaccaagcagcatgaagattaaggtcgttgcaccacctgaaaggaagtacagtgtctggatcggtggttccattcttgcttccctcagcacattccagcagatgtggatctccaaggccgagtatgatgaggcaggtccaggaatcgttcacagaaaatgtttctaagctctcaagatcaaaggcttaaaaagctggggttttatgaatgggatcaaagtttctttttttcttttatatttgcttctccatttgtttgtttcatttccctttttgttttcgtttctatgatgcacttgtgtgtgacaaactctctgggtttttacttacgtctgcgtttc

SEQ ID NO: 14694 - DNA, 1498 bp, Arabidopsis thaliana
  Clone ID: LIB24-131-G1_FLI
tctcgcagctcttctctattttcagcaatcgcctataatattaggtaaagctaaaagggtctgattcgtttgttttttcactgaagaatttggaaggaagtgattccgttgtgaaacagaaaagaagtatgggtactcacattgatatcaacaacttaggcggcgatacttctagagggaatgagtcaaagccattggcgaggcagtcttcgttatattccttaacgtttgatgagcttcagagcacattaggtgagccggggaaagattttgggtctatgaatatggatgagttactcaagaacatatggactgctgaggatactcaagcctttatgactactacatcttcggttgcagccccgggacctagtggttttgttccgggaggaaatggtttacagaggcaaggctccttgaccttgcctagaacgcttagtcagaagactgtcgatgaagtctggaaatacctgaattcgaaagaaggtagtaatgggaatactggaacggatgcgcttgagaggcaacagactttaggggaaatgactctggaagatttcttactccgtgctggcgttgttaaagaagataatactcagcagaacgaaaacagtagtagcgggttttatgctaacaacggtgctgctggtttggagtttggatttggtcagccgaatcaaaacagcatatcgttcaacgggaacaatagttctatgatcatgaatcaagcacctggtttaggcctcaaagttggtggaaccatgcagcagcagcagcagccacatcagcagcagttgcagcagccacatcagagactgcctccaactatctttccaaaacaagcgaatgtaacatttgcggcgcctgtaaatatggtcaacaggggtttatttgagactagcgcagatggtccagccaacagtaatatgggaggagcagggggtactgttacagctacttctcctgggacgagcagtgcagaaaacaatacttggtcatcaccagttccttacgtgtttggtcggggaagaagaagcaatacgggcctggagaaggttgttgagagaaggcaaaagagaatgatcaagaatcgggaatccgctgctagatcaagggctcgaaaacaggcttataccttggaactggaagctgagattgaaagtctcaagctagtgaatcaagatttgcagaagaaacaggctgaaataatgaaaacccataatagtgagctaaaggaattttcgaagcagcctccattgctggccaaaagacaatgcttgagaagaacccttaccggtccgtggtaagaaggtgaagtcaaagcaagaagaacctgctaatgtaatacaggaccactcaaaaggaagacactgggagagtaatatgtaatagaagatagtgctactgtacaggagaaattacagagacgcttacaatgtagaaatcttttgagctgaatttaactaagagtgcagtctgtgtagagtaaaaaaaaaag

SEQ ID NO: 14695 - DNA, 388 bp, Arabidopsis thaliana
  Clone ID: LIB24-131-G6_FLI
gcgggtgagaagaacgcgaataagtgatcggattaggaggctgcaagagcttgttcctaacatggataagcaaaccaacactgcagacatgttggaagaagctgtggagtatgtgaaggctcttcaaagccagatccaggaattgacagagcagcagaagagatgcaaatgcaaacctaaagaagaacaataatgtatcctttaggatttgatatatctgtattttatttttgtactatctaaaaatggtgatgatctgttcgaaaattcgaaacatgatcttatatattgaactagaaaaaatagatatatatgaattttagctgtaaaatttttgtacaataaggagaaaaagatttagaagagtcaataaaaagatgatgtttac

SEQ ID NO: 14696 - DNA, 1375 bp, Arabidopsis thaliana
  Clone ID: LIB24-134-B9_FLI
ctccattcataattttgactccactttccaaaaaaaacaaaaaaaaataaatactaatataaaaaattctcaaatctaaaatttcagatttcagaaatcgccatggcttcagtgactctaggttcatggattgttgttcaccaccacaatcatcatcatccatcttcaatccttaccaaatccagatccagatcttgtcctataactcttactaaacccatctcctttcgatcaaaacgcaccgtttcatcatcttcttcaatcgtttcttcttccgttgttacaaaagaagacaatctacgccaatctgaaccatcctctttcgatttcatgtcgtacatcatcaccaaagccgaattagtcaacaaagctttagattcagctgttcctctccgtgagccactcaagatccacgaagcgatgcgttactctcttctcgccggtggcaaaagagttagaccagttctctgcatcgctgcttgtgaactcgtcggaggtgaagaatcaaccgctatgccagcagcttgcgccgtcgagatgattcacaccatgtcgttgatccacgacgatctcccttgtatggataacgacgatctccgccgtggaaaaccgaccaaccacaaagtgtttggtgaagacgtcgctgttttagccggagacgcgcttctctctttcgctttcgagcatttagcttcggcgacgagttctgatgttgtttctccggtgagagtggttcgagccgttggagaattggctaaagcgataggaacagaagggttagtggcgggtcaagtcgtggatattagtagtgaagggttagatttaaacgacgtcggtttagagcatttggagtttatccatttgcataaaacggcggcgttgcttgaagcttctgctgttttgggagctattgttggtggaggaagtgatgatgagattgagaggttaagaaagtttgcgagatgtattggtttgttgtttcaggtggttgatgatatcttggatgtgacgaaatcgtcgaaagagttagggaaaactgctgggaaagatttgattgctgataagttgacgtatcctaagattatgggtttggagaaatcgagagagtttgctgagaaattgaatagagaggctcgtgatcagcttttagggtttgattctgataaggttgctcctttgttggctttggctaattacattgcctatagacagaactgatttgtgttcgattccttttgtcgggaatcattattagattggaattgtagaaatctcggacaggttctctagagtttgttggtgtaatcatctctatgttttcatgtactaaaaaatttggatagtaatggatgaaatatgaagaggttcatgtgtc

SEQ ID NO: 14697 - DNA, 1349 bp, Arabidopsis thaliana
  Clone ID: LIB24-134-C12_FLI
ctgtttctttacttttttataagtctcaggttcaattttttcggattcaaatttttattttaaatggcagctgctatgaatttgtacacttgtagcagatcgtttcaagactctggtggtgaactcatggacgcgcttgtaccttttatcaaaagcgtttccgattctccttcttcttcttctgcagcgtctgcgtctgcgtttcttcacccctctgcgttttctctccctcctctccccggttattacccggattcaacgttcttgacccaaccgttttcatacgggtcggatcttcaacaaaccgggtcattaatcggactcaacaacctctcttcttctcagatccaccagatccagtctcagatccatcatcctcttcctccgacgcatcacaacaacaacaactctttctcgaatcttctcagcccaaagccgttactgatgaagcaatctggagtcgctggatcttgtttcgcttacggttcaggtgttccttcgaagccgacgaagctttacagaggtgtgaggcaacgtcactggggaaaatgggtggctgagatccgtttgccgagaaatcggactcgtctctggcttgggacttttgacacggcggaggaagctgcgttggcctatgataaggcggcgtacaagctgcgcggcgatttcgcccggcttaacttccctaacctacgtcataacggatctcacatcggaggcgatttcggtgaatataaacctcttcactcctcagtcgacgctaagcttgaagctatttgtaaaagcatggcggagactcagaaacaggacaaatcgacgaaatcatcgaagaaacgtgagaagaaggtttcgtcgccagatctatcggagaaagtgaaggcggaggagaattcggtttcgatcggtggatctccaccggtgacggagtttgaagagtccaccgctggatcttcgccgttgtcggacttgacgttcgctgacccggaggagccgccgcagtggaacgagacgttctcgttggagaagtatccgtcgtacgagatcgattgggattcgattctagcttaggggcaaaataggaaattcagccgcttgcaatggagtttttgtgaaattgcatgactggcccaagagtaattaattaaatatggattagtgttaaatttcgtatgttaatatttgtattatggtttgtattagtctctctgtgtcggtccagcttgcggttttttgtcaggctcgaccatgccacagttttcattttatgtaatctttttttcttttgtcttatgtaatttgtagcttcagtttcttcatctataatgcaattttattatgattatgtaaac

SEQ ID NO: 14698 - DNA, 766 bp, Arabidopsis thaliana
  Clone ID: LIB24-135-G8_FLI
gcgattaaacctactcaatctcagatctcgttaaacctagaaacctcgagaaaaaccgtatcaatggcgccgaaagcagagaagaagcccgctgagaagaaaccagcttccgagaagccggtggaggagaaatcaaaagccgagaaagctccggcggagaagaaaccaaaggccggaaagaagctcccgaaggaagctggtgccggaggcgacaagaagaaaaagatgaagaagaagagtgtcgagacttacaagatctacatcttcaaggtgcttaagcaagttcatcccgatatcggaatctccagcaaagcgatggggatcatgaacagtttcattaacgatatcttcgagaagcttgctcaagaggcgtcgaagcttgcgaggtacaataagaaacctacgatcacttctcgggagattcagactgctgtgagattggtgcttcctggagagttggcgaagcatgccgtttctgaggggactaaagccgtcacgaaattcaccagctcttgaataattgagttagggttcttatcatatggatgttgctctgctttagggttaatggaatttggaagatctgagttagggttttagaatgtcctttaagtatctctgtttcgtttggaatttctacgttttgtaagtactgctgctattgataatgtttggagtctatatttgctctttgtgtcccaatcctgtcgtattgagagttgctcgttgttttactcgtattcaatctttgccttgcagaaaaaag

SEQ ID NO: 14699 - DNA, 1207 bp, Arabidopsis thaliana
  Clone ID: LIB24-135-H4_FLI
gggaaatcgatggccgagagaagaaactttagctcttcttcggatccgatccgatatggattctacttttcgtgatgctactctcaaagctcctctttgggaacatgtttccaggaagctattggagttaggttacaaacgaagttcaaagaaatgcaaagagaaattcgaaaacgttcagaaatattacaaacgtactaaagaaactcgcggtggtcgtcatgatggtaaagcttacaagttcttctctcagcttgaagctctcaacactactcctccttctcatcctcacgctcatcaaccagaacagaaacaacaacaacaaccacaacaagagatggtcatgagctcggaacaatcatcattaccatcatcatcaagatggccaaaggcagagattctagcgcttataaacctgagaagtggaatggaaccaaggtaccaagataatgtacctaaaggacttctatgggaagagatctcaacttcaatgaagagaatgggatacaacagaaacgctaagagatgtaaagagaaatgggaaaacataaacaaatactacaagaaagttaaagaaagcaacaagaaacgtcctcaagatgctaagacttgtccttactttcaccgcctcgatcttctttaccgcaacaaagtactcggtagtggcggtggttctagcacttctggtctacctcaagaccaaaaacagagtccggtcactgcgatgaaaccgccacaagaaggacttgttaatgttcaacaaactcatgggtcagcttcaactgaggaagaagagcctatagaggaaagtccacaaggaacagaaaagccagaagaccttgtgatgagagagctgattcaacaacaacagcaactacaacaacaagaatcaatgataggtgagtatgaaaagattgaagagtctcacaattataataacatggaggaagaggaagatcaggaaatggatgaggaagaactagacgaggatgagaagtccgcggctttcgagattgcgtttcaaagccctgcaaacagaggaggcaatggccatacggaaccacctttcttgacaatggttcagtaaaatcagaatcattggttcaagaaaatgtacttatgtgtgcatagttttctaaacaaaacacccaaaaacacaaaacacaaacacacacacacacacatctgacaccacaaactgaaatat

SEQ ID NO: 14700 - DNA, 637 bp, Arabidopsis thaliana
  Clone ID: LIB24-136-F6_FLI
ggtctcaacaatcaaaagcttcaaatttttcattgtcaagaattctcaaaatggctagaacaaagcaaacagctagaaaatccaccggaggaaaagctcctagaaagcaactggcgacgaaagcagcaaggaaatcagctccagccaccggaggagtgaagaagccacacagattccgtccaggaacagtagcgttacgtgaaatcagaaagtatcaaaaaagcacagagcttttgatccgtaagcttcctttccagagattggttcgtgagatagctcaagatttcaagacggatcttaggtttcagagtagtgcagtcgcagctcttcaagaagcagctgaagcttatttggttggattgtttgaagatactaatctttgtgctattcatgctaagagggttacgattatgcctaaggatattcaacttgcgaggaggattagaggtgagagggcttaagatttgaagaagatgaagaagaaaaacaatggtctagtgtagatttgcttgtttgctctcataagatttgtagattcatgttttagatttggttttgagttttcttagtcttttgttctgaagtgtcttccagatgttcgatgaaatgcccaaatgaaaatttaatctacttttgc

SEQ ID NO: 14701 - DNA, 632 bp, Arabidopsis thaliana
  Clone ID: LIB25-001-A9_FLI
ttcaaactggccggcacatgatttgcatcagggcattggaatggattgggattcgatcaacgatttgagggttgacatgggtagaatacagcaaaggatggataacctgcagaggatgctagaggcttgcatggaaatgcaactcgagttacaacggtccataagacaagaggtctctgctgcgatgcaccgctctactgaccaaccaggtccatccaaggacactgcgagttacgagtcaaaatgggaatatgtaaggaaagggatctgctgcgtatgctgcgagagcaatattgactctttattgtatagatgtggacatatgaacacctgcgagaagtgtgcaaagaagctagtggaagcgggaggaaaatgtcccatgtgtcaagcccctgtgattgaggtagttcgtgcttactctattctttgaaactcttgtgctctcctacggctccaagctctgcttatttgattctgggttttacagatatcaaatgtctttgattgtgatgtttttagcatagatatttactctgattcactcggctcttaattttatccgtggtgtaagaaagacaaacacacacttcttaactatttttatacacatgaaacatcaaaagattcaatag

SEQ ID NO: 14702 - DNA, 952 bp, Arabidopsis thaliana
  Clone ID: LIB25-001-G12_FLI
gttcccatcctcacttctctttctttctgatcataattaatcttgctaagccagctagggcttatagaaatggagggtggtgcgagtaatgaagtagcagagagcagcaagaagatagggagagggaagatagagataaagaggatagagaacactacgaatcgtcaagtcactttctgcaaacgacgcaatggtttactcaagaaagcttatgagctctctgtcttgtgtgacgctgaggttgctcttgtcatcttctccactcgaggccgtctctacgagtacgccaacaacagtgtgagaggaacaatagaaaggtacaagaaagcttgctccgacgccgttaaccctccgaccatcaccgaagctaatactcagtactatcagcaagaggcgtctaaactccggagacagattcgggacattcagaatttgaacagacacattcttggtgaatctcttggttccttgaactttaaggaactcaagaaccttgaaagtaggcttgagaaaggaatcagtcgtgtccgatccaagaagcacgagatgttagttgcagagattgaatacatgcaaaaaagggaaatcgagctgcaaaacgataacatgtatctccgctccaagattactgaaagaacaggtctacagcaacaagaatcgagtgtgatacatcaagggacagtttacgagtcgggtgttacttcttctcaccagtcggggcagtataaccggaattatattgcggttaaccttcttgaaccgaatcagaattcctccaaccaagaccaaccacctctgcaacttgtttgattcagtctaacataagcttctttcctcagcctgagatcgatcttatgcatatatatattcatgttacacttactgtcaaaaaacttaaaatgcagatggtaacgatttgagagggacctaataatttacatatatcttgatt

SEQ ID NO: 14703 - DNA, 1274 bp, Arabidopsis thaliana
  Clone ID: LIB25-003-F12_FLI
ccaaaacaaagctcaatcatggctagtcggagagaagtacggtgccggtgcggcagacggatgtgggttcaaccagacgcccgtaccgtccaatgctcaacctgccacaccgtcacgcagctctactcgctagtggacatagctcgcggtgcaaaccgcataattcatgggtttcaacagctacttagacaacaccaaccgcaacatcatgaacaacaacaacaacaaatgatggctcaaccgccaccacggctgcttgagcctcttccctcgccgtttgggaagaagagagcagttttatgcggcgtgaactataagggaaaaagttatagcttgaaaggttgcatcagtgatgctaagtccatgagatctttattggttcaacaaatgggtttccctattgactctattctcatgctcacagaagatgaagccagcccgcagagaataccgacgaagagaaacattaggaaggcgatgagatggttagttgaagggaacagagcaagggactcactagtgttccatttctctggtcatggatctcagcagaatgactacaacggagacgagatcgatggtcaagatgaagccttgtgccctttagaccatgaaacagaaggaaaaatcattgatgacgagattaaccggatactcgtgaggcctctcgtccatggagctaagcttcacgctgtcatcgacgcctgtaacagcgggactgtccttgatttacccttcatttgcaggatggagaggaatggttcttatgaatgggaagaccatagatcagtcagagcttacaaaggaacagatggtggagcagctttctgtttcagtgcttgtgacgatgatgaatccagtggttacactcctgtgttcacggggaagaacacaggagccatgacttatagcttcataaaggcggtgaagacagctggaccagcacccacgtatggccacctgcttaaccttatgtgttctgcaatacgagaggcccagtctcgcctcgcctttaacggggactacacaagctctgatgcatccgcggagccactgctaacatcatctgaggaatttgacgtgtacgcgacaaagtttgtactctgaatgctgtacatatgatgctgcaaatagctcggaaacgtttctatgtgtatgtatcatgtaatgattatgttgcatagcctctctcttcttacgagcaataaagctatgaaataattgattcgctaagaaatttaaaatgaaatgaaatgtgtggaaagtttcacagg

SEQ ID NO: 14704 - DNA, 1186 bp, Arabidopsis thaliana
  Clone ID: LIB25-007-H7_FLI
gttcaacatttggcggagtcaaagaaacagagtgattctctgatccgattccggcgaaagaggacgaaacaaacggaacttgttcatcatcttctccagaaatgacgtcgtttcaggtgatgcgttcttcaaattcgagaaactcggatctatctcgtcgcatctcttctgcttctacttcttcttcgtctataagacctcaacaacagttccggcgagatctaacaagtgtcggttacggcggaagaaacgacggattatacagttcaaattcgatgacggtcgaagggattttacacgatactttcgcatcagatccaccagcaccaacggaatcttcactcttagatgcgtcgataaatctgatggatgcttctccagcaccaatggagataacaacaacgacggcttctgatgttgtggatcacggcggaggaacggagacgacgcgtggtgggaagagtgttgatgagatttggagagagatggtatcaggagaaggtaaagggatgaaggaagagacgtcggaagagataatgacgttagaggattttctagcgaaagctgcggtggaagacgaaacagcggtgacggcgtcggcggaggatttggatgtgaagattccggtgacgaattacggattcgatcattctgcaccgccgcataatccgtttcagatgattgataaagtagaaggatcaatagttgcgtttgggaatggtttagatgtttacggaggaggagctagagggaagagagcgagagtgatggttgagccattggataaagcagctgcacagagacagagaaggatgattaagaatcgtgaatctgcagctaggtctagagagaggaaacaagcttatcaagttgagttagaagctttggctgcgaagcttgaggaagagaatgagttgctttctaaggagattgaagataagaggaaagagagataccagaagttgatggagtttgtgattcctgttgttgagaaaccgaagcagcagccaccacggtttttacgcaggattcggtctttggaatggtgataagaggtatagacttttgaggattttagggtcttaatgttacttactttgtgtatgtgtgtgtgagagttgattcataatctgcagtagagtgtaatgattatggttaataacttatatattatattagattgcat

SEQ ID NO: 14705 - DNA, 1443 bp, Arabidopsis thaliana
  Clone ID: LIB25-009-A9_FLI
agcagagttggtgaaatcaatgggccaccaaaacgccgccgtttcagagaatcaaaaccatgatgacggcgctgcgtcgtcgccgggattcaagctcgtcggattttccaagttcgtaagaaagaatccaaagtctgataaattcaaggttaagcgcttccatcacatcgagttctggtgcggcgacgcaaccaacgtcgctcgtcgcttctcctggggtctggggatgagattctccgccaaatccgatctttccaccggaaacatggttcacgcctcttacctactcacctccggtgacctccgattccttttcactgctccttactctccgtctctctccgccggagagattaaaccgacaaccacagcttctatcccaagtttcgatcacggctcttgtcgttccttcttctcttcacatggtctcggtgttagagccgttgcgattgaagtagaagacgcagagtcagctttctccatcagtgtagctaatggcgctattccttcgtcgcctcctatcgtcctcaatgaagcagttacgatcgctgaggttaaactatacggcgatgttgttctccgatatgttagttacaaagcagaagataccgaaaaatccgaattcttgccagggttcgagcgtgtagaggatgcgtcgtcgttcccattggattatggtatccggcggcttgaccacgccgtgggaaacgttcctgagcttggtccggctttaacttatgtagcggggttcactggttttcaccaattcgcagagttcacagcagacgacgttggaaccgccgagagcggtttaaattcagcggtcctggctagcaatgatgaaatggttcttctaccgattaacgagccagtgcacggaacaaagaggaagagtcagattcagacgtatttggaacataacgaaggcgcagggctacaacatctggctctgatgagtgaagacatattcaggaccctgagagagatgaggaagaggagcagtattggaggattcgacttcatgccttctcctccgcctacttactaccagaatctcaagaaacgggtcggcgacgtgctcagcgatgatcagatcaaggagtgtgaggaattagggattcttgtagacagagatgatcaagggacgttgcttcaaatcttcacaaaaccactaggtgacaggccgacgatatttatagagataatccagagagtaggatgcatgatgaaagatgaggaagggaaggcttaccagagtggaggatgtggtggttttggcaaaggcaatttctctgagctcttcaagtccattgaagaatacgaaaagactcttgaagccaaacagttagtgggatgaacaagaagaagaaccaactaaaggattgtgtaattaatgtaaaactgttttatcttatcaaaacaatgttatacaacatctcattt

SEQ ID NO: 14706 - DNA, 1205 bp, Arabidopsis thaliana
  Clone ID: LIB25-021-F6_FLI
agctagtaccttttgttcttgaaattagggttaatttcttttttccaaataccatcaattctccagaccataaaaactcaaaaagatcagatctttcctctgaaaaagagatacccaacttatgtttttgtgtgtctgtatatagataaacattacatacccatatttgtgtatagacataaaaagtggaaattaaggtaacaaaaagaaatgggaagaggaagagtagagctgaagaggatagagaacaaaatcaacagacaagtaacgtttgcaaagcgtaggaacggtttgttgaagaaagcttatgaattgtctgttctctgtgatgctgaagttgctctcatcatcttctccaaccgtggaaagctctatgagttttgcagctcctcaaacatgctcaagacacttgatcggtaccagaaatgcagctatggatccattgaagtcaacaacaaacctgccaaagaacttgagaacagctacagagaatatctgaagcttaagggtagatatgagaaccttcaacgtcaacagagaaatcttcttggggaggatttaggacctttgaattcaaaggagttagagcagcttgagcgtcaactggacggctctctcaagcaagttcggtccatcaagacacagtacatgcttgaccagctctcggatcttcaaaataaagagcaaatgttgcttgaaaccaatagagctttggcaatgaagctggatgatatgattggtgtgagaagtcatcatatgggaggaggaggaggatgggaaggtggtgaacagaatgttacctacgcgcatcatcaagctcagtctcagggactataccagcctcttgaatgcaatccaactctgcaaatggggtatgataatccggtatgctcagagcaaataactgcgacaacccaagctcaggcgcagcagggaaacggttacatcccggggtggatgctctgagagtcatgtgctgtgttaaagctcaccaacaaaagatcttttatatatataaaagtatagacacaagactttggatttgtagacataagtggctatatataatggtcctgaggatcttcaagacatttgtatcttttgggaatccttgcttatattaagaattcaaatgtgtggaacttgttttaacactgaaccatgacactggtttattatcatgtaatgagaaacatttgggttcc

SEQ ID NO: 14707 - DNA, 760 bp, Arabidopsis thaliana
  Clone ID: LIB25-022-H12_FLI
tcaacttccttttcccgagaaaatcagaaagaaaattcacgatggcaccaagagccgagaagaagcccgccgagaaaaaaaccgccgctgagagaccggtggaagagaacaaggctgctgaaaaggctccggcggagaagaaacccaaggcggggaagaaattgccaccaaaggaagccggtgacaagaagaagaagcgatctaagaaaaacgtcgaaacctacaagatctacatcttcaaggtgctgaagcaggttcatccagatatcggaatttcaagcaaagccatggggattatgaacagtttcatcaacgacatattcgagaagctagctcaggaatcttcgaaactcgctaggtacaacaagaagccgaccattacatctcgcgagatccagacggctgtgagactcgtcctccccggtgaactcgctaaacacgccgtctctgaaggtaccaaggcggttaccaagtttactagctcttgaagagacccggttagggtttttagggatttcaatttcggtttggtttttagtacttgtaggaaattagatgcattattcgcttaacttcgtattttgtggctttgtaactctaggaagtagagaagattgttccttccttttatgaatttcaatgttggattatatatttttaacgatttttttttccatttcaatttcatttacctaatcactatattgaaatgtgtctctattgaagtatatgttatatgtgtgtgtttatattatttgat

SEQ ID NO: 14708 - DNA, 504 bp, Arabidopsis thaliana
  Clone ID: LIB25-024-C1_FLI
aaacgataatgggaagcgcaccagctcagattccgactagcttcggccatgagcttagggcttgtcttcgttgccgactcgtcaagacctatgaccagtttagagacgctggttgcgagaattgtcctttcttcaagatggaagaggatcatgagcgtatcgtggaggtcactacccctaatttcaatggtataatctctgtgatggatccaagtagaagctgggcggctaggtggttaagaatcgggaagtttgctcctggttgctacacacttgctgtctcagagccactccctgaggaaatgcagcacttatgccaagaggagcgtgtacaatatgttctgccgaaacgcatgtgaagaaatctatcacgatgaaggctagtagggaagaccaagtattccactttttcattaaaagcttcttgaaacattattaggtgctttatttgaatcttcaatcttgtggaatggtcgatgttaatgaagtcagagactccttaac

SEQ ID NO: 14709 - DNA, 1677 bp, Arabidopsis thaliana
  Clone ID: LIB25-024-G1_FLI
ttttgacaaagccccccaaaaaaaaaaagagttcaaaatgaaaaacgtgagaaatggatttgtcatcattcttctcaccgtccttagtctctgaaaataaattctgattttgatttcgaattttagggattttgagagagagtcagttatgagtagttcggagagagtaccgtgcgatttctgcggcgagcgtacggcggttttgttttgtagagccgatacggcgaagctgtgtttgccttgtgatcagcaagttcacacggcgaatctgttgtcgaggaagcacgtgcgatctcagatctgcgataattgcggtaacgagccagtctctgttcggtgtttcaccgataatctgattttgtgtcaggagtgtgattgggatgttcacggaagttgttcagtttccgatgctcatgttcgatccgccgtggaaggtttttccggttgtccatcggcgttggagcttgctgctttatggggacttgatttggagcaagggaggaaagatgaagagaatcaagttccgatgatggcgatgatgatggataatttcgggatgcagttggattcttgggttttgggatctaatgaattgattgttcccagcgatacgacgtttaagaagcgtggatcttgtggatctagttgtgggaggtataagcaggtattgtgtaagcagcttgaggagttgcttaagagtggtgttgtcggtggtgatggcgatgatggtgatcgtgaccgtgattgtgaccgtgagggtgcttgtgatggagatggagatggagaagcaggagaggggcttatggttccggagatgtcagagagattgaaatggtcaagagatgttgaggagatcaatggtggcggaggaggaggagttaaccagcagtggaatgctactactactaatcctagtggtggccagagttctcagatatgggattttaacttgggacagtcacggggacctgaggatacgagtcgagtggaagctgcatatgtagggaaaggtgctgcttcttcattcacaatcaacaattttgttgaccatatgaatgaaacttgttccactaatgtgaaaggtgtcaaagagattaaaaaggatgactacaagcgatcaacttcaggccaggtacaaccaacaaaatctgagagcaacaatcgtccaattacctttggctctgagaaaggttcgaactcctccagtgacttgcatttcacagagcatattgctggaactagttgtaagaccacaagactagttgcaactaaggctgatctggagcggctggctcagaacagaggagatgcaatgcagcgttacaaggaaaagaggaagacacggagatatgataagaccataaggtatgaatcgaggaaggcaagagctgacactaggttgcgtgtcagaggcagatttgtgaaagctagtgaagctccttacccttaaccttaagtctcttcacataggcttccttttagctacaaacttagttactttttttacttccactgcctcataaatgtacagaccggtctcgtttcatctggccgcccttctgttttattgccttatctggcccttttatgtaccttggaatcttatctagtttaaaaaagattgtaaccttctagaaaaccatattctgttgacagtatatacatgtctatccaagc

SEQ ID NO: 14710 - DNA, 937 bp, Arabidopsis thaliana
  Clone ID: LIB25-027-A1_FLI
ctctctctttctctctctaatggcggcgacattaggcagagaccagtatgtgtacatggcgaagctcgccgagcaggcggagcgttacgaagagatggttcaattcatggaacagctcgttacaggcgctactccagcggaagagctcaccgttgaagagaggaatctcctctctgttgcttacaaaaacgtgatcggatctctacgcgccgcctggaggatcgtgtcttcgattgagcagaaggaagagagtaggaagaacgacgagcacgtgtcgcttgtcaaggattacagatctaaagttgagtctgagctttcttctgtttgctctggaatccttaagctccttgactcgcatctgatcccatctgctggagcgagtgagtctaaggtcttttacttgaagatgaaaggtgattatcatcggtacatggctgagtttaagtctggtgatgagaggaaaactgctgctgaagataccatgctcgcttacaaagcagctcaggatatcgcagctgcggatatggcacctactcatccgataaggcttggtctggccctgaatttctcagtgttctactatgagattctcaattcttcagacaagcttgtaacatggccaaacaggcttttgaggaggccatagctgagcttgacactctgggagaggaatcctacaaagacagcactctcataatgcagttgctgagggacaatttaaccctttggacctccgatatgcaggagcagatggacgaggcctgaggatctagatgaagggggggagggttgttacgcgatgtttctgccaccaaatcgatctcaaaatccccataacctttgctcaaaaactgtgaaaaaagattgaagtgtttatgatgattatgattgtgcacagcttgatgatttatctactctactaaacctctgtgctctt

SEQ ID NO: 14711 - DNA, 355 bp, Arabidopsis thaliana
  Clone ID: LIB25-027-A10_FLI
gaaaagagtggctgtctgaaatgattttggccggaaagagattctgtggagaagaatggtcaaaattgaaagtgaaatatccaacatttaaggacgagaatttgcttcggtattgcttctcatcagcatatattatctcaatgcttcatgatagtcttggtgttgctcttgatgatgaaagaatcaagtatgcaagtaaagcaggagaagaagacataccactagattgggcattgggtgcttttatccttaatactgccacagccacttttgattacagtggtaaatctagaaaaattcttgacttgagtaatgtagccaaatacaaaatatgacatttgttactatataaaac

SEQ ID NO: 14712 - DNA, 1055 bp, Arabidopsis thaliana
  Clone ID: LIB25-027-D7_FLI
cccttatcggagatttgaagccatgggaagaagaaaaatcgagatcaagcgaatcgagaacaaaagcagtcgacaagtcactttctccaaacgacgcaatggtctcatcgacaaagctcgacaactttcgattctctgtgaatcctccgtcgctgttgtcgtcgtatctgcctccggaaaactctatgactcttcctccggtgacgacatttccaagatcattgatcgttatgaaatacaacatgctgatgaacttagagccttagtaagtaattagctaagaacgtcattctaatattcttctggatgcggtttttggtgttatgaaggatagaagcgctgttcaagccggagaaacctcaatgttttgaactcgatcttgaagaaaaaattcagaattatcttccacacaaggagttactagaaacagtccaaaggttagcagtacgacacatttttctcccctcttcttctgataaaaaaaatgttttttttcttttgtctacttgtgaatacagcaagcttgaagaaccaaatgtcgataatgtaagtgtagattctctaatttctctggaggaacaacttgagactgctctgtccgtaagtagagctaggaaggcagaactgatgatggagtatatcgagtcccttaaagaaaaggagaaattgctgagagaagagaaccaggttctggctagccagatgggaaagaatacgttgctggcaacagatgatgagagaggaatgtttccgggaagtagctccggcaacaaaataccggagactctcccgctgctcaattagccaccatcatcaacggctgagttttcaccttaaactcaaagcctgattcataattaagagaataaatttgtatattataaaaagctgtgtaatctcaaaccttttatcttcctctagtgtggaatttaaggtcaaaaagaaaacgagaaagtatggatcagtgttgtacctccttcggagacaagatcagagtttgtgtgtttgtgtctgaatgtacggattggatttttaaagttgtgctttctttcttc

SEQ ID NO: 14713 - DNA, 894 bp, Arabidopsis thaliana
  Clone ID: LIB25-027-G8_FLI
attttcgtgatatgtaggcatcgggctaatgcagttatataagaggctggaggatcagaagtcaagcaggggaagaaatcaggatgcactttatgcagcctgtctgtacattgcttgtcgccaagaggacaagccacgaactattaagggtacatttcaaagatttctcatttgagagagtcttgttacctcttgatatagctttgacataagtcaatcaaactcgtgaaccttgtgaatagaaatatgcgttattgccaatggggcgacaaagaaggaaattggccgagcaaaagactacattgttaagacattgggactggagcctggtcagtctgtggatttaggaactatacacgctggtgatttcatgagaaggttctgctccaaccttgcaatgtctaaccatgcggtgaaagctgctcaggaagctgtgcaaaaatctgaggaatttgatataaggaggagtcctatatcaatagcagcagtagtcatctatatcataacccagctgtctgatgacaagaagactctcaaagatatatcgcatgcgacaggagtagcagaagggacaataaggaattcatacaaagacttgtatccacatctgtcaaagatagcaccaagttggtatgcaaaggaagaggatctgaaaaacctgtcaagtccttgaagtcgtttcttgattcttctatatgcaatagagaactatctatatctataaatctatatcgactgaggaagatacaaagcaattgttctctctctctagtagagccttttgtttctttttcaaatcttttttgaagtcctttgcttaagattcttgtaatggcgttaaaaaacttgaagaaaggaatattattattgttatagtaagatggtaattttttc

SEQ ID NO: 14714 - DNA, 968 bp, Arabidopsis thaliana
  Clone ID: LIB25-034-G5_FLI
gaaacttgaaagagagaaagagtttgattttgattaaaatggggaagaagtgtgatttatgtaacggtgttgcaagaatgtattgcgagtcagatcaagctagtttatgttgggattgcgacggtaaagttcacggcgctaatttcttggtagctaaacacacgcgttgtcttctctgtagcgcttgtcagtctcttacgccgtggaaagctactgggcttcgtcttggcccaactttctccgtctgcgagtcatgcgtcgctcttaaaaacgccggcggtggccgtggaaacagagttttatcggagaatcgtggtcaggaggaggttaatagtttcgagtccgaagaagatcggattagagaagatcacggtgacggtgacgacgcggagtcttacgatgatgatgaggaagaagatgaggatgaagagtacagcgacgatgaggatgaggatgatgatgaggatggtgatgatgaggaagcggagaatcaagttgtgccgtggtctgcggcggcgcaagttcctccggtgatgagttcttcatcttctgacggaggaagcggaggttcagtgacgaagaggacgagggctagagagaattcagatcttctctgctccgatgatgagatcggaagctcttcagctcaagggtcaaactattctcggccgttgaagcgatcggcgtttaaatcaacggttgttgtttaactcacactctaccgtatcgtcagaatgaacggcgccgatacatcgtcttctccgatctttgcgatctccaaaacaagaagagatctcagccgttgattcctttttttttcttgtttaagtaaatcaccaccgttcagttttctgacaatactttgttttagagatgaggtagtttctttctttctttgaatgtcgtacaaaatcaaatcttaactttttatttttcttatcaatatcattattatgttgatttttttt

SEQ ID NO: 14715 - DNA, 1673 bp, Arabidopsis thaliana
  Clone ID: LIB25-035-B3_FLI
agtgctttccctgttgatgttgggaagctggtaaagttgtactcaaccggcgaatatagtgacataaaaatctacctcagtgaccatagtctcactttccaatcccacaaagtcattctaagtctttggagtgttgcatttgcaaagatgtttacaaatgggatgagtgaaagccattcatcaacgatttacctaaccgatgtatcaccagaagcattcaaggctatgatgaatttcatgtatagtggagagttgaacatggaagacactgtgaattttggcaccgagttgattcatcttctctttctagctgaccggtttggagttgttccacttcatcaagaatgctgcaaaatgctcttggagtgcctctcagagggatggcgttccgttttggaagaaggattctgtatgctcagttctccaagtggtttcgtctatctcatcatgtaaactcattgaggagatgtgcaagaggaagttctccatgcacttcgactattgtaccactgcaagtttggactttgtcttgttagatcagaccaccttcagtgatattcttgagtctgcagatctgacggtgacatctgaagaaaagattctgaatgctgttctcatgtggtgcatgaaagctgaggagtcgcacagttggggagtaatagatgagatgatgaactatgctgaccccaaaagtttgttcaaagaaaggcttcagtcacttgatgacctgttacctcatgtacgcttctctttgttgccatatgagttacttaaaaggttagaaaacagcaacctaagcaaagaaatcccagtattcaatcgtcttttgaaggaggctgctagcttcctaacatccggattgatatccccaggaaatgaaccgatttcaagattccaacatcggagatcgagtttcaaggagcttcagtacatacgtgatggggacagcaatggggtgctgcactttgtgggtacatcttatggtagtcatcagtgggtcaaccccgttctcgcaaagaaaatcaacattacatcgagtagtcccacatccagattcactgatccaaaggctttggcttcaaaagcctatgcgggtacttcctttgcagggcctaggatggaagacggccatatatcatcctggtgggtggtggacttaggcgaagaacatcagcttatgtgcaactattacaccttcagacaagacggatcaagagcattcacaagattctggaagtttcagggatcgatggatgggaaaacatggacagacttgagagtccatgaggatgaccaaacaatgtgcaaggccggtcagtttgcatcatggccaatcaccgcagcaaatgcattactcccctttaggtttttcaggctggttctgaccggtccaactgcagatacatcaactccgtggaacttttgcatttgctacttggagctctacggttacttccgttgaagcgctctgcaatgaatgaccttttgactgtttctactacacacgtttttgacgtttatcctgtttaccttttgttcttgtactacagtgatctttgaacctgaaagtgtttctcaatatatgttaaacttgattccagttagattgttttggtttttatacaagagatttggcctatggctgtggagtaatgagttatactttgtttttt

SEQ ID NO: 14716 - DNA, 1214 bp, Arabidopsis thaliana
  Clone ID: LIB25-035-C6_FLI
catggctagtcggagagaagtacggtgccggtgcggcagacggatgtgggttcaaccagacgcccgtaccgtccaatgctcaacctgccacaccgtcacgcagctctactcgctagtggacatagctcgcggtgcaaaccgcataattcatgggtttcaacagctacttagacaacaccaaccgcaacatcatgaacaacaacaacaacaaatgatggctcaaccgccaccacggctgcttgagcctcttccctcgccgtttgggaagaagagagcagttttatgcggcgtgaactataagggaaaaagttatagcttgaaaggttgcatcagtgatgctaagtccatgagatctttattggttcaacaaatgggtttccctattgactctattctcatgctcacagaagatgaagccagcccgcagagaataccgacgaagagaaacattaggaaggcgatgagatggttagttgaagggaacagagcaagggactcactagtgttccatttctctggtcatggatctcagcagaatgactacaacggagacgagatcgatggtcaagatgaagccttgtgccctttagaccatgaaacagaaggaaaaatcattgatgacgagattaaccggatactcgtgaggcctctcgtccatggagctaagcttcacgctgtcatcgacgcctgtaacagcgggactgtccttgatttacccttcatttgcaggatggagaggaatggttcttatgaatgggaagaccatagatcagtcagagcttacaaaggaacagatggtggagcagctttctgtttcagtgcttgtgacgatgatgaatccagtggttacactcctgtgttcacggggaagaacacaggagccatgacttatagcttcataaaggcggtgaagacagctggaccagcacccacgtatggccacctgcttaaccttatgtgttctgcaatacgagaggcccagtctcgcctcgcctttaacggggactacacaagctctgatgcatccgcggagccactgctaacatcatctgaggaatttgacgtgtacgcgacaaagtttgtactctgaatgctgtacatatgatgctgcaaatagctcggaaacgtttctatgtgtatgtatcatgtaatgattatgttgcatagcctctctcttcttacgagcaataaagctatgaaataattgattcgct

SEQ ID NO: 14717 - DNA, 622 bp, Arabidopsis thaliana
  Clone ID: LIB25-036-B4_FLI
caaaaaaaactcactccctagaaaagtttgaaaatggcgaaggcagataagaaaccagcggagaagaaaccggcagagaaaactccggcagccgaaccagcagcagcggcagagaagaaaccaaaagccggaaagaaactcccgaaggaaccagccggcgccggagacaagaagaagaagagatcaaagaagaacgttgagacatacaagatctacatcttcaaggtgttgaagcaagttcatccagatatcggaatctccagcaaagccatgggaatcatgaacagtttcatcaatgatatctttgagaaacttgctggtgagtcttcgaagcttgcgaggtacaacaagaagccgacgattacttctagggagattcagactgcggtgagacttgtgttgcctggagagttggcgaaacatgctgtttctgaagggactaaggcggttacgaagtttacgagttcttagatttggaatgtggttttgtaatggaggagaagtagtagtagtagttggaatgtgaaatagggtttatgcttttgggtatctttgagggttatgtaatatgggaattagggttttaatttatggcacggctatgaaatctacttaattttcc

SEQ ID NO: 14718 - DNA, 876 bp, Arabidopsis thaliana
  Clone ID: LIB25-039-D12_FLI
tctgtttttaattcccctaaaaacccattttaaaatattttatctctcttctcttaaaaaaaactcttccctgtttttgtttgtgtgttactaaatggaatcgtcgtcgtcgggaacaacttcgtcgacgattcaaacgtcgtcaggatcggaggagagtctcatggagcagaggaaacgtaaacggatgctctcaaaccgtgaatctgcaaggagatcaagaatgaagaaacaaaagctcctagacgatctaacggctcaggttaatcatctgaaaaaagagaacacggagatcgtgacaagtgtcagcatcacaacgcaacactacctaaccgttgaagcagagaactctgttctcagagctcagcttgatgaacttaaccacaggctccaatctctcaacgacatcatcgagttcctcgacagtagcaacaacaacaacaacaacaacatgggcatgtgttcgaaccctctggttggtttggagtgtgatgatttcttcgtgaatcagatgaacatgtcttatattatgaaccagcctctcatggcgtcttctgatgctttaatgtattaaatgtggacctaaaaaccccctcgaaatcacaaagaaatggggccgtttttatttgtccgatttagagacatgtccaaagagagagatttatatataaaaatgggtctgttgtttgatttgtttccatttcaaatttttgtttgtttgggtccgttttaggcgttaggtatctctaagcatcatcgttatgagtgtgtctgtaataaaggctctgttgccgcatgagtacaaagtgttttcttaatattgtaatatgcttattactttctttttattcttaagtactaatcccatttttatat

SEQ ID NO: 14719 - DNA, 1252 bp, Arabidopsis thaliana
  Clone ID: LIB25-040-C4_FLI
aaaaaagaaaatcaaagaagatagttttgtgattgttttctataaaaagtgcagatattttctttgtcctagagaaagaggtgataggaaaaatgggtctccaagagcttgacccgttagcccaattgagcttaccgccgggttttcggttttatccgactgacgaagagctgatggttgaatatctctgtagaaaagccgccggtcacgacttctctctccagctcatagctgaaatcgatctctacaagtttgatccatgggttttaccaagtaaggcgttattcggtgaaaaagaatggtattttttcagcccgagggataggaagtatccaaacgggtcaagacctaatcgggttgccgggtcgggttattggaaagccaccggtacggataaagttatctcgacggagggaagaagagttggtatcaagaaagctttggtgttttacattggaaaagctccaaaaggaaccaaaaccaattggattatgcatgagtaccgtctcatcgaaccctctcgtcgaaatggaagcaccaagcttgatgattgggttttatgtcgaatatacaaaaagcaaacaagcgcacaaaaacaagcttacaataatctaatgacgagtggtcgtgaatacagcaacaatggttcgtcgacatcttcttcgtctcatcaatacgacgacgttctcgagtcgttgcatgagattgacaacagaagtttggggtttgccgccggttcatcaaacgcgctgcctcatagtcatagaccggttttaaccaatcataaaaccgggtttcagggtttagccagggagccaagttttgattgggcgaatttgattggacagaactcggtcccggaactcggactgagtcataacgttccgagtattcgttacggtgacggtggaacgcagcaacaaactgaggggattcctcggtttaataataactcggacgtctcggctaatcagggttttagtgttgacccggttaacggatttgggtactcgggtcaacaatctagtgggttcgggtttatttgattgtgtaatggtaacgtaataagaaaaacatatttttattttttgtccgtgtcagattagttaattaatatagcgtagaattcgaactctagggttagatttaggttctacgacttgtattgtatattcgtcgtcatttgtcctgacatttacatttttgtaaacttttatagctggaacttttgtattgatcaattatttattag

SEQ ID NO: 14720 - DNA, 867 bp, Arabidopsis thaliana
  Clone ID: LIB25-040-E1_FLI
ctcgaaacacaggttaatgatctaaaaggtgagcattcatcacttcttaaacaactgagcaacatgaatcacaagtatgacgaggctgctgttggcaatagaatactaaaggctgacattgagacattaagagctaaggtgaaaatggcggaagaaaccgtgaagagagtaacaggaatgaatccgatgcttctcggaagatcaagtggacataacaacaacaacagaatgccaataactggtaacaacaggatggattcttctagcattattccagcttatcaaccacactcaaacctaaaccatatgtcaaaccaaaacatcgggatcccaaccattctacctccaagactcggaaacaatttcgctgctcctccatcccaaaccagctctcccttgcagagaattagaaatgggcaaaatcaccatgttactccaagcgccaacccgtatggctggaataccgaacctcagaacgattcagcatggtaagctaaaacatggctctttcttttaagaccattgaacaatttaaaaccatttgaagtactatgatccctgtttatacatatcagattcctgtctcccctttttttgctcattttacaggccgaaaaaatgcgtggactgatcaaacaagaagcgggtttcgcactatattaatgtctatgcatctgtaatttgtaagtgttattaagttacgaatcatgagaaaacatcttgtgaaaatacagtctcatggcttatatatatatataagctctgtcttataacattacaagattcttatttgagaatcgtctttctatttatagctaataacagagtgtatatctgtttttatccaattttaaaaaagatagctca

SEQ ID NO: 14721 - DNA, 908 bp, Arabidopsis thaliana
  Clone ID: LIB25-040-H2_FLI
gattttcgatcttatccttatcttcttccttgttctatttctcttctaactaatctcttctcttctcttaaaatcaaacgtaatcataaataaagatcttcttgtttaatttctcttgatcctcgcaaaatcacagattcttgaaattcttttttcttgtcttgaaattcttgagttcttgagttatgaaaagacaatggacagagttatgaaatgataaatctcaaccaattccttgtttatcattctatatcagttgtgattcttcattggttttacgttatctcttgaacaaaaaaacatggcaaacgcagagaagacaagttcaggttccgacatagatgagaagaaaagaaaacgcaagttatcaaaccgcgaatctgcaaggaggtcgcgtttgaagaaacagaagttaatggaagacacgattcatgagatctccagtcttgaacgacgaatcaaagagaacagtgagagatgtcgagctgtaaaacagaggcttgactcggtcgaaacggagaacgcgggtcttagatcggagaagatttggctctcgagttacgttagcgatttagagaatatgattgctacgacgagtttaacgctgacgcagagtggtggtggcgattgtgtcgacgatcagaacgcaaacgcgggaatagcggttggagattgtagacgtacaccgtggaaattgagttgtggttctctacaaccaatggcgtcctttaagacatgagatttgtgtattagtgtgtgttttactttggtcattttatagtttttgtaatctttttatatcgaattgtttcttctcattactttctgaattctgatacaattgcatatcttattgttttcaacattttcatttaacgttatatgattttcggtggttaacccgaaag

SEQ ID NO: 14722 - DNA, 655 bp, Arabidopsis thaliana
  Clone ID: LIB25-043-H11_FLI
ctcacgactccatcttctaaaattcagaatctttctttgaaacttttttcgtgtgaagaaaatggcaccaaaggcagataagaagccggcagagaagaaaccagtagaggagaaatcaaaagccgagaaagctcctgcagagaagaaaccaaaaggccggcaagaaactcccgtaggtaagccggtgccggcggcgataagaaagaagaagatgaagaagaagagtgttgagacgtacaagatctacatcttcaaggttctgaaacaagttcatccagatattggtatttcaagcaaagctatggggattatgaacagtttcatcaacgacatctttgagaaattggcatcggaatcgtcgaagctcgcgaggtataataagaagccgacgattacttctcgggagattcagactgctgttagacttgttcttcctggtgagcttgcgaaacatgctgtttctgaaggaactaaggcggtgactaagtttactagctcttgaattgtggatcttgttgaaatcgatgtttgtaaaattagggttttttagatttgatggttgttgttgactctttgatcgatttctgtttcgttttcttgttgcgatgttaatcaaatcggatccgatttctttcttaaatcaaatctatcaagt

SEQ ID NO: 14723 - DNA, 702 bp, Arabidopsis thaliana
  Clone ID: LIB25-044-B10_FLI
gagcgattaaacctactcaatctcagatctcgttaaacctagaaacctcgagaaaaaccgtatcaatggcgccgaaagcagagaagaagcccgctgagaagaaaccagcttccgagaagccggtggaggagaaatcaaaagccgagaaagctccggcggagaagaaaccaaaggccggaaagaagctcccgaaggaagctggtgccggaggcgacaagaagaaaaagatgaagaagaagagtgtcgagacttacaagatctacatcttcaaggtgcttaagcaagttcatcccgatatcggaatctccagcaaagcgatggggatcatgaacagtttcattaacgatatcttcgagaagcttgctcaagaggcgtcgaagcttgcgaggtacaataagaaacctacgatcacttctcgggagattcagactgctgtgagattggtgcttcctggagagttggcgaagcatgccgtttctgaggggactaaagccgtcacgaaattcaccagctcttgaataattgagttagggttcttatcatatggatgttgctctgctttagggttaatggaatttggaagatctgagttagggttttagaatgtcctttaagtatctctgtttcgtttggaatttctacgttttgtaagtactgctgctattgataatgtttggagtctatatttgctctttgtgtccc

SEQ ID NO: 14724 - DNA, 1219 bp, Arabidopsis thaliana
  Clone ID: LIB25-044-F1_FLI
gaaacacaaagtgagacagaactctctaattagtcccgaaggtttcaaaagggtattttggtaaaatcgaaagagaatcatggacgcttttgatgcgattccagatcctgtggtcatcgacattttgaacagagtcggtgacgtcaaaacgttaatacgatgtcgttccgtttctaaacgattcaactcgttagccactcagtctgagtcgctccttctccaactcgatcagatcctcggagccaccgaatctgactccgagatcgattctcctatcgctagcttcttccgatctctcttcaaatccattcacggtctccttcctcctatcttctccaaaccagctaactctgacgaaatcctaacccgatctccgaaaactccggctcagattctctccggatttgaacggatccggaatctggaggtggaattatacggtggtgatgtcaagcttgagaaaggcgccgccgttaagtggaaggctgagttcgggaaaactctcaagagctgcgtcatcgtcgctttccgttccgcgacggttaatacttcagcagctacggaagctgccgccgtcgtcgacggtgttgttgagtcagattcggagtttgtttgtggattgaagacgcgcgtggtgtggacgatcagcgcgttgatggcggcttccacgcgtcattacttgatgagagatttggtgaaagatcacaaggagatggagaaattgattgtgcgtgacagtgatggtgaaggtacggtggtgatggacgcggcggggatgaaagaatacagagagacggaggtgcgtggggataataaagaatcagagcgcgtgggggaacgaactgtggtacctagcgtgaggatgagtatgagacacgcgccgtcgctgatgctgaagagcgggatttgtctcgaagcagcgacgctggtggtcgtaaggccgactggtgtggcttccgatgataacgatgttgagctggtgacggaggcgttcgccggagatggcgacgattgtatgtacggagaagctgttacggcgttgcttaagcgtaggagaaatgtgttagagatgaattctttctaaggcctagtgggctttttttgggcttccgtttgtttggccctttttaatgtatatacatacgcatcgtacaaagccaactgtactattggcgtacgacttttgggtcaaatgacatcaaatccgaattattcctct

SEQ ID NO: 14725 - DNA, 881 bp, Arabidopsis thaliana
  Clone ID: LIB25-044-G8_FLI
gtgataacgaaatcctaattccatggccgacaacgacggagcagtgagtaacggcatcatagtcgagcagacgtcaaacaaaggacctcttaacgccgttaagaaaccaccgtctaaagatcgacacagcaaagttgacggaagaggaagaaggattcgtatgccaatcatttgcgcagctcgagtttttcaattgaccagagagttaggtcacaagtccgatggtcaaaccatagagtggcttctccgtcaagctgagccttctatcatagccgccactggaactggcactactccggcgagtttctccactgcttctctctccacttcttctccgtttactctcgggaaacgtgtcgtcagagcggaggaaggagaatccggcggcggaggaggaggagggttaacagtgggacacacaatggggacttcgttaatgggtggtggtggttctggtgggttttgggctgttccggcgaggccggatttcggacaagtctggagctttgcaaccggagctccaccggaaatggtttttgcgcagcagcagcaaccagctacactcttcgtccgccaccagcagcaacagcaagcttccgccgccgcagcagctgcaatgggtgaggcttcagcagctagagttgggaattatcttccgggtcatcatctcaatttgcttgcttctttgtctggtggagctaacgggtcgggtcggagggaagacgaccacgaaccacgttgagaaatggtattgtctttttggtaatgtatagaaaaattcctatgttttatgtcatcgaaagtgtttagaaagtacctctaatttgcggtttcttttgctccttttttacttaatttaagcttattgcttgtttgattaa

SEQ ID NO: 14726 - DNA, 1039 bp, Arabidopsis thaliana
  Clone ID: LIB25-045-F7_FLI
ctctgtttcctctttctctctgtttcctctttctcagaactcagaagtagttgttgttttatttctgttgatcaaaaatggaatccaattcgtttttcttcgatccatctgcttcacacggcaacagcatgttcttccttgggaatctcaatcccgtcgtccaaggaggaggagcaagatcgatgatgaacatggaggaaacttcgaagcgaaggcccttctttagctcccctgaggatctctacgacgatgacttttacgacgaccagttgcctgaaaagaagcgtcgcctcactaccgaacaagtgcatctgctggagaaaagcttcgagacagagaacaagctagagcctgaacgcaagactcagcttgccaagaagcttggtctacagccaaggcaagtggctgtctggtttcagaatcgccgagctcgttggaaaacaaaacagcttgagagagactacgatcttctcaagtccacttacgaccaacttctttctaactacgactccatcgtcatggacaacgataagctcagatccgaggttacttccctgaccgaaaagcttcagggcaaacaagagacagctaatgaaccacctggtcaagtgcccgaaccaaaccaacttgatccggtttacattaatgcggcagcaatcaaaaccgaggaccggttaagttcagggagcgttgggagcgcggtactagacgacgacgcacctcaactactagacagctgtgactcttacttcccaagcatcgtacccatccaagacaacagcaacgccagtgatcatgacaatgaccggagctgtttcgccgacgtctttgtgcccaccacttcaccgtcgcacgatcatcacggtgaatcattggctttctggggatggccttagaaaaccactctgataataaatgtgtgtttatttaagttcaagagtcatcttcttgttgtttccatgttgacgataattgttgactcgtggaataattccgctgttcaacggtatttttatcagttgcattatatgcttttatg

SEQ ID NO: 14727 - DNA, 1706 bp, Arabidopsis thaliana
  Clone ID: LIB25-050-H1_FLI
gatctgtagcgacggcgaaatcttcgacggcggtgatgagctccattccgccttttctgagcaaaacgtacgatatggttgacgatccattgacggacgacgtggtgtcttggagcagcggaaacaacagcttcgtggtttggaacgtgcctgagttcgccaaacagtttctaccaaagtatttcaagcacaacaatttctccagcttcgtcagacagctcaatacttatggttttagaaaagttgatccagaccgctgggagtttgcaaacgagggctttttaagaggccaaaagcaaatactaaagagtattgtccggcgaaaacctgcacaagtgcagcctccacaacaacctcaagttcagcactcatctgtgggtgcgtgcgttgaagtgggcaaatttggactcgaagaggaagtggaaagacttcagcgcgataagaacgtccttatgcaggaacttgtaaggttgaggcagcaacaacaagttaccgaacatcatctgcagaatgtggggcagaaagttcatgtgatggagcagaggcagcaacagatgatgtcctttctagcaaaggctgtccaaagtccaggtttcttaaaccaattttctcagcagagtaatgaagcaaaccaacacatttctgaaagcaacaaaaagaggaggctacctgttgaggaccagatgaattctggcagtcatggggttaatggtcttagccgccagattgtgagatatcagtcatcgatgaacgatgcaacaaacactatgcttcaacagatacagcagatgagtaatgcacctagccatgaatctctctcaagcaataatggtagctttcttttgggcgatgttccaaattctaacatttcagacaatgggagctcctcaaatggatcacctgaagttacattggcagatgtttcatccattcctgcaggcttctatcctgcaatgaagtaccacgagccttgtgaaacaaatcaagtcatggagaccaatttgcctttttctcaaggtgatctcttacctccaacgcaaggagcagcagcttctgggagctcaagttcggatcttgttggatgcgagacagataatggagagtgtttggatccaataatggctgttttggatggcgcactcgaactagaagctgataccttaaatgagttgcttcctgaagtccaagattctttttgggaacagttcattggtgagagcccagtgattggtgagacagatgagttaatctcaggatcagtggaaaatgaactgatattggagcaactagagttacaatcaaccctgagtaatgtgtggagcaagaatcaacaaatgaaccatcttactgaacagatgggacttctcacatcagatgctctcagaaaatgagattgccacaggccacaatctttcctcacgagatgggttaagattttgtggagccgcaacaacaaaaagaatatgaccaaaggaggtactatgtatgtatgtatcaaactgttgtaactctaattcttgtcaatgtataataaaataagagaaatattgccttaaaagatttttgcattgcaatatctttgtttgttactgacagaatgaaaaggagatgcttcaaagtgagagatattcttctgttcttgtgtatgtctttagagatccttgtttatttttgttacattaagtgcaaaaattggcattttggtt

SEQ ID NO: 14728 - DNA, 141 bp, Arabidopsis thaliana
  Clone ID: LIB25-052-E10_FLI
gttttgtgtgttgaaaggtttttaattttaagcaaaagtggattatgacgacaacagacaagcttttaattttattttaccgtaatagttatatcttgttgtaagaaaccattttcagccttttgttggaaaatcctgctt

SEQ ID NO: 14729 - DNA, 1192 bp, Arabidopsis thaliana
  Clone ID: LIB25-056-B4_FLI
catctctcgtgttttgttttctttgtctccgatttttttcgcgacgaagaagaagacgagagatagagagagaagtagagaaatcgaaggaatctgtaaccgattttaagatctcaatttttagggttgttgatttttcaatttctgggttaattttttttagggttttcatttggaatcatgtcggatgcgtattgtacggattgtaaaaaggagacggagttggttgtcgatcactcagccggagataccctttgctccgagtgtggtttggttttggaatctcactccattgatgagacctctgagtggcgtaccttcgctaatgaatcttccaacagcgatcccaatcgtgtcggtggtccaaccaacccgcttctcgctgatagtgctttaaccactgttatcgctaagcccaaatgttcatctggtgatttcttgtcttcttctctcgggaggtggcagaatcgtaactccaattccgatcgtggtttgattcaagcttttaaaaccattgctaccatgtctgaaaggttgggacttgttgcaactatcaaggatcgggctaatgagttatataagaggctggaggatcagaagtcaagcaggggaagaaatcaggatgcactttatgcagcctgtctgtacattgcttgtcgccaagaggacaagccacgaactattaaggaaatatgcgttattgccaatggggcgacaaagaaggaaattggccgagcaaaagactacattgttaagacattgggactggagcctggtcagtctgtggatttaggaactatacacgctggtgatttcatgagaaggttctgctccaaccttgcaatgtctaaccatgcggtgaaagctgctcaggaagctgtgcaaaaatctgaggaatttgatataaggaggagtcctatatcaatagcagcagtagtcatctatatcataacccagctgtctgatgacaagaagactctcaaagatatatcgcatgcgacaggagtagcagaagggacaataaggaattcatacaaagacttgtatccacatctgtcaaagatagcaccaagttggtatgcaaaggaagaggatctgaaaaacctgtcaagtccttgaagtcgtttcttgattcttctatatgcaatagagaactatctatatctataaatctatatcgactgaggaagat

SEQ ID NO: 14730 - DNA, 1179 bp, Arabidopsis thaliana
  Clone ID: LIB25-059-H9_FLI
cccgtatagtgagtgcaaccatccggcacagatttacaagaaagttgttgggggaaagctaccaggagcattttacagagttggagacatcgaggcacagaggttcatcgggaaatgcctcgtgtctgcctcaaagagagtatcagcaaaagaactattgcaagatccatttcttgcctccgatgagtcctggatggtatacacgagcggtgctgggaatccaaagcccttcttgaacgagaatgaaatggacacactgaagttggaagatgatgagttaaggaccgagatgtccatcgctgggaagctgggcgctgaagataacaaaatcgatctggaagtacaaatcgcatatgataatggtctggccaataatgtattctttccctttgacatcatgaatgatacttccattgatgttgcaaaggagatggtaaaagaactcgaaattatagattgggagccagtcgagattgctaaaatgattgatggagcgatttcttctttggtgtctgattggaagtatgaggaagatgatgaaacccctcatgatcatcatcgtcatcgtaccgattcttttcactcttcttcctcgcacgcgtcatcttcccaagcttcactctcgaactatatggctcgaggccttcaagattgggtacaagatgatttacacgatgagacgtattctcagagttcttcccattcagggtcttactccaacctcaactacatagctgttgatgagtacagctcccaatctcctgttatgagcagaactcacaacatgacgaggttttgccccgaagaaagctctcatctacagtcaggacaagccaacgcgtatgcagcttccagttcaactaacagaagcttggcttcagacaaccgcacacttacaaggaaccgatcacttgtagacgtgcagagacagttactgcaccggtcgccaggggaagaggctagaaaaagaagattgttcaaaactgttggagacgtagaaacagttgggtttcagtcaccttatgcggtttcacggaagccaccaagctcaaggcgctagcttctccagtattttaattactgtaatatataagtatactgtaaaaaacaagtttgctggttcaaaaatgtaaaaagtacatgtgtttaataaagttgttcaaagggtgtgtttgtgtt

SEQ ID NO: 14731 - DNA, 1899 bp, Arabidopsis thaliana
  Clone ID: LIB25-060-A9_FLI
gtcaatttcagtggctctgctgcttcctttgttgtgaagccacatagattagattgaggaatgatccaaactcatgtcatacacacatttgtaatctgctacacaaaatacttttaaaatcacacacactaatattttaactctccccactctttgccttgcccttggctctagaaccgaacgtgactctccagatagacttttggagtcacaacattgagtttgaagaggagggaagaagtgagctagggattggttcagagtgaacataaatggctctcaaggcattagactacgatactgaatgaaaacgtcaagaagtgtcagtatgccgtaagaggtgaactttatctccgagcttctgagctgcagaaagaaggcaaaaagattattttcacaaacgttgggaaccctcatgctttaggacagaagccattgacatttcctcgccaggtggttgcgctttgccaagctccgtttctactagatgacccaaatgttggaatgctatttccagctgatgctattgcaagagctaaacattatctttccttgacttcaggcggtttaggtgcttacagtgattcaagaggccttccaggagttaggaaagaggttgctgagttcattcaacggcgtgatgggtatccaagtgacccagaactcatctttctcactgatggagctagcaaaggtgtgatgcaaatcttgaattgtgttatacgcggtaatggagatgggattctagttccggttccacagtatccactttactcagctaccatatcactgttaggtggtactcttgttccttactatcttgatgagtctgaaaactggggacttgatgttgctaaccttcgacaatccgttgctcaggctcgttctcaagggataacagtaagggcaatggtgatcattaaccctgggaacccaactggccagtgtctaagcgaagctaacataagagagatattgaagttctgttataacgagaaactggttcttctgggagacgaggtttatcagcagaacatataccaggatgagcgtccctttatcagctccaagaaggttttgatggaaatgggttcgccgttcagcaaggaagttcagcttgtatcttttcacacagtctctaaaggatattggggtgaatgtggacagcgaggtggatactttgagatgaccaacctccctccaagggttgttgaggagatatacaaggttgcatcaattgccctcagccctaatgtctctgcgcaaatctttatgggtttgatggttaatcctccaaagcctggagacatttcatatgaccagttcgcccgtgaaagcaaggggattcttgaatctttgagaagaagagcaaggctcatgacagatggattcaacagctgcaaaaacgtcgtgtgcaatttcacagaaggtgcaatgtattcgtttcctcaaatacggttaccaacgggagctctccaagctgcaaaacaagctggaaaagtgccagacgttttctactgtctcaagctcttagaagccacaggaatctccacagtacctggctctggatttggacagaaagaaggtgtgttccatctgaggacaacaatcctgccagcagaagatgagatgccggagatcatggatagcttcaagaagttcaacgacgagttcatgactcagtatgataataactttggttattcgaaaatgtgattacttcttcttctgaacgactattgtgttctgctacactctttaaagctaaatctctgtagtacactctttctctttgccctattctataaaccatatctctctctttgtgtctcttttttttgggtgtaaactctctcttgtgtctctatttctattttcaattggaaactgattaagatc

SEQ ID NO: 14732 - DNA, 1418 bp, Arabidopsis thaliana
  Clone ID: LIB25-063-C7_FLI
tcaactcggcatgttgtcctggttgactcgcaggagaacggtgtgcgtctcgttcacgcgcttttggcttgcgctgaagctgttcagaaagagaatctgactgtagcggaagctctggtgaagcaaatcggattcttagccgtttctcaaatcggagcgatgagaaaagtcgctacttacttcgccgaagctctcgcgcggcggatttaccgtctctctccgtcgcagagtccaatcgaccactctctctccgatactcttcagatgcacttctacgagacttgtccttatctcaagttcgctcacttcacggcgaatcaagcgattctcgaagcttttcaagggaagaaaagagttcatgtcattgatttctctatgagtcaaggtcttcaatggccggcgcttatgcaggctcttgcgcttcgacctggtggtcctcctgttttccggttaaccggaattggtccaccggcaccggataatttcgattatcttcatgaagttgggtgtaagctggctcatttagctgaggcgattcacgttgagtttgagtacagaggatttgtggctaacactttagctgatcttgatgcttcgatgcttgagcttagaccaagtgagattgaatctgttgcggttaactctgttttcgagcttcacaagctcttgggacgacctggtgcgatcgataaggttcttggtgtggtgaatcagattaaaccggagattttcactgtggttgagcaggaatcgaaccataatagtccgattttcttagatcggtttactgagtcgttgcattattactcgacgttgtttgactcgttggaaggtgtaccgagtggtcaagacaaggtcatgtcggaggtttacttgggtaaacagatctgcaacgttgtggcttgtgatggacctgaccgagttgagcgtcatgaaacgttgagtcagtggaggaaccggttcgggtctgctgggtttgcggctgcacatattggttcgaatgcgtttaagcaagcgagtatgcttttggctctgttcaacggcggtgagggttatcgggtggaggagagtgacggctgtctcatgttgggttggcacacacgaccgctcatagccacctcggcttggaaactctccaccaattagatggtggctcaatgaattgatctgttgaaccggttatgatgatagatttccgaccgaagccaaactaaatcctactgtttttccctttgtcacttgttaagatcttatctttcattatattaggtaattgaaaaattttaatctcgctttggagagttttttttttttgcatgtgacattggagggtaaattggataggcagaaatagaagtatgtgttaccaagtatgtgcaattggttgaaataaaatcatcttgagtgtcaccatctat

SEQ ID NO: 14733 - DNA, 1533 bp, Arabidopsis thaliana
  Clone ID: LIB25-064-H7_FLI
ctcaaccggcgaatatagtgacataaaaatctacctcagtgaccatagtctcactttccaatcccacaaagtcattctaagtctttggagtgttgcatttgcaaagatgtttacaaatgggatgagtgaaagccattcatcaacgatttacctaaccgatgtatcaccagaagcattcaaggctatgatgaatttcatgtatagtggagagttgaacatggaagacactgtgaattttggcaccgagttgattcatcttctctttctagctgaccggtttggagttgttccacttcatcaagaatgctgcaaaatgctcttggagtgcctctcagaggattctgtatgctcagttctccaagtggtttcgtctatctcatcatgtaaactcattgaggagatgtgcaagaggaagttctccatgcacttcgactattgtaccactgcaagtttggactttgtcttgttagatcagaccaccttcagtgatattcttgagtctgcagatctgacggtgacatctgaagaaaagattctgaatgctgttctcatgtggtgcatgaaagctgaggagtcgcacagttggggagtaatagatgagatgatgaactatgctgaccccaaaagtttgttcaaagaaaggcttcagtcacttgatgacctgttacctcatgtacgcttctctttgttgccatatgagttacttaaaaggttagaaaacagcaacctaagcaaagaaatcccagtattcaatcgtcttttgaaggaggctgctagcttcctaacatccggattgatatccccaggaaatgaaccgatttcaagattccaacatcggagatcgagtttcaaggagcttcagtacatacgtgatggggacagcaatggggtgctgcactttgtgggtacatcttatggtagtcatcagtgggtcaaccccgttctcgcaaagaaaatcaacattacatcgagtagtcccacatccagattcactgatccaaaggctttggcttcaaaagcctatgcgggtacttcctttgcagggcctaggatggaagacggccatatatcatcctggtgggtggtggacttaggcgaagaacatcagcttatgtgcaactattacaccttcagacaagacggatcaagagcattcacaagattctggaagtttcagggatcgatggatgggaaaacatggacagacttgagagtccatgaggatgaccaaacaatgtgcaaggccggtcagtttgcatcatggccaatcaccgcagcaaatgcattactcccctttaggtttttcaggctggttctgaccggtccaactgcagatacatcaactccgtggaacttttgcatttgctacttggagctctacggttacttccgttgaagcgctctgcaatgaatgaccttttgactgtttctactacacacgtttttgacgtttatcctgtttaccttttgttcttgtactacagtgatctttgaacctgaaagtgtttctcaatatatgttaaacttgattcc

SEQ ID NO: 14734 - DNA, 695 bp, Arabidopsis thaliana
  Clone ID: LIB25-065-D10_FLI
cccagttccgaaactggaacctagttcacctgttcttgatccagattcctatgtccaagagattctgcaaatggaagcagaatcatcatcatcatcatcaacaacaacgtcacctgaggttgagactgtctcaaaccggaaaaaaacaaagaggtttgaagaaacgagacattacagaggcgtgagaaggaggccatgggggaaatttgcagcagagattcgagatccggcaaagaaaggatccaggatttggttaggcacttttgagagtgatattgatgctgcaagggcttacgactatgcagcttttaagctcaggggaagaaaagctgttctcaactttcctttggatgccggaaagtatgatgctccggtcaattcatgccgaaaaaggaggagaaccgatgtaccacagcctcaaggaacaacaacaagtacttcatcatcgtcatcaaactaatgggggaatagtgatgtttaattagtatatataggttaatatcttaagtatgtgaagcatcatgtatagagccaagaacctgttagactagtgtactgaaaagaactcttgcaaaatatgtactaaagagttcctgtaacaatggaacttctgcgttttctcttgtcttaaagagcttaaggttctagaaacaaagttcttgtcctttcggtttattcagagtacactatttggg

SEQ ID NO: 14735 - DNA, 1579 bp, Arabidopsis thaliana
  Clone ID: LIB25-066-B4_FLI
tgaagaagccatggaagagaagaagaaggagcttgaagagttgaagtatcaatcaggttttggtaaccacttctcatcggaagcaatcgccggagctttaccgttagatcagaacagtcctcttctttgtccttacggtctttacgccgaacagatctccggtacttctttcacttctcctcgcaagctcaatcaaagaagttggttgtaccgggttaaaccatcggttacacatgaaccgttcaagcctcgtgtaccagctcataagaagcttgtgagtgagtttgatgcatcaaatagtcgtacgaatccgactcagcttcggtggagacctgaggatattcctgattcggagattgatttcgttgatgggttatttaccatttgtggagctggaagctcgtttcttcgccatggcttcgctattcacatgtatgtggctaacacaggaatgaaagactccgcattttgcaacgctgatggtgacttcttgttagttcctcaaacaggaaggctatggattgaaactgagtgtggaaggcttttggtaactcctggtgagattgctgttataccacaaggtttccgtttctccatagatttaccggatgggaagtctcgtggttatgttgctgaaatctatggggctcattttcagcttcctgatcttggaccaataggtgctaatggtcttgctgcatcaagagattttcttgcaccaacagcatggtttgaggatggattgcggcctgaatacacaattgttcagaagtttggcggtgaactctttactgctaaacaagatttctctccattcaatgtggttgcctggcatggcaattacgtgccttataagtatgacctgaagaagttctgtccatacaacactgtgcttttagatcatggagatccatctataaatacagtccttacagcaccaactgataaacctggtgtggccttgcttgattttgtcatatttcctcctcgatggttggttgctgagcatacttttcgacctccttactatcatcgtaactgcatgagtgaatttatgggcttaatctacggtgcatacgaggcgaaagctgatggatttctccctggcggtgcaagtcttcatagctgtatgacacctcatggtccagatactaccacgtacgaggcgacaattgctcgagtaaatgcaatggctccttctaaactcacaggtacgatggctttcatgttcgaatcagcattgatccctagagtctgtcattgggctctggagtctcctttcctggatcacgactactaccagtgttggattggcctcaagtctcatttctcgcgcataagcttggacaagacaaatgttgaatcaacagagaaagaaccaggagcttcggagtaaagaacacataattcacctgcaccactttcaatacccaagctgtacagacttttcaccatatacttgtataagaaagaagcatataacaagtacatatgtaataataagtagttaatgtttcttcatgtcactttaaatacactatttgtactctgaagctaatataacggtgttggtttagat

SEQ ID NO: 14736 - DNA, 765 bp, Arabidopsis thaliana
  Clone ID: LIB25-069-G1_FLI
gaagtagttcaagaattaaggaagagagcttctccgttaaagtatagtgagagaatatggaagtcaccaatgggcttaaccttaaggacacagagcttcgtttgggattacccggagcacaagaagaacaacaactagaactttcttgcgtcagaagcaacaacaagcgcaagaacaacgactcaacagaagaatctgctcctcctcctgcaaaaacacaaatcgttggatggcctccagtgagatctaaccgtaagaacaacaacaacaaaaacgtgagttatgtgaaagtgagtatggacggagctccatatctccgtaagatagatctcaagatgtacaaaaactatccagagcttctcaaagcactagagaacatgttcaagttcacagtaggtgaatattccgagagagaaggctacaaaggatctggatttgtacctacttatgaagacaaagatggagattggatgttggtcggtgatgttccatgggacatgttctcttcatcttgtcaaaaactcagaatcatgaaaggatccgaagctcctactgccttatgatccattgtctcaaaacaccttttggtcgaggcaaaaacaaattctactttgtttagataaaaaaaagtttggtgtaaagaaagaaaaagcaatagggttacaaatacgttatatagatgtaaactagctttggttaattctgtaaaagatgagttttgattatacgaagtttatatgtatgctcaagatatttgatactaac

SEQ ID NO: 14737 - DNA, 1506 bp, Arabidopsis thaliana
  Clone ID: LIB25-070-C8_FLI
gttttaataatcttttatcatacaatttgttctctctctctctctctctctctctaccataaagcaaatgtgatcagagacaaagcatacaaagaagttcctcattcaaaaaagatttctcagccatcaaaattctctttctcttcatccaacaaaaaaaaagcatacctctttttcttccatatagataagttaattaagaaaacgaattatcaggttttgtttcggctgatctgaggaagttcatctatggatacggctcagtggccacaggagattgtagtgaagcccttggaagaaatagtaacaaacacatgcccaaagccgcaaccgcaaccgcttcaaccgcagcagccaccgtcggtgggtggagagaggaaggcaaggccagaaaaggatcaagctgtaaactgtccgagatgtaactcaaccaacacaaagttttgttactacaacaattatagtttgacgcagccaagatacttctgcaaaggttgtagaaggtattggaccgaaggcggttcgcttaggaacattcctgttggcggtggctcaagaaagaacaagagatctcactcttcttcttctgatattagtaacaatcactcggattctacacaaccagctacaaagaagcatctctctgatcatcaccaccacctcatgagcatgtctcaacaaggtttgaccggtcaaaaccctaaattccttgagacgacccaacaagatctcaatttaggtttttcaccacatgggatgattaggaccaacttcactgacctcatccacaacattggcaacaacaccaacaagagcaacaacaataacaatccattgattgtttcttcatgttctgccatggctacttcttctctggatctcataagaaacaatagtaacaatgggaattcttcaaattcttccttcatgggatttccagttcataatcaagatccagcatcaggagggttttcaatgcaagatcattacaagccttgcaacacaaacaccacactgctagggttttcattagatcatcatcataataatggatttcatggagggtttcaaggaggagaagaaggtggagaaggtggtgatgatgtgaatggaaggcacttgtttccttttgaggatttgaaattgccagtttcttcttcatcagcaacaattaatgtcgacattaatgaacatcagaagcgaggaagcggtagtgatgcagctgctacgtctggtgggtattggactgggatgttgagtggaggatcatggtgctaattaatttctcggtttggttgatgaagatagtactattagtggttaattattgctatttatttaattaatcaatatgttcttaatttcactttgaattttcttattggtgggtttttcctttttttttgttaacttggatttttaaggatactattgggggtgcatgcatattgaatgactttaatttgttatccctaacacagattataaatgatacattggttggtc

SEQ ID NO: 14738 - DNA, 1265 bp, Arabidopsis thaliana
  Clone ID: LIB25-073-C7_FLI
ctctttccctaaacacactgattattttctctccgacgccgccatgtctctgctctcagatctcgttaacctcaacctcaccgatgccaccgggaaaatcatcgccgaatacatatggatcggtggatctggaatggatatcagaagcaaagccaggacactaccaggaccagtgactgatccatcaaagcttcccaagtggaactacgacggatccagcaccggtcaggctgctggagaagacagtgaagtcattctataccctcaggcaatattcaaggatcccttcaggaaaggcaacaacatcctggtgatgtgtgatgcttacacaccagctggtgatcctattccaaccaacaagaggcacaacgctgctaagatcttcagccaccccgacgttgccaaggaggagccttggtatgggattgagcaagaatacactttgatgcaaaaggatgtgaactggccaattggttggcctgttggtggctaccctggccctcagggaccttactactgtggtgtgggagctgacaaagccattggtcgtgacattgtggatgctcactacaaggcctgtctttacgccggtattggtatttctggtatcaatggagaagtcatgccaggccagtgggagttccaagtcggccctgttgagggtattagttctggtgatcaagtctgggttgctcgataccttctcgagaggatcactgagatctctggtgtaattgtcagcttcgacccgaaaccagtcccgggtgactggaatggagctggagctcactgcaactacagcactaagacaatgagaaacgatggaggattagaagtgatcaagaaagcgatagggaagcttcagctgaaacacaaagaacacattgctgcttacggtgaaggaaacgagcgtcgtctcactggaaagcacgaaaccgcagacatcaacacattctcttggggagtcgcgaaccgtggagcgtcagtgagagtgggacgtgacacagagaaggaaggtaaagggtacttcgaagacagaaggccagcttctaacatggatccttacgttgtcacctccatgatcgctgagacgaccatactcggttgatgacacatttcatgatttgatttctctccaatttggttttttttttttcccttttgattgcacttttcgataataaaaaaataattcttattatgggcgtattgttgtgacattttgtgttttgtttcgaataattaaataagcgcttcttaaggtg

SEQ ID NO: 14739 - DNA, 1678 bp, Arabidopsis thaliana
  Clone ID: LIB25-077-D9_FLI
cagcttcttcataaatctctctctcttctcctctcttctcaaagatcgaacctttcgatttcagtctcttcagagttctttcgttttcatcgaaacaatggcgaagaacgttgggattttggctatggatatctatttccctcccacctgtgttcaacaggaagctttggaagcacatgatggagcaagtaaagggaaatacactattggacttggccaagattgtttagctttttgcactgagcttgaagatgttatctctatgagtttcaatgcggtgacatcactttttgagaagtataagattgaccctaaccaaatcgggcgtcttgaagtaggaagtgagactgttattgacaaaagcaagtccatcaagaccttcttgatgcagctctttgagaaatgtggaaacactgatgtcgaaggtgttgactcgaccaatgcttgctatggtggaactgcagctttgttaaactgtgtcaattgggttgagagtaactcttgggatggacgttatggcctcgtcatttgtactgacagcgcggtttatgcagaaggacccgcaaggcccactggaggagctgcagcgattgctatgttgataggacctgatgctcctatcgttttcgaaagcaaattgagagcaagccacatggctcatgtctatgacttttacaagcccaatcttgctagcgagtacccggttgttgatggtaagctttcacagacttgctacctcatggctcttgactcctgctataaacatttatgcaacaagttcgagaagatcgagggcaaagagttctccataaatgatgctgattacattgttttccattctccatacaataaacttgtacagaaaagctttgctcgtctcttgtacaacgacttcttgagaaacgcaagctccattgacgaggctgccaaagaaaagttcaccccttattcatctttgacccttgacgagagttaccaaagccgtgatcttgaaaaggtgtcacaacaaattgcgaaaccgttttatgatgctaaagtgcaaccaacgactttaataccaaaggaagtcggtaacatgtacactgcttctctctacgctgcatttgcttccctcatccacaagaaacacaatgatttggcgggaaagcgggtggttatgttctcttatggaagtggctcaaccgcaacaatgttctcattacgcctcaacgacaataagcctcctttcagcatttcaaacattgcatctgtaatggatgttggcggtaaattgaaagctagacatgagtatgcacctgagaagtttgtggagacaatgaagctaatggaacataggtatggagcaaaggactttgtgacaaccaaggagggtattatagatcttttggcaccgggaacttattatctgaaagaggttgattccttgtaccggagattctatggcaagaaaggtgaagatggatctgtagccaatggacactgattcttgaaaaggaacaaatcataaaaagtcacctgaaaatgttatgttttacttgcaccattttaatcgttttataagtttgttgttactttgatttagggacaaagaaggaatgtattctctgtttttatttactgtttgatttactctctcatgcaaatgataatttggaaattattggaatctctattttgt

SEQ ID NO: 14740 - DNA, 1069 bp, Arabidopsis thaliana
  Clone ID: LIB25-078-G1_FLI
aaatctagaaagagaaaaagtcttaaatttgtctcatttatgcgataagaaccacaattcctctatcaaaatctctctctctgacatacccagttggaaaaattcaatcttttatccctaagattcgatctttcttcttgggaagttgataaatgttcaaggaaacataaaaaagagaagatttttgaataaaggttgaagaaaaatgcaggatccagcagcatattaccagacgatgatggcgaagcaacaacaacaacaacaaccacagtttgcagagcaagaacagttaaagtgtcctcgttgtgactcaccaaacactaaattctgttactacaacaactacaatctctcacagcctcgtcacttttgcaaaagctgtcgtcgttactggactaaaggcggcgctctccgtaacgttcccgtcggtggtggttctcgtaagaacgcaaccaaacgatccacttcttcttcttcttctgcttcctctccttccaacagtagccaaaacaagaagacgaaaaacccggatccggatcctgatccacgtaattctcaaaaaccggatttggatccgacccggatgctttacgggtttccgatcggtgaccaagacgtgaagggtatggagattggtggaagctttagctcgttgttggcgaataatatgcagcttggtcttggaggaggagggatcatgcttgacgggtcgggttgggatcatccgggtatgggtttgggtttgaggagaaccgaaccgggtaataataataataacccatggaccgatctggctatgaacagagcggagaaaaactgaagaagaaaagaagagaggggtattttggtaaattatagcaaactgattttgggtgacttgagccatcacgtagacactgaacagtttcgatcatgtttatgtcattttggtaatattattattattcctcctcctactttatttctatttatataatcggttttgtcgtaattttaatcctgtgtaatagaaagaaatttctcagtttattttgtgcattctgatttgatgaaattttatgttttatgt

SEQ ID NO: 14741 - DNA, 1021 bp, Arabidopsis thaliana
  Clone ID: LIB25-079-A1_FLI
aatcaatcactctctcttctttagcgtttttattttgtcttcctcgttttcttctacctttttatattttctctcttttcagttttctctagaaaaaaacactagtaatcagtttgcgtttgataaatatttgatgtggcaaaactcttgtggatcttgatgttcaaacattcatgtctccggtgattagtgaaatccttagatctggtttaactatagactcgtcttaatcatagtacttaattttctctgtgtgttttaatatgaataataaaactgaaatgggatcttccacaagtggaaattgctcgtcggtttcaaccactggttagctaactccggttcagaatctgatctccggcaacgtgatctaatcgacgagcggaagagaaagaggaaacagtcgaacagagaatctgcgaggaggtcgaggatgaggaagcagaagcatttggatgatctcactgctcaggtgactcatctacgtaaagaaaacgctcagatcgtcgccggaatcgccgtcacgacgcagcactacgtcactatcgaggcggagaacgacattctcagagctcaggttcttgaacttaaccaccgtctccaatctcttaacgagatcgttgatttcgtcgaatcttcttcttcaggattcggtatggagaccggtcagggattattcgacggtggattattcgacggcgtgatgaatcctatgaatctagggttttataatcaaccaatcatggcttctgcttctactgctggtgatgttttcaactgttagaaaacttcacatcattatcatcgtgagtgagactaatcatcgcagcaggggtaaaactgtaatttttcttataaattatgtgatgatgctttgtttctttattttataagatggttaattagtgtttaaaactgattgtaatgatagacagtgtaagaaatgtgtgatatcatggagatggtgatgtgagtttggtacaaatattttaagatcttttctttctatatattaaaagtg

SEQ ID NO: 14742 - DNA, 906 bp, Arabidopsis thaliana
  Clone ID: LIB25-081-D3_FLI
gttcgtctctctttctacggttcaaacattaaaaagatagatggagaagaggagctctattaaaaacagaggagtacttagattaccaccagggttccgatttcacccgaccgatgaagagctagtggttcaatatttacgtcgaaaagtaaccggtttacccttaccagcttctgtaataccggaaaccgatgtttgtaaatccgatccatgggatttaccaggtgattgtgaatcagagatgtatttttttagcacgagggaagctaaatacccgaacggaaaccggtcgaaccggtctaccggttcgggttattggaaagcgactggtctcgataagcagatcggtaagaagaagcttgtcgtggggatgaagaaaactcttgttttctacaaaggtaaaccaccaaacggaacaagaactaactgggttcttcatgaatatcgtcttgttgattcacaacaagattcattatatggacagaacatgaattgggttttgtgtagagtgttcttgaagaagagaagcaatagtaatagtaagaggaaagaagatgagaaagaagaggtggagaatgagaaagagacagagacagagagagaacgtgaggaggagaacaagaagagtacttgtcccatattttatgactttatgagaaaagacacgaagaaaaagagaaggagaagaagatgctgtgatttgaatttgactcctgctacttgttgttgttgctcttcttcgacttcttcgtcgtctgtttgctcaagtgctttaactcacacatcttctaatgataatcgtcaagaaatcagttatcgggaaaataagttttgtttgtttctatagattaacaaacttgggaacaacttctattaactttaataaattagattatgattgtttcc

SEQ ID NO: 14743 - DNA, 4283 bp, Arabidopsis thaliana
  Clone ID: LIB25-088-G4_FLI
gaagaaaaagctgttcctgtgctttagcagaccttttggtagttgtcctggtcgctgatcatccctttccgacaactctgttgctctttctctcacgtttgagtcttaatcttcgattgtccttggtcatccttaagttttgtttttctctttcgattcattttccagatttctttttatagaaacccgtctctttgatttgattccccccaagaaaggaaagcaaaacaaagaagagcagctgaatcaagtaactttgtgggtgtttttgaattatctgactcgagataaagagcttcgttaaaaacggaatcttttttaaggtcgtatgctttgtttgtctctccggagattccgcgtgtgaaaagtcgtggtttttgatctctttgagatacttaaaatttccgagaaattggcggctctgtcggagataaaaagctgagatcttggagttccccatttctgattaacgattctctctgctgttacttgagctaggaagctattaacaacttgagtgaaagtttagggcttttgatgaagctctcacgcaaagagcttagctttgtataagctcagattcagattatttattgggtttattcttcagagaaagtaaagttgagtgatcatgaaagctccttcatcaaatggagtttctcctaatcctgttgaaggagaaaggagaaatataaactcagagctatggcacgcttgtgctgggccattgatttcgttgcctccagcaggaagtcttgttgtttacttccctcaaggtcacagtgagcaagtcgcggcttcaatgcagaagcagactgatttcataccaagttacccgaatcttccttccaagctcatatgcatgctccacaatgttacactgaatgctgatcctgagacggatgaggtctatgcgcagatgactcttcagccagtaaacaaatatgacagagatgcattgcttgcttctgacatgggtcttaagctaaacagacaacctaatgaatttttctgcaaaaccctcacggcgagtgacacaagtactcacggtggattttctgtaccccgacgagctgctgagaaaatctttcctgctctggatttctcgatgcaaccaccttgtcaggagcttgttgctaaggatattcatgacaacacatggactttcagacatatttatcgaggtcaaccaaaaaggcacttgctaactacaggctggagtgtgtttgtcagcacgaaaaggctctttgctggagactctgttctttttataagagatggaaaggcgcaacttctgttggggataagacgtgcaaatagacaacagcctgcactttcttcatctgtaatatcaagtgatagcatgcacatcggagttcttgcagctgcagctcatgctaatgctaataacagtcctttcaccattttctacaacccgagggctgctcctgctgagtttgtggttcctttagccaagtataccaaagcgatgtacgctcaagtttccctcggtatgcggtttagaatgatatttgagactgaagaatgtggagttcgtcggtatatgggtacagttaccggtatcagtgatcttgatccagtgagatggaaaaactctcagtggcggaatcttcagattggatgggatgagtcagctgctggtgataggcccagtcgagtttcagtttgggacattgaaccggttttaactcctttctacatatgtcctcctccatttttccgacctcgcttttctggacaacctggaatgccagatgatgagactgacatggagtctgcactgaagagagcaatgccatggcttgataatagcttagagatgaaagacccttcgagtactatctttcctggtctgagtttagttcagtggatgaatatgcagcagcagaacggccagctaccctctgctgctgcacagccaggtttcttcccatcaatgctttcgccaaccgcggcgctgcacaacaatcttggcggcactgatgatccctccaagttactgagctttcagacgccgcacggggggatttcctcctcaaatctccaatttaacaaacagaatcagcaagccccaatgtctcagttgcctcagccaccaactacgttgtcccaacaacagcagctgcagcaattgttgcactcctctttgaaccatcaacaacagcaatcgcagtctcaacaacagcaacaacaacaacagttgctgcagcagcaacaacaattgcagtctcaacaacacagcaacaacaatcaatcgcagtctcagcaacaacaacaattgctccagcagcaacaacaacaacaactgcagcaacaacatcaacaaccgttacagcaacagactcagcagcagcagctaagaacacagccattgcaatctcactcgcatccacagccacaacagttacaacaacataagttgcagcaacttcaggttccacagaatcagctttacaatggtcaacaagcagcgcagcagcatcagtcgcaacaagcatctacacatcatttgcaaccacaattagtttcgggatcaatggcaagcagtgtcatcacgcctccgtccagctcccttaatcaaagctttcaacagcaacaacaacagtctaagcaacttcaacaagcacatcaccatttaggtgctagcactagccagagtagtgtaattgaaaccagcaagtcttcatccaatctgatgtccgcaccgccgcaagagacacagttttcacgacaagtagaacagcagcagcctcctggtctcaacgggcagaatcagcaaacacttttgcagcagaaagctcaccaggcacaggcccaacagatattccagcagagtctcttggaacagccgcatatacagtttcagctgttacagagattacaacagcaacagcagcagcaatttctttcgccgcagtctcagttaccacaccatcaattgcaaagccagcagttgcaacagctgcctactctctctcaaggtcatcagtttccgtcatcttgcactaacaatggcttatcgacgttgcaaccacctcaaatgctggtgagccgacctcaggaaaaacaaaacccaccggttgggggaggggtcaaagcttattcaggcatcacagatggaggagatgcaccttcctcttcaacgtcgccttccaccaacaactgtcagatctcttcttcaggctttctcaacagaagccaaagcgggccagcgatcttgatacctgatgcagcgattgatatgtctggtaatcttgttcaggatctttacagcaaatccgatatgcggctaaaacaagaactcgtgggtcagcaaaagtccaaagctagtttaacagatcatcaactagaagcatctgcctctggaacttcttacggtttagatggaggcgaaaacaacagacaacaaaatttcttggctccaacttttggccttgacggtgattccaggaacagcttgctcggtggagctaatgttgataatggctttgtgcctgacacgctactctcgaggggatatgactcccagaaagatcttcagaacatgctttcaaactatggaggagtgacaaatgacattggtacagagatgtctacttcagctgtaagaactcaatcttttggtgtccccaatgtgcccgccatttcgaacgatctagctgtcaacgatgctggagttcttggtggtggattgtggccagctcagactcagcgaatgcgaacttatacaaaggtgcaaaaacgaggctcagtggggagatcaatagacgtcaaccgttacagaggttacgatgagctgaggcatgatctagcgcgcatgtttgggatcgaaggacagctcgaagatcctcaaacatctgactggaaacttgtttatgtcgatcatgaaaatgacatcctcctcgtcggcgatgatccatgggaagaattcgtaaactgtgttcagagcattaagatcctttcatcagctgaggttcagcagatgagcttagacgggaactttgccggtgtaccagttactaatcaagcttgtagtggcggtgacagtggcaatgcttggagaggtcattatgatgataactcagccacttcgtttaaccggtgatggcagaagagttctctcacagacaaagattcttttttcttcgttttgtaatataacttctcgttgataacatgtctcaagtttccactgggcactgtagagcatttacctgtaaaatatcttccactaagtttacacggagattttatttgctgtg

SEQ ID NO: 14744 - DNA, 598 bp, Arabidopsis thaliana
  Clone ID: LIB25-090-E11_FLI
gggaatgcgaactcatccacggacggtgggcgatgctcgctactctcggcgctctctccgtcgaatggcttaccggcgttacatggcaagacgctggcaaggtggagcttgtagatggatcgtcctacttggggcagccattacctttctcgatctcgacattgatatggatcgaggtgttagtgatcggctacatcgagttccagcgcaacgccgagcttgattcggagaagcgtttataccccggaggcaagttctttgacccgctaggtttagcggctgacccggagaagactgctcaacttcagttagctgagatcaagcatgcacgtcttgcgatggtcgccttcttgggattcgcggttcaagcggctgcaacaggtaaaggtccactcaacaattgggctactcacctcagtgatccactccacaccaccatcatcgataccttctcctcatcttaaaatcattatcatgtgagattctatttgtaacttatgtaaaaacagagctatgatgatactgaatcgactttgggcttttgcttgtttggtttatttacatgtttggcccatgacattaaattgggcttctcctt

SEQ ID NO: 14745 - DNA, 1149 bp, Arabidopsis thaliana
  Clone ID: LIB25-092-E6_FLI
ctaaactaagagggacaccgttggacactgcaagcaaatcagattcatgtaatgatacccgagatagcaaagcgaacacaaatcctattcgtaaaagcaaccggatttctaaacgacgtgttctggatgaagaactcgatagtcttgatgatgatgacgaagaaattcaatttctcagaaggatgaaaatggctaaagttgtggctgtagaagaagatgttgatgacgatgaagacaggaccagaaaacataaaaagctttccaaggtaatgaaacaaaatgtagaattcccacgtggtgtaggaacatcagaaaaatcagccaagaaggataagatgggaaaagcatttgacgatgctgattatgtcaaggatgatgatgaggaagaagaagaggctgtttcagatgttgagctagaaaataagagcgcgagaactagaagaggagctgaagaaggtcagagtgaagttaagacagaaatgactgtgactactcgtcgacgttctggacatagtggaaaccttatcgagtttcctcgtggcctacctcctgctccacctagaaagcgaaaagaaaatggattagaggttgatcagcaactaaagaaagctgaggctgcccagagacgtaaattgcaagtcgaaaaggcagctagagaatcagaggctgaggcaatcaggaagattctgggacaagactctagcagaaagaagaaggaagataagataaagaaacgccaagaagacaaggccaaggagaaggctgcagactcgattgcccgtagatcagacacagtgaagtgggtgatgggtccttcaggaaccatagtaaccttcccagaagaacttggattgccaagtatattcaactctacaccacacagttatcctccaccgcgggaaagatgtgcgggtccagaatgtacaaacccatacaaatatagagattcagagtcaaatcttccattgtgcagcctccgatgctacaaggcaatcaaaggctaagtgatggatatattgtgatcatactatttgtataatataatattttagcgttcatgtaaatactaataataaagcactatatcatactgtttgttgttaagcaagatttgaatgtttataaacatatatgaatatatcatactgt

SEQ ID NO: 14746 - DNA, 1445 bp, Arabidopsis thaliana
  Clone ID: LIB25-093-E6_FLI
gtttcaatggcttcagctacttccgtcatagcctggggttctggagaagatgggcaactaggacttggaaccgatgaagaaaaggaattggcttccgtcgtcgacgctcttgagcctttcaacgttcgctccgtcgtcggtggtagccgcaattccctcgccatttgcgatgatggcaagctgtttacatggggttggaatcaaaggggtacattaggacacccacctgagacaaaaacagaaagcaccccaagtctagttaagtctcttgccaacgtcaagattgttcaggcagctattggtggctggcattgtttagctgtcgatgatcaaggccgagcatatgcttggggtggaaatgaatatggacagtgtggtgaagagccttccaaggatgagacaggtaggcctgtgcggagggatattgtaatacctaagcgttgtgcccagcaacttacagtccgacaggtagctgcagggggtactcactctgtggttctaacccgtgaaggttatgtatggacttggggtcaaccgtggcctcccggtgacataaaacaaatttctgttcctgtaagagttcagggtcttgaaaacgttcgtctgattgctgtgggagcatttcataacttggctctgaaagaagatgggactttgtgggcttggggtaataatgaatatggacaacttggaactggagacacacaaccgagatcgtatcctattcctgtccaaggccttgacgatctcactttggttgatatcgctgcgggtggatggcattcaacagctttaaccaatgaaggagaggtttatggttggggaagaggagagcatggaaggctcgggtttggtgacaatgataagagcagtaaaatgcttccgcagaaagttaatctcttagctggagaagacatcattcaggtctcttgtggcggaactcattcagtcgctttgacaagagacggtaggatcttctcgtttggtcggggagaccacggtagactcgggtatggaagaaaagtaactacgggacaaccattggagcttcctatacacattccaccaccagaaggacggttcaaccacaccgatgaagaagacgatggaaaatggatagctaaacatgtagcttgtggtggccgacacactctagcaattgtggaatggaagtatgatcaggaggaaacagaataaccatgaagaagatagagcgagcaaaaaaacaaaaacacaagagggactctagagataagcatttgttatagagaaaaggggagcaaaagcatatggttaagcttttgacactcccatgaatgatgaatctatatgaaagaggaagaactaaatataatatcatcatgattttgtttttgataatataaaatagattgaaaaagagaaacaaataagaggaacctttgaaaggatggtttaaaccttta

SEQ ID NO: 14747 - DNA, 1176 bp, Arabidopsis thaliana
  Clone ID: LIB25-094-B8_FLI
gataaaccgatcgagaactgctcgatctgctgtgaagaccgtcagtctgagatgatgctatcattgaaatgcactcacaaattctgttcgcactgcatgaaaacgtacgttgaagggaaagtaaagacttcagaggttcccatcaggtgtcctcaagtgcaatgcaagcattatctctcagcagcggaatgcaaatcgttccttcccgtcactactttcaaatcattcgaggaagcaaatgtgtgtagtaaaaacaatgggaagatttactgcccatatcccaattgctcttttctgttagacccgcaagaatgtctatcatcaggaagggctagctcaagctcgtctactcagtcagagaatagctgctgtgtggagtgtccagtctgtgagaggtttgtgtgtgtggactgtggtgttccttggcatgcttctatgagctgtgaagagtttcagattcttccagttgatgaaagatacccagatgatattacattgcatcgcttggcaaggtataagaggtggaggcggtgtcagcaatgccgtataatgatcgagcttgctcaaggctgcaaccacatgacttgccgatgcgggcatgagttttgctactcgtgtggagcagagtacagagaagggcaacagacttgcacgtgtgctttttgggacgatgatgaagaagaacaagaaaacgcagtagaggaaaacacaattcaagaagttgagcaatggccttgggacacatttaactcaattccaactgtaatggacgcgtactcagagcaagaaagatctcagcttgctctgatccaaaggttcttagcaggtggagggtttagtctcagtgatcaccatactacttatcagtcaccgccgcctccatgtacagagtcatcatatgttgaagccgcaatgaaagatcttcatcagcttccttggcttgagaggtttgtgtctgttataagtgatgattactatgaagagtataatagccagtgaaagtagtagaattgtaatttaatagccttgaggatccggcttggtttggttcagagaggccaaacgagagtatctcactctcgaaagtaattgttgggagggttttagattcttgatgaactcaaacaaacgaattgtgatgaaactatttgcaattataagaagaagagtttgctc

SEQ ID NO: 14748 - DNA, 1260 bp, Arabidopsis thaliana
  Clone ID: LIB25-098-H3_FLI
caaaacaaagctcaatcatggctagtcggagagaagtacggtgccggtgcggcagacggatgtgggttcaaccagacgcccgtaccgtccaatgctcaacctgccacaccgtcacgcagctctactcgctagtggacatagctcgcggtgcaaaccgcataattcatgggtttcaacagctacttagacaacaccaaccgcaacatcatgaacaacaacaacaacaaatgatggctcaaccgccaccacggctgcttgagcctcttccctcgccgtttgggaagaagagagcagttttatgcggcgtgaactataagggaaaaagttatagcttgaaaggttgcatcagtgatgctaagtccatgagatctttattggttcaacaaatgggtttccctattgactctattctcatgctcacagaagatgaagccagcccgcagagaataccgacgaagagaaacattaggaaggcgatgagatggttagttgaagggaacagagcaagggactcactagtgttccatttctctggtcatggatctcagcagaatgactacaacggagacgagatcgatggtcaagatgaagccttgtgccctttagaccatgaaacagaaggaaaaatcattgatgacgagattaaccggatactcgtgaggcctctcgtccatggagctaagcttcacgctgtcatcgacgcctgtaacagcgggactgtccttgatttacccttcatttgcaggatggagaggaatggttcttatgaatgggaagaccatagatcagtcagagcttacaaaggaacagatggtggagcagctttctgtttcagtgcttgtgacgatgatgaatccagtggttacactcctgtgttcacggggaagaacacaggagccatgacttatagcttcataaaggcggtgaagacagctggaccagcacccacgtatggccacctgcttaaccttatgtgttctgcaatacgagaggcccagtctcgcctcgcctttaacggggactacacaagctctgatgcatccgcggagccactgctaacatcatctgaggaatttgacgtgtacgcgacaaagtttgtactctgaatgctgtacatatgatgctgcaaatagctcggaaacgtttctatgtgtatgtatcatgtaatgattatgttgcatagcctctctcttcttacgagcaataaagctatgaaataattgattcgctaagaaatttaaaatgaaatgaaatgtgtgg

SEQ ID NO: 14749 - DNA, 623 bp, Arabidopsis thaliana
  Clone ID: LIB25-102-G8_FLI
aaaaaaaactcactccctagaaaagtttgaaaatggcgagggcagataagaaaccagcggagaagaaaccggcagagaaaactccggcagccgaaccagcagcagcggcagagaagaaaccaaaagccggaaagaaactcccgaaggaaccagccggcgccggagacaagaagaagaagagatcaaagaagaacgttgagacatacaagatctacatcttcaaggtgttgaagcaagttcatccagatatcggaatctccagcaaagccatgggaatcatgaacagtttcatcaatgatatctttgagaaacttgctggtgagtcttcgaagcttgcgaggtacaacaagaagccgacgattacttctagggagattcagactgcggtgagacttgtgttgcctggagagttggcgaaacatgctgtttctgaagggactaaggcggttacgaagtttacgagttcttagatttggaatgtggttttgtaatggaggagaagtagtagtagtagttggaatgtgaaatagggtttatgcttttgggtatctttgagggttatgtaatatgggaattaagggttttaatttagggcgcggctatgaaatcctacttaattttcc

SEQ ID NO: 14750 - DNA, 628 bp, Arabidopsis thaliana
  Clone ID: LIB25-104-C11_FLI
tcacagcaaaaaaaactcactccctagaaaagtttgaaaatggcgaaggcagataagaaaccagcggagaagaaaccggcagagaaaactccggcagccgaaccagcagcagcggcagagaagaaaccaaaagccggaaagaaactcccgaaggaaccagccggcgccggagacaagaagaagaagagatcaaagaagaacgttgagacatacaagatctacatcttcaaggtgttgaagcaagttcatccagatatcggaatctccagcaaagccatgggaatcatgaacagtttcatcaatgatatctttgagaaacttgctggtgagtcttcgaagcttgcgaggtacaacaagaagccgacgattacttctagggagattcagactgcggtgagacttgtgttgcctggagagttggcgaaacatgctgtttctgaagggactaaggcggttacgaagtttacgagttcttagatttggaatgtggttttgtaatggaggagaagtagtagtagtagttggaatgtgaaatagggtttatgcttttgggtatctttgagggttatgtaatatgggaattagggttttaatttatggcacggctatgaaatctacttaattttcc

SEQ ID NO: 14751 - DNA, 451 bp, Arabidopsis thaliana
  Clone ID: LIB25-105-B3_FLI
cttcgaatctgatcaggagatcatacaggagcaaataactagagtgctgttggaacggctaattgtgaacaggccacatccatggggacttctaatcacattcattgagctaataaagaacccaagatatagcttctggaaacaagccttcatcagatgtgcgcctgagattgagaagctgtttgaatcggtagccagatcctgtggtggcctgaagcctgtcgacgagggaatggtttcgggaggttgggtctcagacaattctcactagctctttagctttcaacttgtatatatgtatgcgtattttgatattatgttgtaacaattatacatacagtaggagagattttaggagtcttagtttatttatttaacttcaagattcacaaacatgttttctaattacaaaaaaaaaaaaacactatttttttttttttaaaggaataat

SEQ ID NO: 14752 - DNA, 772 bp, Arabidopsis thaliana
  Clone ID: LIB25-108-A7_FLI
acatttctgcgcagagatttgccatgaacggaagaagcatgagactccctcccgggtttcggttcgatcccgatgatgaagatcttgtgttcgagtatctcgccaagaaggtcctccaccgtccaatggacttcgatctccctgagctccgttcttgcaatgttgatccatgggacttgctaggagagaagaacaaggaagtgtattacttcgtgaagaaggaagagcgagagaggaagggaagagagacgttatccggttattgggaagagtgtgaagaagaggaagtaatggaggctggtggtcgtgattgtattcatttagaaggaaggagaaagacatttgctttctttattggaaaaaaacctcgagggacaataactccatggatcatgtacgagttccgacttctttcctctagagctacaaggtggtcatcgtcccctctacctcggggtgaggtaggaaaatggagggcggtgaaagtcgtagtgaaggaagagaatgatgaagagatggtggaggatgagcacgagtctgacgagtctgatggcgaggaagttattcaaagccggtgacgaccgaggttgatgccataaatatatgtacttggttttgtggtgaatcgtttgaatttagttactattgttaggatattagggaacatctaaatgaaatatatatgcatgatttgtcttattgtcttccaagccctttggaatggaatggaatgtaattgaggatgtggtgaaagatgccacaagttgctttc

SEQ ID NO: 14753 - DNA, 859 bp, Arabidopsis thaliana
  Clone ID: LIB25-108-B7_FLI
ggtcgacccagcgttcggataaatcaatcaacaaaacaaaaaaaactctatagttagtttctctgaaaatgtacggacagtgcaatatagaatccgactacgctttgttggagtcgataacacgtcacttgctaggaggaggaggagagaacgagctgcgactcaatgagtcaacaccgagttcgtgtttcacagagagttggggaggtttgccattgaaagagaatgattcagaggacatgttggtgtacggactcctcaaagatgccttccattttgacacgtcatcatcggacttgagctgtctttttgattttccggcggttaaagtcgagccaactgagaactttacggcgatggaggagaaaccaaagaaagcgataccggttacggagacggcagtgaaggcgaagcattacagaggagtgaggcagagaccgtgggggaaattcgcggcggagatacgtgatccggcgaagaatggagctagggtttggttagggacgtttgagacggcggaagatgcggctttagcttacgatatagctgcttttaggatgcgtggttcccgcgctttattgaattttccgttgagggttaattccggtgaacctgacccggttcggatcacgtctaagagatcttcttcgtcgtcgtcgtcgtcgtcctcttctacgtcgtcgtctgaaaacgggaagttgaaacgaaggagaaaagcagagaatctgacgtcggaggtggtgcaggtgaagtgtgaggttggtgatgagacacgtgttgatgagttattggtttcataagtttgatcttgtgtgttttgtagttgaatagttttgctataaatgttgaggcaccaagt

SEQ ID NO: 14754 - DNA, 1312 bp, Arabidopsis thaliana
  Clone ID: LIB25-111-C9_FLI
atttcacaacctccacacacttccaaacacaattaaagagaggaaaaagaatcaataaccctataaataaaaaatcagacaaacagaagtttcctcttcttcttccttaagctagtaccttttgttcttgaaattagggttaatttcttttttccaaataccatcaattctccagaccataaaaactcaaaaagatcagatctttcctctgaaaaagagatacccaacttatgtttttgtgtgtctgtatatagataaacattacatacccatatttgtgtatagacataaaaagtggaaattaaggtaacaaaaagaaatgggaagaggaagagtagagctgaagaggatagagaacaaaatcaacagacaagtaacgtttgcaaagcgtaggaacggtttgttgaagaaagcttatgaattgtctgttctctgtgatgctgaagttgctctcatcatcttctccaaccgtggaaagctctatgagttttgcagctcctcaaacatgctcaagacacttgatcggtaccagaaatgcagctatggatccattgaagtcaacaacaaacctgccaaagaacttgagaacagctacagagaatatctgaagcttaagggtagatatgagaaccttcaacgtcaacagagaaatcttcttggggaggatttaggacctttgaattcaaaggagttagagcagcttgagcgtcaactggacggctctctcaagcaagttcggtccatcaagacacagtacatgcttgaccagctctcggatcttcaaaataaagagcaaatgttgcttgaaaccaatagagctttggcaatgaagctggatgatatgattggtgtgagaagtcatcatatgggaggaggaggaggatgggaaggtggtgaacagaatgttacctacgcgcatcatcaagctcagtctcagggactataccagcctcttgaatgcaatccaactctgcaaatggggtatgataatccggtatgctcagagcaaataactgcgacaacccaagctcaggcgcagcagggaaacggttacatcccggggtggatgctctgagagtcatgtgctgtgttaaagctcaccaacaaaagatcttttatatatataaaagtatagacacaagactttggatttgtagacataagtggctatatataatggtcctgaggatcttcaagacatttgtatcttttgggaatccttgcttatattaagaattcaaatgtgtggaacttgttttaacactgaaccatgacactggtttattatcatgtaatgagaaacatttgggtt

SEQ ID NO: 14755 - DNA, 1602 bp, Glycine max
  Clone ID: LIB3039-011-B5_FLI
gggtcctcacataggaaaagaagcggtgttcgaatttgaggggtgaatggatcaatcgttccttgtaatggtctcgaatctcctccagctccacaactccctggaccccaccagctccctcctctccaacgccgacggcgcatcctccctcctccactcctcctccgtcgcccctctcctcttcttcaccatcgcctccgtcctctccttcgtcgcctccacgcgcccctctccttcctcggactactctgtctctgccttccgcaccctctccacagaacacatctggtccctggaagcccctctccgcgacgcccactggcgctccctctacggcctctcctaccccgtcttcaccactgtcgtcgacaagctcaagccccacatcgccctctccaacctctccctcccctccgactacgccgtcgccatggtcctctcccgcctcgcccacggcctctccgccaaaaccctcgcctcccgctactccctcgacccctacctcgtctccaagatcaccaacatggtcacccgcctcctcgccaccaagctctaccctgagttcatcaagatccccgtcggccgccgccgcctcctcgaaaccacccaggccttcgaggaactcacctcgctccccaacatgtgcggcgccatcgacaccacccccgtccacctccgcattaaccctaaccctaacatttaccgctgccgctacggcttcccttccttgctcctccaggtcgtgtcggaccacaagaagattttctgggatgtttgcgtcaaggcccccggcggcaccgacgacgctacccacttccgcgatagcctcctctaccaccgcctcacctccggcgatgtggtgtgggacaaggtcatcagcgtccgcggccaccacgttcgcccttacgtcgttggtgactggtgcttccctctcttgccgtttctgcttaccccgttctcgcctagtggaatggggactcctgcgcagaacctgttcgatggaatgctcatgaagggaaggtctgtggttgtggaggccattgcccttctcaagggaaggtggaagattcttcaggatttgaacaccggtgttcaccacgcgccgcaaaccatcgttgcttgctgcgtgttgcataatctctgccagattgcgagggaacccgaaccagagctgtggaaggaacctgatgaaagtggacctccgccgagagtcatggacagcgagaaatcgttttattactttggggaaaacttgaggcaagccctagctgatgacttgcaccagaagctttcctcaagatagttgtttagttgttggatttggatagttacttgctttactataactgcctcgccgccaagaggaaggagggttcaatcaaacacagcaacctcaacctcatagtgtgtttttatgattttaatttctgcgcttcttgtcgttagtaaccaggtgtagaagtagattactccatgataagattgttggtggtgtctaactgtaatggcatagctctagtctcgtgaatgtgaatgtggaggagtggactactaacattgttttttattcgtatgatatatgaaatgaagtgtttcaaacct

SEQ ID NO: 14756 - DNA, 515 bp, Glycine max
  Clone ID: LIB3039-023-A5_FLI
gggccattggaacaggaaaggttgcaactcctgctcaggctcaagaggttcatgctgatttaaggaaatgggttcatgacaatgtgagtgctgaagttgctgcatctgtaagaattatctatggaggctctgtaaatggaggaaactgcaaagaattggcagcacagcccgatgttgatggatttttggttggtggtgcatccctcaaggcggaatttgtggacatcataaacgctgctactgtgaagaagaattgaaattcgtagttaggaactgataatgctgcctttcaagctgcttcggaaattgctgtttttgggttttggttctgtgctttgtggccaatgtattgaactctgtttagtacctgaataaacatgctttcctttgatctcatccataggcgatcaattggattttgattaaatttctgattgcaaaaatagtgtaactaccataacatttggtgggtaaataatgttgaacttgactgtacttttaatcgtcactttccc

SEQ ID NO: 14757 - DNA, 1578 bp, Glycine max
  Clone ID: LIB3039-051-A2_FLI
ggtgtaagacaagtttttctgaaagcaacaaatagaaaaagaggttgggacatggaatagaaattggattctggcctcctccctctgttttaaaatccatcagcagccgccaactctctcaataaaacctgctttctatttttctcaacctaaaatcccatccaccaaccttatgatgatgtcttcactctctgtttcgcgccacaaccacctcttctcgggccctctcccggcccggcccaagcccaagcccagcttttcctcttccaggatccgaatgtccctccaagaaaacggcccctccatcgccgtcgtgggcgtcaccggcgccgtcggccaggagttcctctccgtcctctccgaccgcgacttcccctacagctccatcaaaatgctcgcgtccaagcgctccgctgggcgccgcatcacctttgaggacagggactacgtcgtggaggagctgacggcggagagcttcgatggcgtcgacatcgcgctcttcagcgccggcggctccattagcaagtacttcggccccatcgccgtcgatcggggaacggtggtcgtcgacaacagctccgcgtttcggatggacgagaatgtcccattggtaattcccgaagtgaacccggaagcaatgcaaaacatcaaagccggaactggaaagggcgcactcattgctaaccctaattgctccaccattatatgcttgatggctgctacccctcttcatcgacgtgccaaggtgttacgtatggttgttagtacctatcaggctgctagtggtgcgggtgctgctgcaatggaagagcttcagctgcaaactcgtgaggtgttggaaggaaaaccgcccacttgtaaaatatttaaccgacagtatgcttttaatctattctcgcataatgcgtctgttctttcaaatggatataatgaagaagaaatgaaaatggtcaaggagaccaggaaaatctggaataataaggacgttaaagtaactgccacatgcatacgagttcctgtcatgcgagctcatgctgagagtgtgaatcttcaatttgaaacaccccttgatgaggacactgcaagagatattctgaagaatgctccaggtgtagtggttattgatgatcgtgaatccaatcattttcctactccattggaagtttcaaacaaggatgatgttgctgttggtaggattcgccaggacctatctcaggatgggaaccaagggttggacatctttgtatgtggggatcaaattcgcaagggagctgcacttaacgcaatccagattgctgagatgttgctatgagatctggtttttaaaggatgtggtacttgaagactatgcttcttttgaaacagttttgtatcttctagttgtatgaggttattcatttcttttgtgagaaagtacgaggatcttttcaacgatgtggtagcacactaactggaaacagtttttttaaggttttgtgcttaatttctgtaatccttatcaccgggaataacaataattggttatggcaaaggagaatcacctaatgtttcatcttttgaataaagaatttgttcact

SEQ ID NO: 14758 - DNA, 1697 bp, Glycine max
  Clone ID: LIB3039-052-E4_FLI
gaattcgatttttttttcctttcatttctaacctaattttcgtttccatccaaaaaatggctctatcgcgcgtggctcaatcgtcgccatcacagtcgaatcttttgaaacccctctcgtcgtacttatccctacgacgccgttcggtgtcgacctcgtcggagcccctcaccgtggagacctcggtgcccttcacctcccacaactgcgatgcgcctccacgcgccgtggagacgtcctcggcggagctcttctcgttcttccgtgacatggcgctgatgcggcggatggagatcgcggcggactcgctctacaaggccaagctcatacgcggcttctgccacccctacgatggccaggaggccgtcgccgtcggcatggaggccgccatcacgcgcaaggattgtatcatcaccgcctaccgcgaccactgcaccttcctcgcccgcggtggaaccctaatcgaggtcttcgctgagctcatgggccgccgcgacggctgctccaaggggaaaggaggatccatgcacttttaccgcaaagaaggtggcttctacggtggccatggaattgttggggcgcaggttccgctggggtgtggcttggcttttgctcagaagtattgtaaggatgagaatgttacgttttctatgtacggcgatggtgctgccaatcaggggcagttgttcgaggcgcttaacatttctgcgctttgggatctcccctccattttggtctgcgagaataatcactatggaatggggacagctgagtggagagctgctaagagtcctagttattacaagcgtggggattatgttcctggattgaaggtagatggcatggatgctcttgctgtgaaacaagcttgtaaatttgcaaaggagtttgctttaaagaatggtcccattattctcgagatggacacatacagataccatggccactccatgtctgatcctggcagcacataccgtacacgtgatgagatttctggtgtaagacaggagcgtgatccaattgagagagtaagaaagctactattgactcacgagattgctactgaaaaggagctaaaggacattgaaaaggaaataagaaaagaagtagatgaagccattgccaaagctaaggaaagtcaaatgccagagccatctgatttatttaccaatgtatatgtaaaaggcttcggtgtcgaggcttgtggcgcggataggaaagaacttagggctactttgccctgatggaaaacttttccttttccttagttccttagttttggacaaatcaaaataatgaagaataaaaggttcagaagatcatctctgcatatttgttgagctttcccctaattgtatatgaaattgattcttcaatagcaatgaggcagaaattaatggtttgccattaattttggaggatctaacactcatattacctcaattgattttgcgagcaactagtctcctgcaaatttggaggatttcgttatgcaaaacctccatggttggcaaaattttgccattattttaattttaggtattcaccagattgtgttcaaatgaaatcttttttttttttggctattaacaattcatgtttctttggacagttaaaaatatgatgcctgtacattgcacagattgaattgttgatacaggttggattatgttattttatttttctgctctttacag

SEQ ID NO: 14759 - DNA, 587 bp, Glycine max
  Clone ID: LIB3040-026-H3_FLI
aaagcagtcatcaaagaaactctgagattacatcccgcaactcccgtattgattccaagggaatcaatgcaagacaccaaagtgatgggttatgacattgcagctggcacacaagtactagttaacgcgtgggcgatttcggtggatccttcatattgggatcagcctctggagtttcaaccagagagacacttgaacagttcaattgatatcaaaggacatgattttcaatttatcccttttggagctggaaggagggggtgtcctggaatagcatttgccatgcttctgaatgagttggtccttgcaaacattgtgcaccaatttgattgggcagttcctggtggacttttgggggaaaaggcattggatttgtctgaaactactggattgtctgttcacaaaaaattaccacttatggcacttgcttcacctcatcatctgtcacaaaattaactagtggatcagttatgtgttctgatcataatctttctgttatctatcaattatgccaaacttaatttgccagtgtttctgttagagatttttaactagttttctactcataaaagatctggagtattcgt

SEQ ID NO: 14760 - DNA, 1246 bp, Glycine max
  Clone ID: LIB3040-028-E5_FLI
ggttcttttcatgcatgtgttgaatgcacatgctggtctccggtccggttagggcatttctgggaccttaaatcaccaatttctcacccaatcaattccaattaagctgagggtgtttctgatctatatgtgatgggtgctccgaagcagaaatggactgcagaagaggaacaagcacttaaagccggagttgtcaagcatggtgttggtaaatggcgcaccatactgaaggatccagagtttagtagtgtcttgtacctgcggtcaaatgtggatctcaaggataaatggagaaatctgagtgtgatggcaaatggatggagctctagggaaaaatctaggttatcagtcagaagggtgcatcaggtcccgagacaggatgagaactctatggctatcactgctgttgctccaagtgatgaagaaattgttgatgttaagcctcttcaagtttctagagatatggtgcatattcctggtccaaagaggtctaatttaagtttggataaacttataatggaagcgatcacttgcttgaaggagaatggtggttctaataagacagctattgcagctttcatagaggtaaatcgcaagtatagaattgcacctatagcagcatattctgacagaagaagaaactcatccgtgttatatttggaagggaggcagaaagcctctatgaaaattgacagggatgagaccaacatccttactagatctcagatagatttagagttagaaaagataaggtctatgactccacaagaggcagctgcatttgctgctcgagcagttgctgaagcagaagccgccattgcagaagcagaggaggcagcaaaggaagcagaggcagcagaagctgatgcggaggctgcacaagcttttgcagatgctacaacaaaatcagcgaaagggagaaaatccccaaagaggatccatgcttgatggaagtttgaagaattagactcgaggagagatgaacggtggaattgagtaggacagccagccagctaaatatcatttgctggtatagtctatagtttgcaatattggaggctcttgtgactatgcaagtttcacctttattaggatatatttttggatattgaaatatccttcttgtagatagaaccattgtttgaatctttattgtaatttctttatagctgttgttaccttagcgctctgtccatgtacttgttgtttatagaaagtagatgtttagatgaatgggaattcgtcc

SEQ ID NO: 14761 - DNA, 697 bp, Glycine max
  Clone ID: LIB3040-029-E4_FLI
tggtctgcgcctgatttctcagttctctcacacactcattcggtgctccgaatctcagattctagggttagggttcccaatttctccaccgatcagaaaatgagttcaactggtggttctaccaagggcggaaggggcaagcccaaagcctccaaatccgtttcaagatcgcagaaagctggtctccaattccccgttggaagaatcgctcgattccttaaggctgggaaatacgccgagcgtgttggtgctggtgctcctgtgtacctctctgcagtgctcgaatatctcgctgctgaggttttggaattggctgggaatgctgctagggataacaagaagaaccgtattgttcctaggcacattcagcttgctgtgaggaacgatgaggaactgagcaagcttttggggtctgttaccattgccaacggaggtgtcttgccgaacattcaccagactctgcttcccaagaaggctggaaaggggaagggcgaaattggatctgcctctcaagagttttagggtttttgttttacccatttggactatagttttgattttattgcgtttgtaacatacatgtttcggttattttctacatgtcttctctgagaaattaggtgcttctcagtctgatgaactggatggtgtattatcacttttgaatcagatgtgaatgtgaagtgctatttggatt

SEQ ID NO: 14762 - DNA, 882 bp, Glycine max
  Clone ID: LIB3049-042-D6_FLI
gatgtcatagtattatcattcattctcatctttctctcttctctctccacccaaaccctaactcccgaccctgttcccctctcgtatccgtcatgaaaggaggaaagtccaagaccgaatctaagagagccgatcccaaacttgctgtgaataagaagggagccgccaccaaggctaggaaacccgccggcaaggggaaggcagcgaaagaccctaacaagccaaagaggcctccaagtgctttcttcgttttcatggaggagttcaggaaggtattcaacaaagaacatcctgaaaacaaagcagtgtctgctgtgggcaaagctgctggagcaaaatggaagaccatgtctgatgctgaaaaagcaccttatgtggcaaagtctgagaaaaggaaagtggagtacgagaagaacatgagagcctataacaagaaacaggcggaaggtcctactggtggggatgaagaagaatctgagaagtctgtatctgaggtgaatgatgaagatgatgatgaggaaggcagtggcgaggaagaggatgacgattggagaatggactgataattgcatttatgtaggttctgatgattttgatcatctgttgtaggtggtctggtcatttcctgataaacatatttcttgcttccaaaaaatatttccctgctccctccgtaaattggttgtctttccaaaacgtgaatagtttaaagaagggagttctttatttgtacttctaaatccaactgtttagttaaggggtgtttatctcttgtagagcttttagtttgatttagagttttcttgttgaaatctggttaagtttgtatcaatataattggcttatcattcgctttctgctgtatatatggtatttatgttg

SEQ ID NO: 14763 - DNA, 901 bp, Glycine max
  Clone ID: LIB3049-043-A1_FLI
gacgcagcgagcgagccacgaaaatattcatcacacagggttttggtttattattccaatttttggttttcccttttgttggatattagagtgtgtaagaaagagaagagagagaaatgggaaggggaagagtggagttgaagagaattgagaacaagatcaacaggcaagtgacctttgcaaaacgaaggaacgggcttttgaagaaagcttacgagctttccgttctttgtgatgccgaggttgctctcatcatcttctccaatagaggaaaactgtacgagttctgcagcagttcaagcatgctcaaaacgctagagaggtaccagaaatgtaactatggtgcgcctgaggctaatgtgtctacacgggaagccttggagttaagcagtcaacaggagtacttgaagctgaaggcacgttatgaggccctacaacggtcccagaggaaccttatgggagaagatcttggtcctttaagcagcaaagagctcgagtctcttgaaaggcagctagattcgtccttgaagcaaataagatcaaccaggacccagttcatgttggatcagctctctgatcttcaacgtaaggaacacttgctaagtgaggctaacaggtctctcagacaaaggttggaagggtatcaaataaatccactccaactgaatcccggagttgaagagatgggatatggcaggcatccagctcaaactcatggtgaagccctctttcaacaaatggagtgtgagccaacgttacaaattgggtatcagcctgatccagtatcagtggtgacagcaggcccaagcatgagcaattacatggcaggatggttaccatagtttgcgtttcctgcataagatccactgcaccagcacatttgccgttccaattttatttg

SEQ ID NO: 14764 - DNA, 663 bp, Glycine max
  Clone ID: LIB3049-043-G8_FLI
gatcgcacaacattattctttcgcaccttgcagaatcaattttctctctcaatcgtctttcatggctcgtaccaagcaaaccgctcgcaaatccaccggtgggaaggctcctaggaagcaactcgccaccaaggctgcaagaaaatctgcacctaccaccggtggagtcaagaagcctcatcgctatcgtcctggaactgttgctcttcgtgagatccgaaaataccaaaagagcacagagcttctgatccgcaagctcccctttcagcgtcttgttcgtgaaatcgcgcaagacttcaagactgatttgaggttccagagtcacgcggttcttgcgcttcaggaagctgcggaggcttacttggtgggtttgtttgaagacaccaacctttgtgcgatccacgccaagagagtgaccatcatgcccaaggacattcaactcgcacgccgcatccgtggagaacgtgcttaggcttataataatgataatagcatagttgtcgccttttcgttttgcaatacatttcttgtttcttagggttttagtgttattttccagtttgttatgttttgtatagaagatagatatatcaacagcaacagcttcttaccatttgtagtgtgcctaaacggaaatatttgaataattagattcactttggc

SEQ ID NO: 14765 - DNA, 1252 bp, Glycine max
  Clone ID: LIB3049-044-A10_FLI
agagatggattgatgaaaattcacatgccaggctacttcagctcgatcagcaagggtgtggcaaccattatggcctcttactccagttggaatggagtaaaaatgcatgctcaccatgatcttattactggcttcctcaagaatactctccatttcaagggctttgtcatttcagattttgagggtcttgataggatcacctctccacctcgtgcaaatatcacttattcaattgaagcaggagtttctgctggcattgacatgttcatggttccaaagcattacacagaattcatagatgttctaaccatgttggtgaaaaataagcacattcccatgagtcgaattgatgatgcagtgggaagaattttgtgggttaagttgatgatgggtatttttgagaacccttttgctgactacagtttggtcaaatatttaggaatccaggaacacagaaacttggctagggaagcagtaaggaaatcaatggtccttctgaaaaatggtgaatctgctgacaagcctttattgcctcttcctaaaaagtcgccaaaaatacttgttgcgggaagccatgctgataatctaggatatcagtgtggtggctggaccatagaatggcaaggagttagtggaaacaatcttctcaaagggactacaattctcactgctgtgaaaaacactgttgatcctgaaaccacagtggtctacaaggagaaccctgatgtagagtttgtcaaatccaatggattttcctatgccatagttatagtaggggagcacccttatgctgaaatgtatggtgacagcatgaacttgacaatcccagaacctggtcctaagatcataacaaatgtctgtggagcaataaaatgcgtggttatcattatttctggtcgtcctgtagttattgaaccatatgttggtttaatagatgcacttgttgctgcatggctcccaggtagcgaaggccaaggtgtggctgatgttttatatggcggctatggtttcactggaaagcttccaaggacatggttcaaaactgttgatcaactgccaatgaatgttggagatcctcactatgatcccctcttcccatttgggtttggcctttctaccaaaccttctaaggccctttattcctcttgatgtatatttttttatgtaaaactataaacaataaaagagggtaggatttatttactaacatgtgataaatattacaaatttaccttaattatattatctttgc

SEQ ID NO: 14766 - DNA, 519 bp, Glycine max
  Clone ID: LIB3049-044-E12_FLI
gactaatgaaatgtacaatggttgttctgatgattctgcttatgggagtgatgagaacagcactgacactgattcttatcctgctccaaaggctcacagcaacaggaacaacctcagtgtccagaaggggaagaagaagaagaaattgaagtcaaagaaaagcaaggcacatgagtgtccaatttgcaacaagattttcaggtcaggccaagccttggggggtcacaaaaggtcccattttgttgggggttctgaggaaaacacacttgtgataaggccaagtgctcctcctgctgctgttccttgcctcattgatctcaatctaccagcaccggttgatgaatagggagaaagaaatgttggtgccaaaatcctggttttttttttttgcatcattttgaagcatcttctgttgaggtagctgaatgtctctggagttctgaaaatgtcttgtctttatccccatatgatgaaagcaatgacaatgtacagacaagtgggtaattggtttttgttccc

SEQ ID NO: 14767 - DNA, 1486 bp, Glycine max
  Clone ID: LIB3049-044-G2_FLI
gactccacaaaattcatgattcatcaacgacacgacacccaaaatgaagctagaagaatcggtgtccaactccaacatcactgccccgctccttccaccggaagatccgagtccgagtccgcaaaatggatcaatctccggagcggtgttcaacataacaaccaccatgatcggtgccggaatcatgtccattccggcgaccatgaaggttttaggcatagttccggggttggtggtgatcgtgttggtggcactgataacagatgtgactgtggagtttatgctaaggtacacaagttccggtaaatcctccacttacgcgggcatgatggccgagtcctttggctccataggatccctcgcagttaagatttgcgtcatcataaccaatttgggggttcttatcatctatttcattattcttggagacgtgctctgtggaaatgagtcgaacggtatcacacacttgggtattctacaagaatggtttggcatcaactggttgacctctcgtgcttttgctcttctttttgttgcactcttcataatgcttccacttgttatgttacgtcgtgttgattcactgaggtatagttctgcaatatcaatcctactagcattggtgtttgttgtaatatgctcatcaatggcggttagtgcattgttgtctggaaaaagtcagacaccgagaatagtgcctgatttctctcaagtcactgtccttgaccttttcaccgctataccagtgtttgtcacgggtttcggtttccatgtcaatgttcatcctatcagagcagagcttataaaagttgaacacatgggtttggctgcacggatttcgttgataatttgcgtggctatttactttgctattggtttctttgggtaccttttatttggggactccatcatgccagatgtgctggtgaactttgaccaaaactcccatacaagtactggtcgattactcaatgccattgttcggttaagttatgcactccatcttgcacttgtgttcccaatcatgaactattccctgagggccaacatagatgaactaattttctcaaacaaaaataagcctccccttgcatcagacaccccaagatttgtgtcactcactttgactttgctagccctcacatacttggtcgctgtgaccatcccaaacatatggtatttttttcagttcttgggatccacaaccattgtttccacctcattcatcttccctgctgcaattgttctcagggacatgcatgggatatcaaagacaaaagatcaagtgatggcaatagtggtgattgttttggctgtagggacaagcggaattgctatatggacgaatttgaatggttcaggggatgatcaatgattaaccatgatgatgttatataatacccagtcttctcaaacttggtgattttttttagtaattattatcatataaaaaatcaatctatcttttcggttttctttgttttcg

SEQ ID NO: 14768 - DNA, 1155 bp, Glycine max
  Clone ID: LIB3051-048-H11_FLI
ggagaacgaaaccttcatatgcacggtccccatgtttcacatatacggcctggtcgccttcgccacggggcttctggcttccggctccaccatcgtcgtgctctccaagttcgagatgcacgacatgctctcctcgatcgagaggttccgcgccacttacctcccgctcgtgccgcccattctggtggccatgctcaacaacgccgccgctatcaagggcaagtacgatatcacgtcgctgcattcggtgctctccggtggggctccgttgagcaaggaggtcatagagggctttgtggccaagtatcccaacgtcaccatccttcagggttatggtttgacggaatccaccggcgttggggcctccaccgactccttggaggagagtcgaaggtacggcacggcggggctcttgtctccggccacccaggctatgatcgtcgatcctgaatccggccaatcgcttccggttaaccgcaccggggagctctggctcaggggtcccaccatcatgaaaggttatttcagtaacgaagaagcaaccacatcaacccttgattcaaaaggatggttaagaacaggggatatttgttacattgacaatgatggattcatatttattgtggatcggttaaaggagctcatcaaatacaagggatatcaggttcctccagcagaactagaggccttgctactgactcatcctgctattttagatgccgctgttatcccgtatccagataaggaagctgggcagcatccaatggcatacgtggtgaggaaggctggaagtagcttatcagaaactcaagttatggattttgttgcaggacaggtggctccgtacaagcggattcgaaaagtggcatttatttcctccatacccaaaaatccatctggcaaaattcttcggaaggatctcatcaaactcgcaacgtctaaactctgaatagatgagctttttcgtaatatattttttctatcggagttggacaagtgaggaaataatctttagctccttttttgctgtaattttctggcttgtttacttttgctgctttcatattatctgttctttgttcaacagtctattgtaatttgtagagaacaaagtgctgtgagtacaccttataggcaataaaattgtctctttgt

SEQ ID NO: 14769 - DNA, 1999 bp, Glycine max
  Clone ID: LIB3051-050-G2_FLI
tggaattttgcacctttttaggtcataatcctttcaaaattccgtgcttcggcttgacatcgatttctctgcacttcccaaagaattggttgtgcagtccttgttttcagacaccgtctttaagttactgtcgacgtttgagttctataatgcccagtgattcttctgtaatctccaatggacacagcaatggcagtgtcaatccactacctaacctgcaaaggacttaccaagtggtagtggctgccactcaagattggggcatcggtaaggatgggaaattaccctggagattgcctactgatctcaagttttttaaggagatcactatgaaaacatctgatcctgggaagaagaatgccattgtaatgggaaggaaaacatgggagagcatccctcttgagtacaggcctctttctggtcgccttaatgttgttcttactcgctcaggaagttttgatattgcaacagcagagaatgttgttatatgtggaagcatgtcttctgcattggaactgttagctgcttctccttactctctgtcaattgagaaagtttttgttatagggggtggtcagatatttagagaggctctcaatgtgcctggatgtgaagctatccacttaacggaaattcagtcaagcattgagtgtgacacttttatgcctccagttgatttcactatatttcggccatggtactcatcctttcctaaagtggaaaacaacatccgctattctttcaccacttatgtgcgtgtacggagttctgctgcagagtccgcgggtcagaacattgatccacttcttgataataattctgagtccatgaaatttgaggtcaaggatttttcttttcttcctaaaatgatttctgagagacatgaggagtatctgtatcttaagctggttcaggacatcattgctgaaggtacaactaagggtgataggacagggactggtaccttgtcaaaatttggttgccagatgaggttcaatctgcgtggaaactttcctcttctaacaactaagaaagtattttggcgaggggttgttgaagagcttctttggtttatcagtggctcaacaaatgccaaggtgctacaggaaaaaggcattcatatttgggatggcaatgcatccagagaataccttgatggtgttggtttgacagagcgggaggagggtgacttgggacctgtttatgggtttcaatggaggcactttggtgccagatatactgacatgcatcatgactactccggccaagggtttgatcaacttttagatgttattaacaagataaagcgtaatcctgatgatcggcgaatcattctctctgcatggaatccagtggatcttaaattaatggcacttccaccctgccacatgtttgcacagttttatgtagcacacggggagttatcatgtcaaatgtatcagcgatctgctgatatgggcctgggcattccatttaatattgcatcttatgcccttttgacatgcatgattgctcatgtttgtgatctcattcctggtgattttattcatgttattggggatgctcatatttaccgcaatcacgtgaggcctttgcaggagcagctccataaccagccaaagccttttccaactttgaagataaatccaaagaagaaagatatagattcttttgtggctgctgatttcaagctcataggctatgatcctcaccagaagattgatatgaagctgtctgtctaaaatctggggattctcactccttcaggcacaaccttaggaagattatgttaaatctgtgtacaattaaagaacatatcgtagcacatacttcatcgcataaatactgttacttaagtgggaattctctggctccacctgttatgcctctaaggtgatttagattaacttaatttccttcctttccaaggtacacgctctattgtacttttgagggatctgaaactcgatgtttaagataaagccggtgtttttatgtg

SEQ ID NO: 14770 - DNA, 2508 bp, Arabidopsis thaliana
  Clone ID: LIB25-113-F12_FLI
cgatcatattcaatccgaaggtttcggctctggtgcgttttctgacgttgttgttaaagctatgggatccagttaccatctccaccgcttgattctatctcgcagctcctacttcaggactatgctgcaaggtccatggaaagaagctagctctcctgttgtgaacttacttgtggatgataaaaatgttaatggagacgcaatttctgttgctttagcttatctgtatgggtaccatcctaagctggatgatgataatgcctttcgtgttttagctgctgcttcttttcttgaccttcaggatttgtgtgcgatatgcactgattttattatttctgagctgaggacttcaaacttcctggcatatcaggtatttgctgagagccaagactatggcattcatggagaacgtgtaaggaatgcttgctggggttatctctgtcaaagtggtgccgtggaactgagagagatgctgccgaaactctcagcacagactctatgtgcattgctgacatctgatgaactatgggtgcctagtgaagaaaaacggtttgaactggcattgtacgccttcatagcaaatagtgctctctccaactcagatcattccaatcaagattccagatttgagagagagacaagctttcctttggattctgctatatcaaaggggaaaaatgtgatggatgatttctctttcaggagtttggactgtaagttaggtcatttagatatagaagccgacctacgagatgctagtgatgatgtgattgttccactcacagaaggtgttattgatttccaaagaggtgtttcaggttcaaacctcgtgtttcagcaatcttctaactcacaaacgaattttggtcgtccttgcaccagtgttgttgataagacagaaggcagtgtggtggcaattgaaggaccttctgaagaagcataccatttgagtaatgatagttggttatcaggagcagactctagaaattctcctactttaggttcttcctctgatggtttcgttgtcaatgagtggggtaactgtggtgtttctgctctaacctggggtggacgggttgtggggacaagacagggtacaggctctgttaaaggaaaatatggatttactgaggaagaatacagtgcatttgtcaacacttttgaaggtggttcacttctgtattgcaatatgtcttttgaaatactattgaacgcaagaaaagaacttgaagagttgggtttcccttgtaaagccgtgaatgatggcctctggttgcagatgcttctcagtcaaagggtgcaggaagttgctgccaacacatgcaaaaggtgttgccttatcagtattgcatgtgcgtgtaaacaaggatttggggtttcacatggtgcaaccttcaacaattattattgccaagaaaacgtgcagaacaatatgatgggagacatggataacgtatatgtgccggaatcttctcaaggcgatgggataggcatctttaagcctgtcaggatcagtgtcagaggacaacatattgatggacttgccggcattggatgcgaagctacatttgtaccaccacctgcttggcctcctactccttttgtgtactctcgtgtccctattaacagaaatggtcagcaatctattgctagtgatggttctgaaggtagaattgatcagagtggagaaatttcaaaagatgggctgacagctcttgttgggttgagccaagggacaagcggtgttggtaacaatcctcgtggagaacaaactgagggagggcgtggcagtggagctactgttggaatgtcagaaccaaaggaaccttcagtaggtactgagtgggagaacgcaagttgtaccatatcacttgatacaaagacacctttgtgtcactttcctccctttcgttttggagttgaatttgaagatgtccacagactcgctaacggtcatgtagagcattctcctgaattcttctatgctggttctctgtggaagattagcatacaggctttcaatgatgaagatcctcaaggacgccgaactatcggattatttcttcaccgccgcaaagcagagatagtggattcagtaaggaaggtccatgtttacatagatcctcgtgacaaagtgactgcacgttaccagcttatctgcccgtcgaaaagagaagtgatgttgtttgggagctttaaacagagaggaactcttctgcctaaagctcccaaagggtggggatggcgcaccgcactgctctttgatgagctctcggaacttctccagaacggtgctctgagagtggctgctgttgttcagctcgtttagaggtgtcttaaacccgagagttgtatgtaaaaaaactcaacaaaatccacattttgaagttaaccctcttaataaatagtatatattctacttccttaaactgtggatgtgtttgtataaatgagtcacagaaactatttgagagaaatatcaagttttcagaataagaatgtcttttt

SEQ ID NO: 14771 - DNA, 1374 bp, Arabidopsis thaliana
  Clone ID: LIB25-117-D5_FLI
ggaacgatttacgaatccagatttgttgaatcgtcacaagcagactccgttaatgttggctgcgatgtatggaagaatctcttgtgtgaagaagctagctgaagttggagctaatattttgatgtttgattctgtgaatcgaagaacatgtttgcattacgctgcttattatggacatgctaattgtgttcaagctattctctctgctgctcaatcaagtcctgttgctgtccattggggatatgcgagatttgtgaacataagagatgataaaggagcgactccgttgcatttagctgctcgacagagacgacctgaatgtgtgaatgttttgttggatagtggttctcttgtttgtgcatctactagtgtatatggttctccaggaagcacacctcttcatttagcagctagaagtggatctatagattgtgtcagaaagttgcttgcttggggtgctgatcgtcttcaacgagacgcttctgggagaataccttatgtggttgcgatgaagcataagcatggagcatgtggagccttacttaatccgtcctctgcagagccacttgtttggccatcaccattaaagttcatcagtgagcttaatgacgaggcgaaacttctcttagagcaggctttaatggaggctaacagggagagagagaaaaccatcctcaaaggaacagcttattccttaccatcaccctctttctctgacacggatgataacatgtccgaggtgagtgatacggaactgtgctgcatttgctttgagcaagtatgtacaattgaagttaaagactgtggtcaccaaatgtgtgcacaatgcacacttgcactgtgctgtcacaacaaaccaaacccaacgacctcaaccgtgactccaccggtctgtccgttctgtagaagcaccattgcatgtttagtcgtcgcccagaacaacaacaacaacaacgaaaagagcaaaagcctagatgatgttgttgttgttgatcgtgaggcaggtgatgttagctcctccaaattcagaaaacatagaagatcaataaaccttggcgaagaaagcagcagcttcatgggactatcaactattggatcattcggtaggataaccggccgtggctcgggaaggatcgcagccgaaaacgagctgatggacaaaccaatattgtgagggatcgattccgttttaagggacattttggggcatgggggagcaataaaaaagatgaggggatgaaattgtgagaatgtataaaatatagatgaatttatgttagatcttttgttgaagggaggaagattgaaataaggaaaaagatgtggggaggtgtgtaatgcaaggatttgttgtttctttgattaagtttggcc

SEQ ID NO: 14772 - DNA, 2120 bp, Glycine max
  Clone ID: LIB3-01-B9_FLI
aatcctgaacgccaaagactgaggcgaatatttagctgaaaataaattcacaccacaacccaacacaaacactttctctttctttctctcttcaatcttgatcccattttttttcttctctcttccttcctttggaattgaattcagcatcagcatgaacagcaggtctcaggatcaacgctcaagacctgccaagccagccacaatccatggctgcgccctctccggcgacctcgttggactccagaggctacttcgagacaacccttctcttctcaacgagagaaaccctgttatggcacagacaccacttcatgtctctgctggtcacaataggactgagatagttaaatttcttcttgattggcaagggacagataaggttgagatggaggccaagaatatgtatggagaaactccattgcacatggcagctaagaatgggtgcaatgaagccgcacaattacttcttgcttgtggtgctactgttgaagccagagcaaataacggtatgacacctttacatcttgctgtttggtactcactacgagcagaagaattcttaactgtgaaaacattgcttgagtacaatgctgattgcagtgccaaggacgatgagggaatgactcctttaaatcatctatcccaaggcccgggaactgagaaacttagggaactattactctggcatcttgaagaacaaaggaagcagcgagccattgaggcatgcagtgaaaccaaagctaaaatggatgagcttgagaaggaactatcaaatattgtcggtcttaatgatctaaaagtacaacttcgcaagtgggcaaagggcatgcttttggatgagaaacgtagatctcttggtctgcatgttggcaggagaagaccacctcatatggcctttctaggcaaccctggaacaggtaaaactatggtagcacggattcttggaaaattactccatatggtgggaattctacccactgataaagtgacagaagtacagcggactgatttagttggtgaatttgttgggcacactggtccaaaaacaaggaggaagatcaaggaagcagaggggggaattctttttgttgatgaagcctatagattgataccaatgcaaaagtccgacgataaggactatgggttggaagccttagaggagattatgtctgtcatggacagtggcaagattgtagtaatatttgctggctactgtgagccaatgaagcgagtcattgcttctaacgaaggtttctgtagacgggtgaccaagttttttcaatttaatgatttcaactcagaagaactagcgcaaatccttcacatcaagatgaataatttagctgaagatagtttgctatatggatttatgttgcatcccgattgctgtataaaagccttagcagcattgatagagagggaaacaacagaaaagcaacgtaaagagacaaatggaggtttggtagataccatgttggttaatgctagagaaaatttagacctaaggctcagctttgactgtatggatacagaagaacttcttaccatcacattggtagatttagaagcaggccttcagcaattaacacagtaatcattctttgcaatctagtagatattttggagagattcatttcagcttacctcaattttcacacaagtttgacatctgcacaatgaggaacatatcatgaataagtttggtacaataggttgattcttttgggagttcttttccttgtattttgtaattgataatattatataggcttcattcatgtactttgctatatttttttttatctgaataatgatttgtagacacctaatgcaaatctataccttgagagaaagaactagaagagagagaagtgattatttgatgagtgatatgatgtgattaagaagggagaggaagatagggagaaatgaagggtcaaatgaaatgagtgtttaggtagctatgtatcattgttgtttttatctgcctttcatttgtattcattgtatgttattattcattattgtgggggagtaacgaaatcttcttttatttgtggctgtcccaaaatattttcattattattaaccattaatgttaattggtgatgcttttt

SEQ ID NO: 14773 - DNA, 1034 bp, Glycine max
  Clone ID: LIB3027-001-B11_FLI
gattaataacactcgccatacccgttaacaagcctggtagatttgagagtttcttcctatctagcactgaagctcaacaatcctacttgcaaggattcagcaggaacattttagaggcctcctacgataccaaattcgaggagataaacaaggttctgtttagtagagaggaagggcagcagcaaggggagcagaggctgcaagagagcgtgattgtggaaatctcgaaggaacagattcgggcactgagcaaacgtgccaaatctagttcaaggaaaaccatttcttctgaagataaaccttttaacttgagaagccgcgaccccatctactccaacaagcttggcaagttctttgagatcaccccagagaaaaacccccagcttcgggacttggatatcttcctcagtattgtggatatgaacgagggagctcttcttctaccacacttcaattcaaaggcgatagtgatactggtaattaatgaaggagatgcaaacattgaacttgttggcctaaaagaacaacaacaggagcagcaacaggaagagcaacctttggaagtgcggaaatatagagccgaattgtctgaacaagatatatttgtaatcccagcaggttatccagttgtggtcaacgctacctcaaatctgaatttctttgctattggtattaatgccgagaacaaccagaggaacttcctcgcaggttcgcaagacaatgtgataagccagatacctagtcaagtgcaggagcttgcattccctgggtctgcacaagctgttgagaagctattaaagaaccaaagagaatcctactttgtggatgctcagcctaagaagaaagaggaggggaataagggaagaaagggtcctttgtcttcaattttgagggctttttactgaataagtatgtactaaaatgtatgctgtaatagctcatagtgagcgaggaaagtatcgggctatgtaactatgactagagcttcaactatgaataaataaatcgacagcatatgatgcttttgttttgtg

SEQ ID NO: 14774 - DNA, 1083 bp, Glycine max
  Clone ID: LIB3027-005-A1_FLI
aggaaccacatactatgtggtcaaccctgacaacaacgaaaatctcagattaataacactcgccatacccgttaacaagcctggtagatttgagagtttcttcctatctagcactgaagctcaacaatcctacttgcaaggattcagcaggaacattttagaggcctcctacgataccaaattcgaggagataaacaaggttctgtttagtagagaggaagggcagcagcaaggggagcagaggctgcaagagagcgtgattgtggaaatctcgaaggaacagattcgggcactgagcaaacgtgccaaatctagttcaaggaaaaccatttcttctgaagataaaccttttaacttgagaagccgcgaccccatctactccaacaagcttggcaagttctttgagatcaccccagagaaaaacccccagcttcgggacttggatatcttcctcagtattgtggatatgaacgagggagctcttcttctaccacacttcaattcaaaggcgatagtgatactggtaattaatgaaggagatgcaaacattgaacttgttggcctaaaagaacaacaacaggagcagcaacaggaagagcaacctttggaagtgcggaaatatagagccgaattgtctgaacaagatatatttgtaatcccagcaggttatccagttgtggtcaacgctacctcaaatctgaatttctttgctattggtattaatgccgagaacaaccagaggaacttcctcgcaggttcgcaagacaatgtgataagccagatacctagtcaagtgcaggagcttgcattccctgggtctgcacaagctgttgagaagctattaaagaaccaaagagaatcctactttgtggatgctcagcctaagaagaaagaggaggggaataagggaagaaagggtcctttgtcttcaattttgagggctttttactgaataagtatgtactaaaatgtatgctgtaatagctcatagtgagcgaggaaagtatcgggctatgtaactatgactagagcttcaactatgaataaataaatcgacagcatatgatgcttttgttttgtgtt

SEQ ID NO: 14775 - DNA, 1239 bp, Glycine max
  Clone ID: LIB3027-010-B11_FLI
agcagatgatctgctgctgtaacaagatggatgccactaccccgaagtactctaaggctaggtatgatgaaattgtgaaggaagtctcttcctacttgaagaaggttggttacaacccagacaagattccatttgtgcccatctctggtttcgagggtgacaacatgattgagaggtccaccaaccttgactggtacaagggaccaactctccttgaggctcttgaccaaatcaatgagcccaagaggccctcagacaagccactcaggcttccattgcaggatgtctacaaaattggtggtattggtaccgtgccagtgggacgtgttgagactggtgtcgtgaagcccggtatggtggtgacttttggtcccactgggctgacaactgaggttaagtctgttgagatgcaccatgaggctctcacagaggctcttccaggtgacaatgttggctttaatgtgaagaatgttgcagtcaaggatctcaagcgtggttttgttgcatccaactccaaggatgaccctgccaaggaagctgccaacttcacatctcaagtcattatcatgaaccaccctggccagattggaaatggatacgcaccggtgcttgattgccacacttctcacattgctgtcaagttttctgaaatcttgaccaagattgacaggcgatctggtaaggagcttgagaaggagcccaaatttttgaagaatggtgatgcaggtatggttaagatgattccaaccaagcccatggtggttgaaactttctctgagtatcctccccttggtcgttttgctgtgagggacatgcgtcaaactgtggctgtcggagtcatcaagagtgttgagaagaaagaccccaccggagccaaggtcaccaaggccgctgccaagaagaagtgattgcatttgggcaattttgctagcacatgtgatcatcatcgtggttactcctttatagtagttttatccttgcagagtcttaggtgttttgtttaagttatatttttaagtttctgccgatttcatgtagccgtaactttcaaaactaggttcttgatcggcggtggtcaattttcattgctgtttgtttttgatgagtactgttttttgttttgatggtaagaagagtctgagatatttcgaatttcacaagcagctatagggttttagtccatttcctttgctgctgagggatgttttaagttgcatttaatttataacgaagttttat

SEQ ID NO: 14776 - DNA, 1306 bp, Glycine max
  Clone ID: LIB3027-010-B7_FLI
gatgagcttattgccaatgctgcttacattggcactcctggaaagggtattcttgctgctgatgagtcaacagggacaattggcaagcgtttggccagcatcagtgtagagaatgttgaatccaacaggcgtgctcttagggagctgcttttcaccgctcccggtgctcttaaatatctcagtggtgtcatcctctttgaggaaactctctaccagagcacagctgcaggcaagccctttgtggaagtcttgaaggaggctggtgtgcttcctggcatcaaggttgacaagggcacagttgagcttgctggcactaatggagaaaccaccactcagggtctagatggccttggtcagcgttgcgccaagtactatgaagccggtgcacgttttgccaagtggcgtgctgtgctgaagattggtcccaacgagccatctgagctggctatccatgagaatgcctatggcttggccagatacgctgtcatatgccaggagaatggcctggttcccattgttgagcctgagatccttgttgatggatctcatgacattcacaagtgtgctgccgtcaccgagcgtgtccttgcagcatgctacaaggctttgaatgatcaccacgtccttcttgagggtaccctattgaagccaaacatggtcacccccggatccaattctgctaaggtttcccctcaggtggttgcggagcacactgttagagcccttcagagaaccgtgcctgctgcagttcctgctatcgttttcttgtctggtgggcagagtgaggaggaggcatccgttaacctcaatgccattaaccaggtcaatggaaagaagccatggtcactctctttctcctttggaagggcacttcaacagagcacccttaaggcatggagtggaaaagaggagaatgtgaagaaggctcaggaagcccttttggtaagagccaaggccaactcagaggcaactctgggaacctacaagggtaactcaaagcttgctgatggtgcctcagagagcctccatgttgaggactacaagtactgatcaatctaagtgcgggtaggaatcggtattttatgggtacaaccgaattttcttgttaatgagtattgtgcttcgactcttcccagaataataatcgtttggaattttgctttttgtttttcctagtgttccttcatatcaattttagtaattcggtgtattggtcaaacctgtgcaaacaggggaggggatgtaactttgttttcttgatagacaccaccaccttgctgttaacgaggctttgtgtttattttgc

SEQ ID NO: 14777 - DNA, 974 bp, Glycine max
  Clone ID: LIB3028-001-B2_FLI
agcattagtactactgttaatgcaactagggttagtgatcttgagtccccaacatctaccttgtctgagaataatgcaccaccaattaatattactagtgttattgagtttgtgggttcttcagagagagggacggtgaaggaagagggagagcaagagtggaacaaattaggttatcatgaaagcttcacccatttgggagaatacaaagatggcaaggagaattcaatgcctttcacgtctagtctgcatgagttgacaatgaccatggcaaccacgtggggttctagcactagtggtgcacatgcacatgcacatgttgctgaggagggttgtttcaccaatcttttgctgaatgctaactccggtgcccggagtttgtcgccacaggacggtggagagtctaataattgtcacgataatgctcgtaacagtggcagtggtagtagcaatgctgacttatatgaagaaaacaagaattattggaacaacattcttaatttgatgaattattcttccccttcggattcacccatgttttgattaaattgctttggaattggaaggtaaataaatcctttcacgtttgaatttgatcaaacatgtattgtcatgttaaattcttgtaccagccctctgttagatgctataaatatgtggggcttgtttaaaatttacatagagagaaataaatacaaaatttcaacgttacttacgaagaagaccggagggagggtcaattcttgtgttggaacttggaagtgtgtgaattgcggcatctctccatcaaacaaaatcaaaggccattgattttcttcagaatgttgccataagaagagagcatagtcacgggaaaatgttgattccgattagtatgtttttatttttgtcaatgctttcacatagaaaattaagtgtgtgtcgcttcgagcatcaatcaaatgttcatattaaaattttttggatttgacttg

SEQ ID NO: 14778 - DNA, 1586 bp, Glycine max
  Clone ID: LIB3028-001-B9_FLI
ctcaccctcctcttcacacattttctgtgcgctctaacaaacattctcgttcacactttcagattgtgtgaagatgggggcgggtggccgaactgatgttcctcctgccaacaggaagtcagaggttgaccctttgaagcgggtgccatttgaaaaacctccatttagtctcagccaaatcaagaaggtcattccacctcactgtttccagcgttctgttttccgctcattctcctatgttgtttacgacctcaccatagccttctgcctctattatgttgccacccattacttccacctccttcccagccctctctctttcttggcatggccaatctactgggctgtccaaggttgcatccttactggagtttgggtcattgcccatgagtgtggccaccatgcattcagtgactaccagttgcttgatgatattgttggccttgtcctccactccggtctcctagtcccatacttttcatggaaatacagccatcgccgtcaccactccaacactggttctcttgagcgggatgaagtatttgtgccaaagcagaagtcctgtatcaagtggtactctaaataccttaacaatcctccaggcagagtcctcactcttgctgtcaccctcacacttggttggcccttgtacttggctttaaatgtttctggaaggccttatgatagatttgcttgccactatgacccatatggtcccatttactctgatcgtgaacgacttcaaatatatatatcagatgcaggagtacttgcagtatgctatggccttttccgtcttgccatggcaaaaggacttgcctgggtggtgtgtgtttatggagttccattgctagtggtcaatggatttttggtgttgattacattcttgcagcatactcaccctgcattgccacattacacttcctctgagtgggactggttgagaggagctttagcaacagtggatagagattatggaatcctgaacaaggtcttccataatattacagacactcatgtagcacatcacttgttctccacaatgccacattatcatgcaatggaggctacaaaggcaataaaacccattttgggagagtattatcggtttgatgagactccatttgtcaaggcaatgtggagagaggcaagagagtgtatttatgtggagccagatcaaagtaccgagagcaaaggtgtattttggtacaacaataagttgtgatgattaatgtagccgaggcttctttgaactttcccttgtgactgtttagtatcatggttgcttattgggaataattttgttgaaccctgatgttggtagtaagtatctagacagttgcatagcggttttgtttacagaataagatatagcctctctgaacagtttgattattgcaccatggtttgcaatcggtgcatgtcgaccaagtttctcaagactgtggagaagcttattcttgttccagttcttgaatccaagttgttaccgtattctgttattattgacttagaatccttaaccttttctgctgttttctcatgatcgtcactcgcaaatgaatcacatttcaaacttagggtgc

SEQ ID NO: 14779 - DNA, 879 bp, Glycine max
  Clone ID: LIB3028-001-E12_FLI
gcaaccggaatttcatgcaaggatggaccacttttcgaactgccacacttgctgtatccggaaagggtttcattgcaaaggacatgtcattccggaacacggcagggccagtgaaccatcaagccgtggcactgcgtgtggattcagaccaatcagccttctacaggtgcagtgtggaagggcaccaagacaccctctacgcccactccctgcgacagttctaccgagaatgcgaaatctacggcaccatagacttcatctttggcaacggtgccgcagtgttgcaaaattgcaaaatatacaccagggtcccacttcccttacagaaggttaccatcacggcccagggaagaaaaagcccacaccagagcactggctttaccatccaagatagctatattctggccacccagcccacgtatttgggccggccctggaagcaatactctagaactgtttacatcaacacttacatgagtgggctagtccagcccagagggtggcttgagtggtttggaaacttcgccttgaacactttgtggtacggtgagtacagaaattatgggcctggtgcagcactggctgctagggtcaggtggcccggttatcatgtaattaaggatgcttccaccgctagttacttcacagttcagcgcttcattaatgggggcacgtggttgccaagtacaggtgtcaagtttacagcaggcttgaccaattaattcactttatttcttacctctcttattagtctttctgtatccaaacaaataagcttaccatcctccatttttttatttttttattttaagattaaaataattgtaccgtttactttgattgatggaggatgaatagattctttttttcagtgggtgg

SEQ ID NO: 14780 - DNA, 763 bp, Glycine max
  Clone ID: LIB3028-002-B2_FLI
gcctgaggacaatgtggcaacaaaggaagccttggtattggagttaagcagtcaacaagaatacttgaggctgaaagcacgttatgaagctctacaacgttctcaaaggaaccttatgggagaagatcttggccctctaagcagcaaagagcttgaatcacttgaaaggcagctagattcgtctttgaagcaaatcagatcaataaggacccaattcatgctggatcagctttctgatctacaacgtaaggaacactttctaggtgagtcaaacagagatctcagacaaaggttggaagagtttcaaataaatccactccaactgaatcccagtgctgaagatatggggtatggacgccatccaggtcagccccaaggccatgctctctttcaaccattggagtgtgagccaaccttgcaaattggatatcatcctgatccagtatcagtggtgacagaaggcccaagcatgaataattacatggcaggatggttaccatgaaagagtgtcaaatgtggagcataattaaagatcctgccgtttaatttcaaatttatttgaagttaaggaaaacggaaatttgtaatagcacgtaatggacttacactagactctaccttctaattaagctaggaacaatataagcagtgattttgtgtgtgagctttcataaacagtacctagctagcctcttccttgtttcaataatcacttcttccttttcctaattaataaaactatcgtatgcaccctttgccttta

SEQ ID NO: 14781 - DNA, 1001 bp, Glycine max
  Clone ID: LIB3028-002-G9_FLI
ggcggtgctggtcaccggagttgcatagccggtttattaaggctttagaggtgcttggaggttctcaagcagctactccaaagcaaattagggaactcatgagggtagatggcctgaccaatgatgaagtaaagagtcatttacaaaaataccggcttcatacacagcgagttccagttgctacagctgcaaattttagtcggtctgctgtagatcttggaggcttgtggatgcacaatgaatccttgaagggtggcagttctggttctcctcaaggccctctccaattagccacacaatcgggggaagcaacatcccaaacagaaggtgacaacatgatagatgatgatgatgtaaaatcggacttataactggaaaaagtcacattcaaaaaacatggaaaaggtgatgtgtagatattttctcaccatgaatttagcagataaaagtagaggagttttacaactactcaagaacaacacatgatacataaaagaggatggatctttggagagaggctttttgagattttgaagtaaaaattggtttttgcacaataagaagccggagcagttctttgtccaaaataataatgatcattcatttctttttgccctgagaacactgtaatgctgcaggagaaattactccaacatcttagatggattttggagtttcatgatttggtggttgacttagttaatagtagtttagatgatttatatttgatatcttgcacttgttgcataccgttgtgccaaaataggaaaggaaagctatcaagtaactcccagttttgctccccagtgttttctaatagttgtgaaggaggttgtgaaattcgtcatccgggtcaggtgcaaatttaccatgctagctagatagtgagagagagagagataaaatgtttgatgtcattttgtgtacaaagtccataagactgttagagaacttgttaaaatatgattttgaataaaaaaattatatattgttgaagtcct

SEQ ID NO: 14782 - DNA, 679 bp, Glycine max
  Clone ID: LIB3028-004-G6_FLI
ctagcagcactggagctgccaaggctgttgggaaagtccttcctgctttgaatggaaaattgactggtatggcattccgtgttcccaccgtggatgtctctgttgttgacctcacggtgaggctggagaaggaagcctcatatgatgaaattaaaaatgctatcaaggaggaatcagagggcaagttgaagggaattcttggttacactgaagatgatgtggtctccaccgactttgttggtgataacagatcaagtatttttgatgcaaaggctggaattgcattgaataagaattttgtgaagcttgtctcttggtatgacaacgagtggggatacagttcacgtgtcattgacctgcttgtaatcgttgccaagaagtctttttaattaaggtggttctaacattatgtgctggtcaagctgcgatttagtgtcttgctcgtgcaaaaattgagaagtatgaataaatcggtttccggaaccagtgttgttaccctgttacgagcattaagctctttttttgttgcctcttctgtgtaggggatggagttttttggattcttatatacttgcagatgtactcgggctttattgattctgatagcagacattttccctccatttttcatccatggttctcgagtgtttgaaccccccttccttttctgctttgaatt

SEQ ID NO: 14783 - DNA, 685 bp, Glycine max
  Clone ID: LIB3028-005-E6_FLI
gacagtaccaatatctatgcctacatttccatcattgctctaattgtgtgtataccacctgccgtaattttggaagggcccacactgttgaagcacggcttcaatgatgctattgctaaagtaggtttggtcaagttcgtctcagatctcttctgggttggtatgttttaccatctctacaaccaggtggctaccaacacactggagagagtggctcctctcactcatgcagttgggaacgtactgaaacgtgtatttgtcattggattctctattatagtcttcggtaacaagattagcacccaaactggtattggaacagccattgcaattgctggtgtggcactctactcgttcatcaaagccagaatggaggaagaaaagcgacaagcaaaagcagcataagaggaaagtcgtcaacctggaggatgtcttgcactgtaaatcaccacaaatttccttcaaaataattgagtgactggttcagtgttgtactatccttgtgatagcgcccttttatttttccttctatttttgtcaaatattttctttttcctttttttcctttttctctcttcattcagaaaacaatgtctcgctgctgattatcagtcttctcgtgttgactggaaaatgtcgtacccttgattcccataaagagctattgaaactattatattagctg

SEQ ID NO: 14784 - DNA, 1957 bp, Glycine max
  Clone ID: LIB3028-005-F8_FLI
ttcatataatattgcttcttggttcattctagctaattttgatggctcttccaatttgtctcaccgttattgcaattttcaccctttgttgtgtcattaattgtaacaatggcgttgaagcgtttcatgacatatacccggatcttcaatccatttcagcacgttcggtgagcaaacttcagagaactggataccattttcaacctcgtaagaattggatcaatgatccaaatgggcccatgtactacaatggaatctaccatctattttaccaatacaacccaaaaggagcagtttggggcaacatagtgtggggacacgcagtatcaaaggacctcatcaattggaaagaacttgaacctgccctatacccatcaaaaccctttgacaaatacggggtttggtccgggtcagccactgtactcccgggtaaaggacccgtaatcctttatactggagtcattgacaagcaaagcaatgaggtccaattgtatgccatacctgaaaacaaatccgacccatttttaagaaaatgggtcaagcctaaggcctttaacccgattgtggtcgcggatcacagcatgaatgctagtgttttccgcgacccaaccaccgcatggtggagcaaagatggacattggaggatgttgattggtggtagaagaaaagatagaggaatggcctatttatatagaagtaaggattttgtgaagtggatccaagccaagcacccgatccattcggctgcatccacgggcatgtgggagtgcccggatttttatcccgtttctttgaaagggaaaaacgggttagacatatccgtagttgggagtagtagtattaagcatgttctcaagaatagccttgaccttactaggtatgagtactacacaattggaacatacttcaaaaataaggataagtatattccggataacacttcggaagatggttggggtggacttagatatgattatggcaacttttatgcttccaagtcattctttgacccaagcaagaatcgaaggatcttgtgggcttgggcaaacgaatcagattccaaagaagacgatgttaagaaaggatgggcagggattcagtcaattcctagaaccgtgtggcttgattatggtgggaaacagttggtgcaatggccagttgaagaattaaatagtcttagaaagaaagaagttaaaataagtcaccaaaagcttaagaagggacagcatgttgaagttaaagggattactgcagctcaggctgacgtggaagttaccttctcattctcaagcttggacagggcagagccatttgattctaggtgggtgaacgcacaggatctatgttcacaaaagggttcaaaggttcaaggtggggttgggccatttgggcttttgactttggcttcagaaaaattggaggagtttactccagtgttcttcagaatttttaaagctccaaacaagcacgtgattctcatgtgctccgatgcaagaagttcctctttgaagagagaattgtacaagccatcatttgcaggctttgtgaatgtggatttagccaaaaataaaaagctctctctcaagagtttgattgatcactcagtagtggagagttttggagccggaggaagaacaaacatcttgtctagggtttatcctaccctagcaataaagaaaaaagctcatttgtttgtgttcaataacggtactgagcatatcaccgtggaatacctaaaagcatggagcatgaaatctgcacgtcgaaactaaaaaatagtcagctagaaattagtacaaataaatgaatcaagtagaaacaataatacctcttattctcttgttttctacaaaaagaggtctaacttttagccttctgtccatggtgttgtactcacctagcacgataagctactacattgacatatactggttttaattttacgtaaacgaaattt

SEQ ID NO: 14785 - DNA, 1291 bp, Glycine max
  Clone ID: LIB3028-006-A9_FLI
caaagtcacaatggaccccctctctctcttctgcaccggagccctcctcgccggcggcctctactggttcgtgtgcgttctgggccccgccgagcagaagggcaaacgcgccaccgatctttccggcggctccatctccgccgagaaagtccaagacaactacaaacagtactggtccttcttccgccgcccaaaggagatcgagaccgccgacaaagtccccgacttcgtcgacaccttctacaatctagtcacagacatctacgagtgggggtggggccagtccttccacttctccccctccatccccggcaagtcccaccgcgacgccacgcgcctccacgaggagatggccgtcgatctcatcgaggccaagcccggcaacagaatcctggatgtgggctgtggcgtgggcggtcccatgcgggccatcgcggcccactcgcgggccaacgtagtcggcatcaccatcaacgagtaccaggtcaaccgcgcaaggatgcacaacaagaaggcagggttggagtccctctgcgaggtcgtgtgcgggaattttctcaagatgcccttccccgacaacagcttcgacggcgcgtactccatcgaggccacgtgtcacgcgccgaagctggaggaagtgtacgccgaaatcttccgtgttctgaaaccgggggcgctctatgtttcctacgagtgggtgacgacggataagtaccgaggcgatgaccctgaacacgtggaggtcattcaggggattgagaggggggacgcgttgcctggccttagaaactacaccgacatagccgagacggcgcgtaaggtagggtttgctgttgtgaaggagcgggatctggctaagccgccggctcagccatggtggagccgattgaagatgggtaggatcgcctactggcggaaccatattgtggtcactgttctcgccgctttgggaatcgcgcccaaggggaccgtcgatgttcatgagatgctcttcaagaccgctgactatttgaccagagggggtgactctggcattttctcgccgatgcacatgatcctctgcagaaagccccatgacaaggacgaccataactgagcgtttcattgggaaattccaaaactataacaaccaccaccttgtttctttccggtactctctttttttttttcataattattattatcttgggtttaacttattgttattagttattattattactatgaacttggtgtaatttggattttgatcttttcaattttatttttaattttgctatgttgatcattt

SEQ ID NO: 14786 - DNA, 807 bp, Glycine max
  Clone ID: LIB3028-006-F10_FLI
gcgccaagtactatgaagccggtgcacgttttgccaagtggcgtgctgtgctgaagattggtcccaacgagccatctgagctggctatccatgagaatgcctatggcttggccagatacgctgtcatatgccaggagaatggcctggttcccattgttgagcctgagatccttgttgatggatctcatgacattcacaagtgtgctgccgtcaccgagcgtgtccttgcagcatgctacaaggctttgaatgatcaccacgtccttcttgagggtaccctattgaagccaaacatggtcacccccggatccaattctgctaaggtttcccctcaggtggttgcggagcacactgttagagcccttcagagaaccgtgcctgctgcagttcctgctatcgttttcttgtctggtgggcagagtgaggaggaggcatccgttaacctcaatgccattaaccaggtcaatggaaagaagccatggtcactctctttctcctttggaagggcacttcaacagagcacccttaaggcatggagtggaaaagaggagaatgtgaagaaggctcaggaagcccttttggtaagagccaaggccaactcagaggcaactctgggaacctacaagggtaactcaaagcttgctgatggtgcctcagagagcctccatgttgaggactacaagtactgatcaatctaagtgcgggtaggaatcggtattttatgggtacaaccgaattttcttgttaatgagtattgtgcttcgactcttcccagaataataatcgtttggaattttgctttttgtt

SEQ ID NO: 14787 - DNA, 895 bp, Glycine max
  Clone ID: LIB3028-006-H7_FLI
caatgatggagttctactaagaaaccatattccacgtatccttaaaaagcacttcaggggaaagccatattacgttgatcttcttgatttgtttaatgaggttgagttccagactgcttcaggacagatgatagatctgatcaccacactggaaggagaaaaagacctgtctaaatacacattaacactgcatcgacgtattgttcagtacaagactgcatattattccttttaccttccggttgcatgtgcattgctcatggcgggtgaggatcttgacaaccatgttgatgtaaagaacattcttgttgagatgggaacatactttcaagtacaggatgattatttggattgttttggtgatcctcaaacaattggaaagataggtacagatattgaagatttcaagtgctcttggttagttgtgaaagccttggaacttagtaatgaacaacaaaagaaagttctacacgagaactatggtaaggcagatccagaaaatgttgctaaagttaaggccctgtataatgagcttaatcttcaggctgtatttgaggagtatgagaacgggagctatgcaaagcttgtttcctccattgaggctcatcctagcaaagcagttcaagctgtattgaagtcctttttggctaaaatttacaagcggcagaagtagagtcaacttaaggtgaggaccaaaattgttgaacatgcaatagaaactagagttgtgatttctatctagagcagtatcatgttccgtggcttggaatttttcaaaaattgattttcttcttgtcattttttttaatttttgttttttagtgataagatcttgttgtattttatcttctaatctgtcttgggatacttgtttgactatttataatttcttctg

SEQ ID NO: 14788 - DNA, 685 bp, Glycine max
  Clone ID: LIB3028-007-A9_FLI
ccaaattccattttccaattcaaaaccctaactccgttcgaagcaccaaatcgtgatggcaccaaaggcagagaagaagccagcagagaagaagcctgtggaggagaagaaatcgacggtgggagacaaggctccggcggagaagaagccaaaggccggaaagaagcttccgaaggagggaggcgccggcggagaaggtaagaagaagaagagaaacaagaagagcgtggagacatacaagatctacatcttcaaggttctgaagcaggttcaccctgacattggtatctcaagcaaggccatgggaatcatgaacagcttcatcaacgacatcttcgagaagcttgcccaggaatcttctagacttgcccgctacaacaagaaacccaccatcacttcaagggaaattcagaccgcggtcaggcttgtgctgcccggtgaattggccaagcacgccgtttctgagggtaccaaggctgtcaccaacttcactagctcttgaattagctatcttatcgcttttctaagactcttttctgtcccaatttgagattttaatcagtagtagacttttttttgtttgataggatttgtaattgaaagaatggtcttgggttgatccttttgtgtattgaagtggcaagatgtattgattatataggaacgcagtattgtttagtattat

SEQ ID NO: 14789 - DNA, 533 bp, Glycine max
  Clone ID: LIB3028-007-F6_FLI
gaccttagaaagagaaggaaaaaaaaaacttgtgtttcttgggaagccatgagcaccaccgagagtcaaagatataagggcacagtgaaatggttcaacgaggagaagggtttcggtttcataactcccgaagatggtggctctgatctcttcgttcactacagtgcgatccaaaccgacggcggcttccgcaccttgtcggagggtcagtcagtagagttcctcgtcactcaggacgacagcgggcgagccgcggccgtcaacgtgacgaccaccacggttaaatctagtgacagcggtaacggggaaaactctggtggtgatgctgccaatgttgagaaataagtgagaatgaattattggagtttcctgaattgcgagtatgatatttatattgatagttggacaatatactagtccattggtattttatattttattatattatctctggttattggcatttggttccaaacttgtaatacatttatcatgtgtttaacgtggttatgtagtaagttgttggatgtgtc

SEQ ID NO: 14790 - DNA, 851 bp, Glycine max
  Clone ID: LIB3028-008-B3_FLI
gtcttttatagcagcagttgagaaaggaaacatgagaagcatgccaaacagaagcatgcctgcatctccttatcctacacctggcgcccttctcatgggagatgccttcaacatgcgtcaccctttaaccggagggggaatgactgtggctttgtctgacattgttttgctaaggaaccttcttagacccctgcatgatctgcatgatgctaatgctctttgcaaatatcttgaatcattctccaccctgcgcaagccagtggcatctacaataaacacactagctggggcactgtacaaggtgttttgtgcatcccctgacccagctagtaaggaaatgcgccaggcatgttttgattatttaagccttggaggtgttttctcagatggaccaatagctctactctctggtctaaatcctcgtccattaagcttggttctccacttctttgccgtggctatatatggcgttggtcgcttactcataccattcccttctccaaaacgcatgtggattggagctagattgatttccggtgcatctgctatcattttccccattatcaaggctgaaggaattagacaaatgttcttcccagtaattgtgccagcatattacagaacaccccctaccaatttggatgattaagtacacttcttggaaggaaagtcatgaattcataacataatctgtgcccgcattctttgtaactgtgattagtcctaccaaaaggaataagagagcctagaggggaattttgttaaaaggctccacatattagggcactggttttgtgcgtgtgcaatatactactatcttgttttaataaaactttttaaacgtattgtct

SEQ ID NO: 14791 - DNA, 638 bp, Glycine max
  Clone ID: LIB3028-009-D6_FLI
aagaaatagagttagaaatgaagataaatatgtatccaccatgtccacagccacatctagctttgggagttgaacctcacactgacatgagtgcccttaccatactcgtcccaaacgaagttccaggcctccaagtttggaaggagaatagttgggttgcggtcaattacttgcaaaatgcactcatggtacatgttggtgatcaacttgaggtgttgagtaacggaaagtacaagagtgttctgcatagaagcttggtgaataaggaacgaaatcgcatgtcatgggcagtgtttgttgcgcctccacatcaggcagtgatagggcctcttccttctctcatcaatgatcagaacccacccaagttttcaacaaaaacctatgctgagtatcgttatcgcaaattcaataagctttcccaataagggaccaaaacatcatcacttgtgttgtcacggtgaaataaatttgtaagccatgatggaggataacaaagtaggagctaactctccattttggttaacaagtgtagctaatttctattatgcttttgaagtaaacagggctttgtccccttggcatttggtacatgccatattccttaagaatacaataaggctatattcctgttctacttc

SEQ ID NO: 14792 - DNA, 696 bp, Glycine max
  Clone ID: LIB3028-009-E3_FLI
gcaaattccaattcccaattcccaattcgaaacccttattcctttcaaagaaccaaattgagtgatcgtgatggcaccaaagcagagaagaagccagcggagaagaagcccgcggaggagaagaagtcgacggtgggagacaaggctccggcggagaagaagccaaggccggaaagaagcttccgaaggagggaggcgccggcggagaagggaagaagaagaagagaaacaagaagagcgtggagacatacaagatctacatcttcaaggttctgaagcaggtccaccctgacattggtatctcaagcaaggccatgggaatcatgaacagcttcatcaacgacatcttcgagaagcttgcccaggaatcttctagacttgcccgttacaacaagaagcccaccatcacttcaagggaaattcagaccgcggtcaggcttgtgctgcccggtgaattggccaagcacgccgtctctgagggtaccaaggctgtcaccaagttcactagctcttgaactgactattatgccccttcgcttcgatctaggtgtctctgttaggaatatgttttatgttgaagcgttggtttattttttctttttggtgaaaaaaaaatgtaagtgaagaatatgggatttgttgatccttctttgtatggaattagttgctaatacagagacgtatattattcctatc

SEQ ID NO: 14793 - DNA, 1663 bp, Glycine max
  Clone ID: LIB3028-009-G6_FLI
tggagcttcaaagccagaacaaccctttctctattcacttgattaccttctttttgtttctcttgttcctgttattcaaattagttaagaaatcgagttccaacaacaccagcaaattacctccaggaccaaagacactacctctcatagggaacctacaccagcttgttggttcaaagagtcatcactgctttaaaaaattggcagacaagtatggtcctctaatgcacctaaaactgggagaggtatccaacatcatagtcacttcaaaagaattggcacaagagattatgagaactcaggatctcaactttgcagatagaccaaaccttgtatccacaaaaatagtttcctacaacgccaccagcatttccttcgccccacatggagactattggaggcaactgcgaaagttgtgcacagtggagctattaacatcaaagagagtgcaatcttttcggtccataagagaagacgaggtgtctgagcttgttcagaaaatacgtgcaggtgcaagtgaagaagggtccgttttcaatctctctcagcacatttaccctatgacttatgcgattgcggcacgagcttcttttggtaagaagagtaaataccaagaaatgttcatatcgttgattaaggaacagttgagtctcataggagggttctctcttgctgatctctacccttctattggactactccaaatcatggccaaggccaaagttgaaaaagtccacagagaggttgatagggtgttgcaagacatcatcgaccaacacaagaacaggaaaagcaccgaccgtgaagcagtggaagatctggttgatgtccttctcaagtttcggtcggaaaatgaattgcaatatcccctgactgatgacaaccttaaagccgtcatccaggacatgtttattggtggtggtgaaacatcatcttccactgtggaatggtcaatgtcagaaatggtaaggaacccttgggcgatggaaaaagcacaagctgaggtaagaaaggtgtttgatagcaaaggatatgtgaatgaggcagagttgcaccaattgacatacttaaagtgcatcatcagagaagctatgaggttacatccacctgtgccattgttaattcctagagtaaatagagagaggtgcaaaatcaatggatatgagataccagctaagaccagggtctttatcaatgcttgggcaattggaagggatcccaagtattggactgaagctgaaagtttcaaacctgagaggtttcttaatagctctattgattttaagggcacaaactatgaatttatcccatttggtgctggaaggagaatctgcccaggcatttcatttgctacacctaacattgagctgccacttgctcatttgctttaccattttgattggaagcttcccaacaatatgaagaatgaagaacttgacatgactgagtcatatggggctacagcaagaagagcaaaagacctatgcttgattcccattaccgttcgaccttaaaattaaatgtcataaactatttaaattttatcttttactattctcagcatcttgtatggtaatttgggcaaacaagaatatatatctccaatgactttatgcacttcattttcatgttctctttaaataaaatttattttcgttgtttg

SEQ ID NO: 14794 - DNA, 1180 bp, Glycine max
  Clone ID: LIB3028-010-A12_FLI
ccatgtcctaatctttctgcaccatcgttctccatttttggctttacaaaaccactgtgtctgattaagggttctttaatatttccaatatttcttgtagtgaaaaagttgttagctaaaagaagaccaagtttttggtgttgtagaaggaagagaagaattaacatgaaaattcagtgtgacgtgtgtgagagagctccagcaacagtgatttgttgcgcggatgaggctgctttgtgtgccaaatgtgacgttgaagttcatgctgcaaacaagcttgcaagcaagcaccaaagacttcttcttcaatgtctatcaagcaagcttcccacatgtgacatttgccaagacaagccagcattcatattttgtgttgaagacagagcactcttctgtcaggattgtgatgaaccaattcattcagccggaagcctttccgcgaaccaccagcgcttccttgctactggtatccgagtggcctcgagttctaattgcaccaaagacaatgaaaaaagtcactcggagcctcctaataggagtgcacaacaagtttctgcgaaaattcctcctcagcaagtgcctagcttcacatcctcttgggctgttgatgacttattggaactaacaggctttgaatcacctgagaaaaaggaatctctgcagtttggagagctggaatggcttacagatgtgggtattttcggcgaacaatttgctcaggaagccttggctgcagctgaagtacctcagcttcccgaaactcataacagtagcagtgttgcttcatacaaaacctccaaatcctacatgtcccacaaaaagcctaggattgaagtcctaaatgatgatgatgatgatgagtattttactgtgcccgatctcggctaagtacgtggcttgccatatgggatggtgcatgcatgattggaaaagattaattatgggaaaataattgtttttttttaagctctattagtaaattgtcaaaaaagaatattattttcccaaaaaaaactattccattcagacatgttgatatgttgtatattcaattattatgagaacgataattttcacaagttgtgtggagttgattaagtattgtacttaaggtgtttttttgctggatagcatagaatccatgcctttggggaataaattttccttgtccttatgcttc

SEQ ID NO: 14795 - DNA, 703 bp, Glycine max
  Clone ID: LIB3028-010-A9_FLI
gtaaattaatttctcgtatcgaaaatcatttccaccaccacaatttttttttatttccgtttactaaagattagtaattgtttggtttgtgtgtagattttgattcgattcgattcgattcagtcgaggttttaagcagcagcaagatgtctgggcgtggaaagggaggaaagggattgggaaaaggaggagcaaaacgacatcgtaaggtgctccgcgacaacattcagggaattacgaagccagcgattcgtcgtttggctcgcaggggtggcgtgaagcgtatcagcggtttgatctacgaggagactcgcggtgttctcaagatcttcttggagaatgtcatccgtgacgccgttacttacacggagcacgctaggaggaagaccgttacggctatggacgttgtttatgcgcttaagaggcagggaaggaccctctacggatttggtggttagggtttttgcttgattttcctcgccagggaaaagtcttgctgtcaagaaaaacaaacgaggcatggattggggtagtttttttttattttttatggtggtgtttgtagtgaatggggaaaattaggagcaattttatgcttacttgttggtgtcaattatgtgatgtaactactccgttgaaatgtagaattattttggcttttaaaaatcgtttcgtaaatcaatttatagtttctatttaagtt

SEQ ID NO: 14796 - DNA, 988 bp, Glycine max
  Clone ID: LIB3028-011-B7_FLI
cttcgtggcgggagatcctctcgcagcttctggtgtactttctcgtagaggattacaccaattactggatccacaggtttctgcacaacgattgggggtacgagaagattcaccgcgtccaccacgagtaccatgcgcccattggattcgccgcgccctatgcccactgggccgagatcttgatcctcgggattccctcctttcttgggcctgccatggttcctggccacattatcaccttctggctctggatagccttgcgccagattgaagccattgacacgcacagcgggtatgactttcctaggagtatcacaaaatatattccattttatggtggtgctgagtatcatgattaccatcattacgttggaagacaaagccaaagcaattttgcttcagttttcacatactgtgattacatctatggaactgacaaggggtataggtatcagaaaaaaatacttcagaagttgaaggaagagttggcaaatggtgttgagcagaacggaggattatacaagactgactgagagactgaagtgtcttaggtggtttcagaatgcgttgcctgttgactctttggaaccaccaaaattcttgtagacatatatatatatatatatatctgctgtggcaaaatagatgtctttggttagcttcagggtggagattagtagaatggagctttacaatttgtggttttgtgttggaagaggaggggggcacgggaggaatttcttctgttgtcatgttctggaattcaaacattttggttttggttcatgtctgtcagaatgttccttctcctatggattgtaaattcagaatcttctattgtcatgttctggaattcaaacattttggtttgggttcatgtctgccagaatgttccttccccagtgggttgtaaactcagaaatatgtaataggcttcctcggctgggatataattcgaaaattataataaaaattggaagttcggttt

SEQ ID NO: 14797 - DNA, 860 bp, Glycine max
  Clone ID: LIB3028-011-G8_FLI
agcaggtgtttgaaggaaccaacattcaagattctggaacagaggcagctgttgttgctgctgctgtggctgcggctgcccgtttgactgatgcagacttagtaagatgaatttagatctaaaagccatagcaatgtcttttatcggtacccagcaaaagtgcaaggcttgtgagaaaacggtttatcccgttgatcagctttctgctgatggtactgcttatcacaaagcttgcttcagatgctctcactgcaaaggaacattaaagctgagtaactattcctcaatggaaggtgttctttactgtaagcctcactatgagcagctcttcaaggagagtggctccttcagcaagaacttccagtcacctgcaaagctagctgataagacaactcctgagctgacaaggtctcctagtaaagctgcgagcatgttttctggcacacaagaaaagtgtgccacatgtggcaaaactgcttatccattagagaaggtaacagtggaagggcaggcctatcacaaatcatgtttcaagtgttcacatggtggatgtcccataacgccatcgaattatgcagcccttgagggcattttgtattgcaagcaccacttctcccagctttttaaggagaaagggagctataatcatcttaataagtctgcatcagtcaaacgggcagccgcagccacagcagcagcaacaacagctgcctctgttccagaatcttgaatgttggttccttcaattgccttttctttttcaaatacattttggtttgtgaagcaggtgtttgtatgtgtggcctttttggtttttgattgttctctcgtgactttgatcatttctgatatttttactt

SEQ ID NO: 14798 - DNA, 711 bp, Glycine max
  Clone ID: LIB3028-013-F12_FLI
aaacaagctgtggctgtaaaaagtcagttgcagctgattgctagacccatgtacagtaacccacctctccatggagcacttatagtttctactgtccttggtgatccagatttgaagaagttatggcttaaagaagtcaaggttatggcagaccgcatcatcggaatgaggactacactacgagaaaacttagaaaagaaggggtctactttgccatggcagcatataactaatcagattggtatgttctgctacagtggattgacacctgaacaggttgatcgtatgacaaacgagtttcatatttacatgacccgtaacggtcgtatcagtatggctggtcttaatacgggcaacgttggatatgttgctgacgctatccatgaggttacaaaatcattctagattattcaatcacccaacaggtgaccaaatttttgtctttggagacaaacatctcagaagtagtacccttatccaggggagcaaaataaatttaataaagtctgacaaattttcaacttgtttcggggtaagatagtgatactcttcagggtttaccttgcatattgaagacccttattgcaatacgtatccgatttatcatatccatgcaccatagattatatccatttttacagacatcttgtttagcactttaatgagcataaccctgtatcatcattttttttataaaataatttgagtagt

SEQ ID NO: 14799 - DNA, 734 bp, Glycine max
  Clone ID: LIB3028-013-G6_FLI
gtgccgcagaagttcgcatttacggggatcctgattttacttttccgtatgttccagctcacttgcatcttatggtatttgagttggttaagaactcgctgcgtgctgtccaagagcgttttatggactctgacgaagttgctcctcccattagaataataatagcagatggaatagaggatgttaccataaaggtctcagatgagggaggtggaataccaaggagtggtcttccaagaatttttacatatctctacagtacagccaaaaactcatcgtcagttgaacatgaaccttctgatattggaacaatggaaaatgtaactatggctggatatggttatggacttcctatttgccgcttgtatgctaggtattttggtggtgatcttcaagtaatctctatggaaggatatgggactgacgcatatctccatttgtctcgtttgggggattcgcaagaacctttgccctgaatcacggagaagcaccaaattatgctgacgccagcaataagaactatttctgtcaatgttttttctaattgtaacaatttgggacttgttatagaccaatatatttcctgctaggcatggagaacctaattaagaaaagtaaaaagaatttatcttagagtgtaacttttaaggatattttcatgttaactattttgggtgtaattactatttgataatatttttttaaaccggggggaattaaatggggtttcagtc

SEQ ID NO: 14800 - DNA, 663 bp, Glycine max
  Clone ID: LIB3028-013-H6_FLI
gttttggatttggttccctctattgatctcatccctgccaaattggggagaaagggtcatgtttgttttggccagttttgctgtttgctccatccaacaccttcaattttgtttgaaccatttcgcagcagatgtgtatgagggcccaccaaatggcaatgactggtttgagaagcaaactggtggcacattggacatctcttgctctacatggatggattggttctttggcggcttgcaattccaacttgagcaccatttgttccctaggctcccaagggcacaattgaggaaaatctcacctttggtgattgacctttgcaagaagcacaatttgccttataggagtttgacatttgttgaggccaatctttggactcttaagacccttaggactgctgctctccaggccaggaatctcagtaacccttcttcccagaatttgttgtgggaagcttttaacactcatggttgatttggatttttgaaaagattgatgatcatcaatcaaagtttctctcttttccacccttttgaaagactattaattaattatcaacatcttgtcaatttattagatctcacatttcttaattgggcattgaatttttaatctcccttttcttgggtatggaataaaatgatgatcacagcttgttatgc

SEQ ID NO: 14801 - DNA, 1308 bp, Glycine max
  Clone ID: LIB3028-014-C7_FLI
atttatattgggtgctagtgagtgatggcgatgagggtgtgaattctaaaaggaaagaacagctgagctggtcagaaaatcaatggcatcatccttgggttttgagttcctgacgaagaagccttacagtcctccatcctgggcatcccatctccaccctttaccttcccacttcttctctcttgcccatcttcccactccaattcacagatggaaccttcccaatctgcccaccaataccgagctgtggatcaagcgagacgacctttccggaatgcagctgagtggtaacaaagtgaggaaattggagttcctgatggccgatgccattgcgcaaggcgccgactctatcatcacaatcggaggcattcagagcaaccactgtcgcgccaccgccgttgccgccaagtatttaaaccttgactgttttctcatcctccgcacttctgacctcctcgtcgatcaagatccaggacttactggcaatcttctcgtcgaacgtatggttggagctcacgttcacctcatctccaaacaagaatatgccaaaattggcagcgtgacactcaccaatgtcctaaaagaaaaattgatcaaggaagggaggaggccatatgttatacccgttggcggatcaaactctttgggaacatggggttatatagaagcagtacgggaaattgagcagcagattcagaaggggacaggcaatgtcaagtttgatgatattgttgttgcttgtggcagtggtggcacaattgctggtctgtcactaggatcgtcattgagtgcattgaaagcaagggtacatgcattctctgtttgtgatgacccagattacttccacaactttgctcaaggcttgcttgatggactcaaggctggcgttagctcaagagatattgtccacattcaaaacgccaagggtcttggctatgcaatgaatacatcggaggagcttaattttgtaaaagaagttgctgccactactggtgttgttcttgacccagtatacagtggtaaggctgcttatgcaatgctgaaagatatgtctgaaaatccaaagaagtgggaaaggagaaagatcctcttcatacatacgggtggcctcctaggattgtatgacaaggtcgaccagttggcttcttttgttgggaattggcaacgaatggatgtcaatgaatctgttccctaggcaggatggtattggaaagatgttctagagaaggaaaatgaaaaaacctgacgttgccagcatctatattttgtactatcttgctctaaataaattttatacttatatttaat

SEQ ID NO: 14802 - DNA, 908 bp, Glycine max
  Clone ID: LIB3028-015-A6_FLI
gacaagcctctaaggcttccattgcaggatgtctacaagattggtggtattggtactgtgccagtgggacgtgtagagactggggttgtgaagcctggtatggtggtgacttttggtcccactgggctgacaactgaggttaagtctgttgagatgcaccatgaggctctcacagaggctcttccaggtgacaatgttggatttaatgtgaagaatgttgcagtcaaggatctcaagcgtggttttgttgcatccaactccaaggacgaccctgccaaggaagctgccaacttcacatcccaagtcattatcatgaaccatcctggccagattggtaatggatacgcaccagtccttgactgccacacttctcacattgctgtgaagttttctgaaatcttgaccaagattgacaggcgatctggtaaggagcttgagaaggagcccaaatttttgaagaatggtgatgctggtatggttaagatggttccaaccaagcccatggtggttgaaactttctctgagtatcctccccttggtcgttttgctgtgagggacatgcgtcagaccgtagctgttggagtcatcaagagtgttgagaagaaagaccccaccggagccaaggtcacaaaggctgccgccaagaagaagtgattgcattttggcaattttgctagcacatgtgatcatcaacgtggtttcaaaaaaacttgttcctttacagtagtttatctttgcagagtcttaggtgtttgttttaccagttatattttgaagtgtccgccgatttcatgtagccgtagccttcaaaactgggttcttgatcggcggtaacattttcgttgctgtttgtttttgatgagtactgttttttgttttgatggtaaaagtctgagattttcaaattc

SEQ ID NO: 14803 - DNA, 605 bp, Glycine max
  Clone ID: LIB3028-015-D2_FLI
cctcgttctctgaattttaattgacttttctcccctcataaaaaaaacctaccaatggctcccgcaaggcagagaagaagcccgcggagaagaagccggcagagaaggccccagcggagaagaagccgaaggcggagaagaagatatcgaaggaaggaggaagcgagaagaagaagaagagaacaaagaagagcgttgagacctacaagatctacatcttcaaggtgttgaagcaagtgcaccccgacatcgggatctccagcaaggctatggggatcatgaacagtttcataaacgacatcttcgagaagctcgcccaggagtcatcgcgtctcgctaggtacaacaagaagcccaccattacttccagggagatccaaacggcggtgcgtttggtcctccctggggagttggccaagcatgccgtttctgaaggcaccaaggccgtcaccaaattcaccagctcttgattggtttcgtgtgtttatgtcagggttttctgttagcccgatttaattagggtttcttttcctttttatttctttgagtatgtagatgtaaaattaaagccttttatttttaaataatataattgccgttttgtt

SEQ ID NO: 14804 - DNA, 873 bp, Glycine max
  Clone ID: LIB3028-015-E1_FLI
gcttattcaaatggttgaaactgagttggagaagagaaagcaacagggcacatataaaggaggatttagggggcagtcccactttttcggctatgaagggagatgtggcttgccaactaattttgattctacttactgctatgcattgggttatggtgctgcagccctccttcaaagtgggaagactggattaatatcatcggttggtaatttatgtgctcctgtagaagaatggactgttggtggaactgcactcacttcattgatggacgtggagaggagacatggtaaattcaagcctgtgatcaagaaggcaatggtggagcttgaaggggcacccttcaaaaagtttgcctccttgagggatgagtgggccctaaaaaattgctacattagtccaggtccaattcaattcactggcccaggatctgatgcaattaatcacactttactcttggagcttggtgcacaagcttaagacattctgaagcctttttgatggtggcaattcatgttttttgggaactactacaaatataatagaccggagattagtcaagtgattgtgtttttccctttggaactttgctagagaatagtttatgctttatcaacatcatcgacttatatttatgttttgggaatatgtcgttccatgatcttttagttcaatgtttaatcgtctcgtcatttaggtacggtaatagtgatgtaaataggaggttgagacatgagtacctgagtgagaaaattttaaggtggattgtgtttgcataagatatggaaaaccaaatggtcctgtttcagtgctttgtatattggaactctgcgaggttgaccacggtaaccacagtaacgagtaatgtttctcgc

SEQ ID NO: 14805 - DNA, 1504 bp, Glycine max
  Clone ID: LIB3028-015-H8_FLI
ctttaccagttgccacactacaccgagattccccctaaacccgtttgcgttgttgtttgcgaagaaatggcgactaagaggagcgtgggaacgttgaaggagggtgatttgaaagggaagagggtgttcgtgagggtcgatctgaacgtgcctttggatgacaaccttaacatcaccgatgacactagagtccgtgctgctgttcccaccatcaagtacttaactggtcatggagccaaagtgatcctttctagccacttgggacgtcctaaaggtgtaacacctaaatacagtttgaagcctcttgtgccaaggctgtctcaacttctcggaattgaggttacgatggcaaatgactctattggggaggaagttgagaagttggttgcacaacttccagaaggtggtgttttgcttctagagaatgtgaggttctataaggaggaagagaagaatgaccctgagtttgcaaagaagttggcttctcttgctgatctctacgtgaatgatgctttcggcactgcccacagagctcatgcttctacagaaggagtggccaaatacttgaagccctctgttgcaggattccttatgcagaaggaacttgactatctagttggagctgtgtcaaaccccaagagaccatttgctgctatcgttggtgggtcaaaggtgtcttccaagattggagttattgagtccttgttggagaaagttaacgttctcttgcttggtggaggaatgatctttaccttttacaaggctcagggttattcagttggttcatctcttgtggaggaagacaagcttagccttgcaactacacttctcgaaaaggccaaggctaaaggggtttctttgttgcttccaactgatgtggtcatagcagacaagtttgctgctgatgctaacagcaagactgtgccagcatcaagcatcccagacgggtggatgggattagatattggtcccgattccatcaagacatttggtgaagcattggataagacccagaccgtcatttggaatggaccaatgggtgtttttgagtttgataagtttgccacaggaacagaggccatagccaagaaactggcagagctgagtgggaagggagtaacgaccatcattggaggaggtgactctgttgccgctgtggagaaggttggtcttgcagacaagatgagccacatctccactggtggtggtgccagcttagagcttcttgaggggaagcaactccctggtgtccttgcccttgatgatgcttgagtaaacatcactagttcctctgtaatttgtgctttatattattattatggttggatttcagccaacagtggattgaggtacaatgagagagctcttgttgctcctgtagaggcttaatataggttaggtttcgaaataagagggttttgtggcatccttggtgttgcattgagctttgatctaattgttcttgaacaatgttcatttcaaaaggagttttactttgttagtt

SEQ ID NO: 14806 - DNA, 1076 bp, Glycine max
  Clone ID: LIB3028-016-F7_FLI
gtagaactgaacaagggtttctctttctctttctctgtctgcttcttcactttctctcgtttcaatcgaaaaaaatcatgggcagaaaattcttcgtcggtggcaactggaaatgcaatgggaccactgaggaggtgaagaagattgttactactttaaatgaagctaaagtccctggagaagatgttgtagaagttgttgtgagccctccttttgtgttccttccttttgtaaaaagtttgctgcgccctgatttccatgtctcggcccaaaattgttgggttcgcaaaggtggtgcttatactggagaggttagtgctgaaatgcttgttaatttgggaattccttgggttattattggtcactctgaacggaggcagcttttgaatgaatcaaatgagtttgtgggagataaagttgcctatgcacttcaacaaggtctgaaagttatagcatgcattggggaaactcttgaacagcgtgaagctggtacaacaacggctgttgttgctgagcaaacaaaagcaattgcagctaaaatatcaaattgggacaatgtcgttttggcctatgagccagtttgggccattggaacaggaaaggttgcaactcctgctcaggctcaagaggttcatgctgatttaaggaaatgggttcatgacaatgtgagtgctgaagttgctgcatctgtaagaattatctatggaggctctgtaaatggaggaaactgcaaagaattggcagcacagcccgatgttgatggatttttggttggtggtgcatccctcaaggcggaatttgtggacatcataaacgctgctactgtgaagaagaattgaaattcgtagttaggaactgataatgctgcctttcaagctgcttcggaaattgctgtttttgagttttggttctgtgctttgtggccaatgtattgaactctgtttagtacctgaataaacatgctttcctttgatctcatccataggcgatcaattggattttgattaaatttctgattgcaaaaatagtgtaactaccataacatttggtgggtaaataatgttgaacttgactgt

SEQ ID NO: 14807 - DNA, 380 bp, Glycine max
  Clone ID: LIB3028-016-G5_FLI
atcacaaccctcaatgtgttgcaagcctacacattgaagcggatccgtgatcctgactaccatgtgaagttgaggccacacttgtcaaaggactacatggaatcaagcaagccagcagcagagcttgttaaacttaaccccaaaagcgagtatgctcctggtcttgaggacacccttattttgacaatgaagggtattgctgctggcatgcaaaatacaggttaagatgccatagcagtggtgtttttcttgttatacgatgtgtgttgtgattgtgacatggatgtataagcattataacctattatgtctactagagagatttccaacaatatcaaataactgttcctttgttattatgaatatagtactattattat

SEQ ID NO: 14808 - DNA, 494 bp, Glycine max
  Clone ID: LIB3028-017-D4_FLI
ttcaagggttcatttaccaagggaagggttttgtgatgattgatgagtcagtttatgaataaaggctgttggagtgaggatgtagtcattcattgtgggaagggagtgacaaccatcattggaggaggtgactccgttgccgctgtggagaaggttggacttgcagacaagatgagccacatctccactggtggtggtgccagcttagagcttcttgagggaaagcaactccctggtgtccttgctcttgatgatgcttgagcaaaaatcattcgttcctttgaagtttgtgctttatattattattatggttgggtttcagccaacagtggattaaggtacaatgagagctgcgagctcttgctcctgtagaggcttaatataggataggtttcaaaataagagggttttgtggcatccttggtgttgcattgagctttgatctaattgttcttgaacaatgttcatttccaaatgagtttactttgttggtt

SEQ ID NO: 14809 - DNA, 618 bp, Glycine max
  Clone ID: LIB3028-019-B11_FLI
gagcgttttaacagaagtaaggctgaacatgagaagcgggaaggcgaggaggagggtgctggtggaggaaatgaacctggaggcagggatggtgaacaggaaaaggttggggagaaaaacacggttcgcatatttgtgcatagcggaaccgtggccgaaggtgtcgggggtggcgaaggtggacctggagagtggggaagtgaagaggcacgagtacggagagagaaggttcggtggagagccattcttcttgccaacacgtggagggaatgggaatgaggatgaagggtacgtgatggcttttgtgcatgacgagatgacgtggcagtccgagttgcagattctgaatgcacttgatttgaagttggaggccactgtcatgctgccttcaagagtgccctatggcttccatggcacgtttgtggaggctcattgaagtccacctggactattttatttggtcgcttaaacggtaaaacacatttcagacaacaaacattttgttgccttttctacccttctcaataataaatatttatctatgctttcgcgaatcagcttgtagtttgtggatgaagctcagctgctttctgtttcttgcttcctttcttttgtttt

SEQ ID NO: 14810 - DNA, 1108 bp, Glycine max
  Clone ID: LIB3028-019-G10_FLI
aaataaactagtattaaggagctagaggcaatgggaaagagcaaggttcttgttgtgggtggaactgggtatgttgggaggagaatagtgaaggcaagtttagaacaaggccatgaaacctatgttcttcaacgtccagagattggtcttgacattgagaaggtgcagatgctgctttcattcaagaagcaaggtgctcaccttgtggaggcttctgtttctgatcaccagagcttagtggaagcagtgaagcttgtggatgttgtgatttgcaccatgtctggtgttcattttcgctctcacaacttgttggtgcagctcaaacttgtggaggccatcaaggctgcagggaacgttaagcgtttcttgccttcagaatttggcatggaccctgcacttatgggacatgcacttgaaccgggaagagtgacatttgatgagaaaatgaccgtaaggaaagcaattgaggatgccaacatccctttcacttacatttctgctaactgctttgcgggttacttcgctggtaacctctctcaaatggggactctcctccctccacgagacaaggtccttctctatggtgatggcaatgtcaaagttgtttatatgaatgaagatgatgttgcagcatacacaataaagacaattgatgatcctcgaacattgaacaagacggtatacctaagaccaccagaaaacattctcactcaaagacagctaattgaaaagtgggagaaactcataggaaaacaactagagaagtccagcataaatgaacaagactttcttgcttccatcaaaggtttggactatgcagctcaagtgggggtggggcatttctatcatattttctatgaaggttgtttgacaaactttgaaataggagaaggtggagaagaagcgtcagagctttatcctgaggtgaagtacacccgcatggatgaatacctaaaagtttataagcatgaaaaattatgtatttgaccttacttatcagtgattctatgtctgttgaatggtttgtaatcatgtttgatgtgattgtgaaatattttttttaactaaagtccccaagaacttgacataaataatagtgaccttgatt

SEQ ID NO: 14811 - DNA, 1248 bp, Glycine max
  Clone ID: LIB3028-021-F11_FLI
agaatggattggatacttctattaatggggctgaggtgaagcatgtgatgaaggtgagcctggatgatgatagacatgattactattcaattgggacttatgatgagaagaatgttctgttcacaccagatgatgctaagaatgatgttggcgttggattgaggtatgactatgggatattctatgcatccaagacgttttatgatcagaataaggagaggagagttttgtggggttggattggggagtctgacagtgaatatgctgatgtggccaaaggttgggcttcagttcagagtattcctagaactgtggagcttgataggaagactggcagcaacttacttcagtggcctgttgctgagatcgagagtttgagattgagaagtgatgaatttaaaaatttgaaggctaaaccagggtcagtggtgtcagtagatattgaaacagccacgcagttggacattgttgccgagtttgagatagacaaggaaacccttgacaaaattcctcaatccaacgaggaatacacgtgcagcaccagtggtggatctaaacaacgtggtgccttaggaccttttggtcttttggttttggcagatgaggggctttctgagtatactcctcagtatttttatgtcattaaagggagcaatggaaatcttaagacttccttttgtgctgatcaatcaaggtcttctcaggcaaatgatgtccgcaagcaaatcgttggcagcgctgttccagttcttaaaggcgaaaagttttccttgcggatactggtggaccattctattgttgaaagctttgctcaaggtggaaggacggttgtgacatctcgggtttatccaacaaaggcaatctatggagctgctaggttgttcttgttcaacaatgctaccgaggccactgtgacagcctcactaaaagtttggcaaatgaattctgcatttatacgcccattccaccctgatcagaagagttaaaaatttgaattggagatagaagagctatagtcacaaaggattggaatacatcttgggttggcaatttgtacttatcagttgtaatgtcctcccctgaataaccgacataaggttatggttcttgctcaaagcgcattccttcatttttgcccagttatgtttatcagaatttttgttgtaattttatcatatcatgtgaaatgatgcttacaagagaatctgttcaaagaaatatgatgttaatgttatccaattctatgct

SEQ ID NO: 14812 - DNA, 942 bp, Glycine max
  Clone ID: LIB3028-022-D10_FLI
ggataactgaaggtgatcatcattttagatattattataagaagttcatcaaataattgatcagaaatattcgatggggagctttgaaactgagctgaatcttaaggccacagagttgaggttgggattacccggctgtgatgaaactcatgacaaaagttcatccagtagtggatctgttgttagaagcaacaagagatcttcaccagaacccagtgtggaagagtccaggtgcaactctaatggttcttcagattctaccaccacaagtgatcatgatgaagacagtgtccaacctgcaaaggtacaagtagtggggtggccaccaattagatcttttaggaagaacagtctgcaacaacagaagaaggtggagcagcagggtgatggaagtggaacgtatttgaaagtgagcatggctggtgcaccttacttgaggaagatagatctgaaggtttacaatagctacccagaactcctcatggccttgcaaaatttgttcaagtgcacatttggtgaatattcagagagggaaggttacaatggatctgaatacgctcctacttatgaagacaaggatggtgactggatgctggttggagatgttccatggaacatgtttgtatcctcctgcaagaggctgaaaataatcaaaggatcagaagcaaaggggttgggttgtttgtgaccaacaaaacttgcaaaagcaaatcaaatcaaaatagtcacatgaggtcttcaaagacaaataccctttgtgttgtgcaagcaaatacatggtgtttatgagaactcatatatatatatatatatatatatatatatatatatatatatattaggaaaatagatggatattatctatgtatacattatttttgctttattaatttcagcagaggcggctttgaggtctgctttctaaattatatgtaatcctct

SEQ ID NO: 14813 - DNA, 1161 bp, Glycine max
  Clone ID: LIB3028-022-H7_FLI
accaaaggacgtgggtgtcctagtagtaaactgcagcatcttcaaccctacaccatcgctctcagcaatgatcataaaccactacaagatgagagggaacattctgagctacaacctcggaggaatgggttgcagcgccgggatcattggtgtggacctggccaaggacattcttcaggcgaacccaaataactacgcggtggtggtgagcacggagatggtggggtacaactggtaccaggggaaggataggtctatgcttatcccgaatagcttcttccgcatggggtgttccgcggttctgctttccaaccgtcgaagggactatagccgcgcaaagtaccgccttgaacacattgttcgcacgcataagggtgccgatgaccgcagcttcaggtgtgtgtaccaagaggaagatgagcaaaaactaaagggactaaagatcagcaaagacttaattgaaattggtggtgatgctctaaaaaccaacatcaccacactaggacccttggtgctacccttttctgagcagcttctcttctttagcacccttgtgtggaggcacttatttggcagcaaaaatgatgggaattcaccctcaatgaagaagccatacattcctgactacaaactggcttttgagcacttttgtgttcatgctgcaagcaagaccattcttgatgagcttcaaaggaacttagaactgagtgacaagaacatcgaagcatctaggatgacactgcaccgctttggcaacacctctagcagcagcatttggtatgagttggcttacatggaagcaaaagagagtgtgagaagaggagaccgcgtttggcaactcgcatttggctcaggcttcaagtgcaacagcgtggtttggcgcgccatgcgccgagttaccaagccttctaggaacccttggcttgattgcatcaacagatatcctgcacctctcaacaactgaagcaaaattctaaggcactagtattatgaatctatcagtgaggtcatgtgaaagctatggttaggatcaataagggtagttctaagttggtctttaaaatgttacagctgctttctgtttctttctcattttattattcctggcttgaaattctatacttttaattcctcattaggcatatggttgcctccttgttt

SEQ ID NO: 14814 - DNA, 1230 bp, Glycine max
  Clone ID: LIB3028-022-H9_FLI
gcatggaggtggttttacaatgtagttggagattcaaggtgccctatctctgacacttggtggcaaacagaaacgggtggcttcatgataactccactaccaggtgcttggccccagaaacctggttctgcaactctccctttctttggagttcagccagtcattgtggatgagaaaggtgttgaaatagaaggagagtgcaatggatatttgtgtgtgaagaaatcatggcccggggcattcagaactctgtatggtgatcatgaaagatatgaaacaacatatttcaagccattttccggatactatttcagtggtgatggttgcagcagggataaagatggataccattggctcactggaagagttgatgatgttatcaatgttagtgggcatcgaattggcacagcagaagtggaatcagctttagtttcacatccgcaatgtgcagaggctgctgtggttggtgtggagcatgaggtcaaaggacagggcatctatgcatttgttacagttgtggatggtgttccttacagtgaagaactgcggaaggaccttgtactcacagttcgaaagcagataggagcctttgcagcgcctgacaaaattcattgggcacctggccttccaaaaacaaggagtggaaagataatgcgaagaattctgagaaaaattgcttcccggcagctggatgaacttggagatacaagtaccctttcagatccaaatgtggtcaatcaacttatagaacttgcagattcttgaagccccaaactttgtattattataggtatgagaaatgctagtaacatactctagcatactttttttaacacacttttcattattagttaaagtttattggaaattgcaataatttatggatcatcactacttatttaatgatccgtattcgtgatcttgtagtttcttataaattttaatcaatagtagagagtgaataagaaagagtatgttagagaaagtgttgttagtattccttgtaaaggtatattagcccatgagaaacgaggacaaattttgccttgtgtatctgtaatttttatgggaatcttagttcatgtgataaataataaatcaatcttccatctcttcttaaaagtatattaaccaatgagaagtgacagggcaaattttgccttgtacatctgtatttttatggaatcttagtgcatgtgatgaataataaataaatcatccatatctctt

SEQ ID NO: 14815 - DNA, 974 bp, Glycine max
  Clone ID: LIB3028-023-C3_FLI
cacaaatggagaattccccatctcatccttcttctcttcaatgtcctccttcaaccctttctcccctccaccacccaccccttacctcaccaacctcggcttcggctactccatcgccatcgccctcggcgtcctcttcctcctctccaccctcatcctctcctcctacctctgctgccgcaccctccgccaccgcaacaacaaccgccacaccccccgtaacaacacctccgatggcatcgtcctcccgcgcgtgatcttcgtcgccgaggacgacgacgatgacgccacccgccagaacgacgccgtcaccggcctcgaccaggccgtaataaactcctaccccaagtttccttacgttaaggaaggtgattacgacagcacctgctcgatctgtctgtgcgagtacaaggattcggagatgctgaggatgatgccagagtgtcgacactactttcacttgtgttgtctcgacccgtggctcaagcttaacgggtcatgccccgtttgccggaactctcccatgccaacgccgctgtcgacgccgctgcaggaggtcgtgccgctctcacagtacgccgatgccagggcgaggaggtgaattcgaattttcttctccggtgtggctcgggttgctgggttcagtgggaaaagcataaaggacaaaacttagatcagttatttacatgtttttgcatgctgttattatcccatcaaaattggagttttacctttaatagttactggttagttttactcagattatccaagtaaaacttcagtttttgacgagagaacagcggtaaaaacacttgaataattgtatttaagttctttgtaagtgtaaatcttctcccgtgatggttgatgatggggagtttctgttttttgattatgtggttgtatggtgtcagcaagcgtgttgctggttactgaattattattggtaatgcactgaaagtctgaaactatgc

SEQ ID NO: 14816 - DNA, 981 bp, Glycine max
  Clone ID: LIB3028-023-G10_FLI
gcccgaggacgagaggaagtcgccggacatagaaattccccttgacgcgccgacgatgacgcacgacttcgcgatcacggagaatttcgtggtgatcccggaccagcaggtggtgttcaagctcggcgaaatgatcaaaggaggatcgccggtgatctacgacggcgagaagaaatcgcggttcggaatactgccaaagtacgcttccgacgcgtcgagcatcgtgtgggtggactcgccagacacgttcttcttccacttctggaacgcgtgggaggaacgcgacaaagacgaagtggtggtaataggttcgtgcatgacaccaccagattcaatattcaatgacagagaagagagactgaagagcgttttaacagaagtaaggctgaacatgagaagcgggaaggcgaggaggagggtgctggtggaggaaatgaacctggaggcagggatggtgaacaggaaaaggttggggagaaaaacacggttcgcatatttgtgcatagcggaaccgtggccgaaggtgtcgggggtggcgaaggtggacctggagagtggggaagtgaagaggcacgagtacggagagagaaggttcggtggagagccattcttcttgccaacacgtggagggaatgggaatgaggatgaagggtacgtgatggcttttgtgcatgacgagatgacgtggcagtccgagttgcagattctgaatgcacttgatttgaagttggaggccactgtcatgctgccttcaagagtgccctatggcttccatggcacgtttgtggaggctcattgaagtccacctggactattttatttggtcgcttaaacggtaaaacacatttcagacaacaaacattttgttgccttttctacccttctcaataataaatatttatctatgctttcgcgaatcagcttgtagtttgtggatgaagctcagctgctttctgtttcttgcttcctttcttttgtttt

SEQ ID NO: 14817 - DNA, 826 bp, Glycine max
  Clone ID: LIB3028-024-C10_FLI
cctcgaacccggccacttcgccatgtccgagcaaccatgcttgccatcgggaaggccacctccgtcgacatctgccgcttcttctccaaacctggcccctacgtgtcctgcgacacgatggagtttctattagcgcgctacgacggcgagctagacgtggatgcggtggactccgaggggaggacgacgatccacgtggtggtgagggaggggcacacgagggttatccggttctgcgtcacgatggggggaaaccctaatcgcgtggattcgaaggggtggaccccactctactacgcagcgtggaaggggcacgtgaaggctgcggagtgtttgttggaatgctccaacgtgaagtgcgtgagggacagggaagggagaagaacattttctgttgtcgcggagagtgagcacgaacattctgttattgacaaagtccagaaagaaacaaagagccgcgctggtttttaattagattggattctggctgtttatgggtattttggtccaattctgctgggggaagaaattgaagtggtgaagactaaagacaaatattgttacgggaacaaacggcgaagagcatgaaggatctggggtaaagtgatcaaaattcaaggctaagtattcattttatgctattcatttagagcattacatcttcattcttctccatcttcctccattttattccacttcctttgtctttttttgtatttgtaagtctttcttgacaatgagaaactaaaccttctattgttgggagctcacccaccaaacactcttgatgtaatgattttaactatctatttaatattatttcgat

SEQ ID NO: 14818 - DNA, 1618 bp, Glycine max
  Clone ID: LIB3028-026-F9_FLI
gttcattgctcaattgtttccctcacaactcataacctctttcccatttaacctttgaaaaaattccatactgtaacaacagatcaccatggctctatcacgtttgtcccaccgcagcatcggatccactctcacaaaacccttctccgccgccgccgcctcctcccgttcgatctccacctcggacacccccttaacaatcgagacctctgtccccttcaccgcgcacaactgcgaccccccgtcacgcgcggtcgcgacctcctcctcggagctcctcaccttcttccgcgacatggccctgatgcggcgcatggagatcgccgctgactccctctacaaggccaagctcatccgcggcttctgccacctctacgacggccaggaggccgtcgccgtcggcatggaggccgccatcactaaaaaggactccatcatcaccgcctaccgcgaccattgcatcttcgtcggccgcggtggcacgctcctggaggtcttcgccgagctcatgggccgcaaggaaggatgctcgaaggggaagggcgggtccatgcatttttataagaaggagagtgggttttatggtgggcatgggattgttggggcgcaggttccgttggggtgtgggttggcgtttgctcagaagtattctaaggacgagagtgtcacttttgctatgtatggagatggcgctgccaatcagggacagctctttgaggcgcttaatatcgccgcgctttgggatcttcctgctattttggtctgcgagaataatcactatgggatggggactgcggagtggagagctgccaagagtcctgcttattataagcgtggggattacgtgcctggcttgaaggttgatggtatggatgttcttgctgttaaacaagcttgcaaatttgcaaaggaacatgctttgaagaatggaccccttattcttgaaatggacacttatagataccatggacactctatgtctgatcctggcagcacataccgtacacgtgatgaaatttctggtgtgagacaggagcgtgatccaattgagagagtaagaaagctggtattgtctcatgatattgctgctgaaaaggagctaaaggacattgagaaagaagtcagaaaagaagttgacgaagccattgctaaagcaaaggagagtccaatgccagatccatctgatctatttaccaatgtctatgttaaaggttacggagttgagacatttggtgctgataggaaagaagtgagagctactttaccataattcagaactttgtcctttgaatatcttgccaccttgtcgtagcagactcttcaaaatagtgaagaataaaaggttctacagagggtcatctctctcccctattcgttgagtttctgcccgcgtgtatagtgtgaatttattcatatgcttggttagcaatggggcggggtttgttatttttttgtcatgtaatatttgcggatctaacagccaaagcatcattgtgattgatgcaactggggtgttctgcaaatttgaggaatacattgtgcactactgaagatatgtagttcagaatattttagacacgtcaaacagttcaaaaatctatatagatatatattaaag

SEQ ID NO: 14819 - DNA, 606 bp, Glycine max
  Clone ID: LIB3028-027-B12_FLI
cttggtttcaatgaaccatgacactcaatcctgcatggaccccaatgtgatggaggctaaggtggtggtgagttcttgtggccatgatggaccctttggcgccactggggtgaagaggctcaagagcattgggttgattgatagtgtgccagggatgaaagcccttgacatgaacaaggcagaggatgccattgtgaagctcactagggaggttgtgcctggcatgattgttactgggatggaagttgctgagattgatggtgctccaaggatgggtccaacatttggagcaatgatgatttcagggcagaaagcagcccatctggctttgagatcattgggacttcccaatgctttggattctgtaggaaacgttcatcctgagcttgtcctagctgctgctgaatctgctgaaattgcagacgcttaattaatgttgcaacaaatttaagttaaaatatcagtgcttgcaactagaaataatacttgtagttagggaattaagctttgaaggtgttggtagtgatctattggggtggttgatgtgactctctacgaagtttgttaataatatgaaggtttgaaggtatgggtagggtaccatcc

SEQ ID NO: 14820 - DNA, 356 bp, Glycine max
  Clone ID: LIB3028-028-B8_FLI
ggagtttgtaaccatgcttttcacttccattgcataagccgatggctcaagacccgtcaagtatgtcctctagataatagcgagtgggagtttcagaaatacggtcactagaactttgatgcggctgagctacttccatcttggacatttggattgtagcatttctatcaactttatagctctacatgttgtctttgcttgcctattggagttttattcaaaagagtcacttctaaatgctttcgcatatagttacgcccccagttcctaattcgatcatatccttctctaacaatgtggcaaaacggtggtgttaattcactcaatgacaagatttatggaatattatagcatgc

SEQ ID NO: 14821 - DNA, 844 bp, Glycine max
  Clone ID: LIB3028-028-G1_FLI
caaaagcaaaagatgaagatccagtgtgatgtgtgtgacaaagtggaagcctccgtcttctgtcctgcagatgaagctgctctttgccatagctgtgatcgcaccattcaccgcgccaacaagcttgcaaccaaacacgcccgtttctctctccactaccccacctccaaagacttccctctttgtgatatatgccaagagaggcgtgcatatctattttgccaagaagacagggcgttgttatgcagggaatgcgacgttcctatccacagagccaatgagcatacccaaaagcataacaggtttcttctcacgggtgtgaagctctctggtacttgtttagatcctgcttcgtcctccaccaattacaccaataataatagagtcactggctctgaaggaagaaacgacgctcgatctagaatgaacagacccagatcatcagtttccaatgaagaaaatgcaagtaattcttcttgcaaggttgaagacaacgtggctagtgacactggttcgatttcaactagcagcatttctgagtacttgattgaaacaatacccggttactgttttgaagacctccttgatgcttcgtttgcacctaatggtttctgtaagaagcagaactttgatcatccctgggcgtttcaggaccaaaagcgaacaagtggagacactatggccgtgccgttcctgaaactagtcatccattgatcaaaatatctaaaccctcgcggtcataaactgtttgtaaaaatctgttggaaaatatcttctttatttttgttatttgtaaaaatctgaaactttatgattttattttttattctctattcccaaccac

SEQ ID NO: 14822 - DNA, 1368 bp, Glycine max
  Clone ID: LIB3028-029-E11_FLI
gctcctttatatattgtttccgtgtttttctctctttgtgattttgtgaggcccaaactaactttataagcatttacgtgtttgaaattaatattttgtgagctagctagcttcttcatcatggcaaagtcttctactgaaaagaatggactgaagaagggtccatggactccagaggaagatcagaaactcatcgattacattcagaaacatggacatgggaagtggagaacccttcccaaaaatgcaggactaaaaagatgtggaaagagttgtcggcttcgctgggctaactacttgaggcccgatataaagagagggagattctcattcgaagaagaagaagccatcattcagttacacagtgttttgggaaacaagtggtctacaattgctgctaacttgccaggaagaacagataatgagatcaagaattattggaacactcacatcaagaaaaagctattgaagatggggattgatccagtgactcacacacctcgccttgatgttattcaacttgcctccattctcaacacatctttatacaattcagcaccccaattcaactacccttctctttctggaattggaagatcagtgataaacccaagccatatgctaggtttgctcactaccctgctatcatgtcaaaacagaaattacaaccctgatgtattgaataataaccaacttagtggtggtagcactctactgcaaaatcaacaccaatgttcccgaatgcaacttgattctacacaagccttccaaccaaaccaaccacaagtctcactacaagaaaaccacattgctaagtctaattctaatccattgaatatggaaccccaagttatgaaaactacattagagaatcaaatcactccaattgctaccccttttagccaacaaaacacactaccaaatttgtggcactataatactgaaggtcacatatctgatctaccaacaatggctcaatcatcatcagctatgcaatgtttctcttctcccaagttcaattctatatacaacaatctcttggaaaatcagaatttgtgtaacaacaacgaggggatgccaaatttcaatctaagttcactgttatcgtccacaccctcatcttctagcccaattagtactttgaattcgtcatcttccacaacatttgtcaacggaaccactgaagatgaaagggacacttacggcagcagcatgttgatgtataacatttcaaatggcttgaatgactctggacttttgtgattgtacaagttgtgctgctacgtgatttagtttttcttttttctttttttgagatcagtgacatttaatgtcattaaaacagaaataatattatataattattat

SEQ ID NO: 14823 - DNA, 1393 bp, Glycine max; identical to SEQ ID NO: 8435
  Clone ID: LIB3028-030-C9_FLI

SEQ ID NO: 14824 - DNA, 890 bp, Glycine max
  Clone ID: LIB3028-030-F9_FLI
aatggcatttccgtccgtaacctctgtaactgtggagaacgtgacattccctcccaccgtgaagcctccctgctcccccaacaccttcttcctcgccggcgccggcgtcaggggcctccaaattcatcacgctttcgttaaattcactgccatctgcatttacctccaatacgacgccctttccttcctctccgttaagtggaaaaccaagtctgctcaccagttaacggaatccgaccaattcttctcagatatcgttacaggtccattcgagaaatttatgcaggtgacaatgatcaaacccttgacggggcagcaatactcagagaaagtggcagaaaattgtgtggccatctggaggtctctcgggatttatacagattcagaagccgaagcaatagacaagtttctttctgttttcaaagacctaacattcccaccaggctcctctatccttttcactgtctcacccaatggatcattaacgataagtttctctagtgatgaaaccattccagaagttacgagtgctgttatagagaataaactactctcagaggctgtgttggagtcaatgataggtaagaatggcgtttcccctgcagcaaaacagagtttggcctccagattatctcacttattcaaagagcctggggtttgtgaccctcaatctcataagtgaactcattatatcatcaacccaagatcaaaatcccttaccactctgctgtgactttcagtactgtgctactaataaataaagggcaaattacagtttttctaagtgctaaacttctagtaacattattgtgttgttcttactgtccatgtctaagtactgaactgttgtatttgatttttcgttgggaattgaagcaactaattacatt
